United States Patent Application Publication US 2019/0348154 A1 - sequence listing, part 82

SEQ ID NO: 311522 - DNA, 1086 bp, Proteus mirabilis
ttgaccaccatacgtgaaattattttagaatcaactcgttcatattttatcgaaaaagaaaggataaaaagagcggaggtagttacaaactggattgatgagggtatatatccatatgacaaaaataattatattgacccaactcgagaatctgaaaggaaggtgtttgatatactagcggttaatgttcaaacctatctaagtaaattttcaaaagcagataaaaaaacgaaaaaattcacctttaaattactaaagcaggcaatagaggcgaatccaagttcagtacaaaagataataaatgaagtactagggttgtcaccaaatgagcagcaggatttagcaaacctattagatcggacaacgctatcgtcaattattagttcgtctaacattgtggcaaacaggattgattttcttaatggcttagaacgccaattatttgatgacgaaaataaaaagaaaactttagagagagatcatctacataaaatactagaaaaggaatcttggatctttaaagaggaattttatttagctggaagtgaaatatggctaggacaattgttagaaaagcatctaaatatattagataaaggcgatgagtttaataaagatgattcagttcttctacctgatggacgaagaggaagagtagacttaatgctatctaaggttagaaaaccatctgatgatacaactgaaatcttggtcgttgaactaaaaaggcccagtaaaaaaatagatgatactgttctttctcaaatagaaaagtacgcaatagcagttagtgagcatgagagttttcatcatgaaaaagttaagtggatctttatggctatatcaaattcaatggattactacgcgaagaaaaaagtaaaccaaagagggaaagcaaaagggctactatatgatgatgcagaatataacgttgaagtgtgggtatatacatgggctgaaattataagtaatgcaagagcaagactgaacttttttagcgatcaattaaaatatcaagcgaatatggaatcagctgagaaatacttaaaaacggttcatgagaaacatattccaacactatcttga

SEQ ID NO: 311523 - DNA, 795 bp, Proteus mirabilis
  misc_feature (782)..(791): n is a, c, g, or t
atgtttttatttaaaaaagctgttatcgctttgtcaattaatatcgcattagtttcttcggctctggcctgcacaacgttattagcagggagtgaagcaactaatgacggctctttgattgtagctcgtagcgcagatagtgatgctttaaaagcacaacattttgttattcatccagctaaaagtaatcagactggcatttatagcactcaagcccatcatggcgctaataactttacttatccactacctaaacactcattacgttataccactgtacctaattggaaaactcaattgcatggtgcaacgggttttaatgagctaggcgttggggtgagtggtacagaatccatttttgcctcacctaaagcattggcgttcgatccttatgttgaagatacggggatcactgaagatgatattccagatattttactctcaagggcaaaaactgcccgtgaagcaattgaattactggggaacatcatcgaaacacaaggtgcgggagaaggatttggggttgcagtcgttgataaaaatgaggtgtggtacctagaaacaggtacaggtcatcaatggatggcgcaaaaactaccaaaagataaatattttgcgacgggtaatcaagggcgtttacaggcctaccatacagatagtaatgataatttaggttctaaaaacttagttgagtttgcaatagaaaaaggactttatgatcctgccactgatggcgaatttaatttttctaaagcctatacgcgtgatgatgaacgtgatcnnnnnnnnnnataa

SEQ ID NO: 311524 - DNA, 624 bp, Proteus mirabilis
atgaaatcgtgtgcatgggataaccagtgggataatgttgaggcatatctgtcttggcttgatgaggtactagttgaattctggcgagtattaaaacccaatggtagtttatatttattctgtggttctaaattggcatcagatactgaactgcttgttcgcgggcgatttaatgtattaagccatattatttgggctaaaccatctgggccatggaaaaaacaaaataaggaaagcctacgcaccttttttccttcaacagagcggatactctttgctgaacattatcaaaagccaatcaccgctaaaggttctgaattttctttaaaatgccagaagttaaagcaaaacgtatttaagccattgattgattattttagaaatgctcgtttagcactacaggtgagttctaaggagataaatcaagcaacagataagcaaatgtgcagtcattggttcagcaatagtcagtggcaattacctagcgaggaagactataaaaagttacaaacactgtttacacatattgctgataaacaagaaaagttatcgccgttatcccgccaatttaccgaattagagcgcgagcaggttacattacaaaaagactatcattctttgtaa

SEQ ID NO: 311525 - DNA, 261 bp, Proteus mirabilis
gtgccttacaccgatgtgtgggcttatccacctgttcagtattatcccggtaaacacccttgtgagaaaccatcagctatgatggaacacattattcgctcaagtagtcgtgaaggggatctggttgctgatttctttatggggtcaggtgcaacactgaaagcagcactaaaacttaatcgaaaggttttaggtgtggagcttgagagagagcgatttgaacaaaccgagcaagaaataaaagcatcaatccgtaagtaa

SEQ ID NO: 311526 - DNA, 969 bp, Proteus mirabilis
gtgacaatcctcgcaactgggggaaccatcgcagggggtggagactctgccacttcttcaagctacacagcaggaaaattaggcattgatacattgattaatgccgtacctgaggcaaaaaaagtggctaacttaacaggcgagcaagtggttaatattggttcgcaagatatgaacgaccaagtgtggttaaaactggcgaataaaattaatacggattgtgataaaacagacggctttgtgataacccatggtacagatacgatggaagagaccgcctattttcttgacttaaccacagcatgtaaaaaaccagtggtgatggtaggggctatgcgcccagcaacagcattaggtgctgatggtccattaaacctctataatgccgtggtggtggcaagtgataaagcatctgaaaatcgtggtgtattagttaccatgaataattcggtgattagtggtaaagatgttgtcaaaatgaatacgacagaagtgcaagcattccagccgattaatgcaggtgctcaaggttatgttcatgatggtaaagtacactattacactgctgcaacaccacgcgctgagaaagttgcctttgatgtcagcaaattaaccgaattaccaaaagtaggtattgtttataactatgctaatgcatctgatttaccggctaaagcgtttatagataaccactttaaaggtattgttagtgcaggtgtcggcaatggtaacttatattctgacatcttaaatactttagcagatggtgtaaaaaaaggtgttgttgtggttcgttcaagtcgtgttccggttggatttaccacacaaaatggtgaagtagatgatgcaaaatatggctttattgcttcagaacgtttaaatccacagaaagcaagagtgttattacagttatctttgacagaaacacaagatcccgccacgatccaagaaaactttgaaaaatattaa

SEQ ID NO: 311527 - DNA, 249 bp, Proteus mirabilis
atgatcatcttttatgtgtcattttttattcaatttattgatcctaaatatgaaaatgcaggggttcccttttttgtattaggtgtaatattagaaatatgtagcatgctttacttatctgtacttatttttggtggcgttgctattactaataaggttaagcataacaaacgattagcatcattatcgaatagttgcattggtgctgtgttcttattatttggtgccaaactcgctttaacggcttaa

SEQ ID NO: 311528 - DNA, 621 bp, Proteus mirabilis
ttgtttagtttggtattggaatatatcggtattttcttcttttgggagaaagagggagcgcaacatagttaccaaattatgctgattgaacgaacttattttgctgagagttttacacaaagtatatttgtattctcaccagtgataacaacaatttattggatcactgatttttcacaagggatacaggataatttgctgaagatgccattattcgctataaaaacgggtaatggtgttactgatgggattaatgtaggagcaataaaagcgttccaaataggagaacaatatttactggcaacattctttgttttacaaatagtgataatgcgagtcactattctcgtgctatcaattccattatttatcttagtgataatagtcgccgttgttgatggtttggtcagacgtgatttacgtcgatatggtgcagcttatgaatctagttttgtttatcatcatgctaagcgaataatcaagcccgcaatttatatcctctgtgtattgtatttatcattgccatttgcagtttatccgaatttcttgttgttgccttctatctttttgatagggatagctatttctgtgacaatagggtgttttaaaaagtatttgtag

SEQ ID NO: 311529 - DNA, 291 bp, Proteus mirabilis
gtggctaaagctaaggcactgattgaacaattttctcaggtagaaggggatgagttagagggtgacgcattaatgggctactgtatacacgcagcaaattgcagttttttagacgatattcatcaatcaaaagcgttattgtacgacttgcaagctcgctatttgtgccgtcatcaaccgagaacatggcagatcgccaatgaaaaagccgcaccttataaatacaaccaagttttattgagttaccaccgttatatcgcctgtttaaatacccaaggagaaatgaaatga

SEQ ID NO: 311530 - DNA, 174 bp, Proteus mirabilis
atgagttttcctggtaaaacccaggcaggctcaatatactcattgccacaggctaaacggattgtcggagaggccaatagccaacttatgaccaaatctgcatattggtttggtaaattcaataacagtgtcgcaaccaaatgcgttatcacagcatttgatttttccatataa

SEQ ID NO: 311531 - DNA, 192 bp, Proteus mirabilis
atgatggtaaataatggaagtaattttattgaaataaaagataaagtgacaaaaaatttggaacatgttgagttatatatactcactgataaggtacacccgaatgattacaatagcaccgccgaagaacgggtaaaaaatatacatatatgcatgagtgagttttcaaggttaatgaataatttatcataa

SEQ ID NO: 311532 - DNA, 270 bp, Proteus mirabilis
atgaacgatagtgaatttcaccaattagctgacgaattgatgtcagaaatagaacaaaccattgataattatgaaggtgatgcagatattgattgtgaaatcaatggtggtgtaatgacattaacctttgaaaatcatagtaaaattatcattaatcgtcaggaagcctttcatcaagtatgggaaggcatcgaattaaacggtatttattttgataccatgttggctcaagcaatcagcgaacaaagtggtgaagcattttctttttaa

SEQ ID NO: 311533 - DNA, 543 bp, Proteus mirabilis
atgactaacgctcaaattaaaagaacgtgggcggtatctaatatcaatggcagtgaagaagttatgcgttatgcaccagaagccgtatacggtattaatgaatcaggtgctggaaactggatcacgggtcaatgggaagaagagaaaaagcaattaatgtctaaatcatttggtggcgcttcttctgatactgatattgttattgtctctgatgcagtgacccccagagactacagttacggcataatgataaaacaaaccggtagtgatgatatccctatttatcgtccatacacgggaaataacggcttgcctattcgctttaaaccagaacagtcatcatcaccaatgtataaagaggtaatggaaaaacgccaacaaagcgttaaggaagctcaggataaaagggaacgagaagaagcattggataaatcacgctcagaatttgatgaacgtcgtcaaaatatccgtgagcaatataaagaagctcacaatgagcgagtaaataaattcaataattatttttcttgggataaaaactga

SEQ ID NO: 311534 - DNA, 582 bp, Proteus mirabilis; identical to SEQ ID NO: 297847

SEQ ID NO: 311535 - DNA, 501 bp, Proteus mirabilis
atgagtgaaacaatgacagcacctaaggtcgtattaacggtaggaaatagcatgatgggggatgatggagccggtcctctattagcggacttaatggaagcaaacccgattgatggttggatggttatcaatgggggaagtgcgccagagaatgtttcttatcaaataagagcattacaaccgcaatgtgttgtcattgttgatgcggctgatattggtttaaaacctggtgaaataagggtaatagatcctgattatattgcagaaatgtttattatgagcacccataacatgccgttaaattttctgatagatcaattaaaggacgatatccccgatattactttcttggggatccagcccgatctggtgggattctattacccaatgaccgaagcggtaagaaacgctgttgataaagtttatcaaggcattaagtcttggcgagttgattactttcctgagcttgaagtctgtgatgaagacgatatcgaagaatag

SEQ ID NO: 311536 - DNA, 627 bp, Proteus mirabilis
atgaatatcgcagaacttatccgaaaaatacaaaacctgatccgcactggcgttgtgattgatgtcagcgcagaaaaagggtgtcgagttaaaacgggcgacaatgaaaccgactggcgtccgtggcttactgcacgtgccggtaactcgcgttcatggtgggcgccgagtatcggcgaacaagtgttattgctttcaatcggtggcgacttaaccacctcgtttgtgttgccagcaatatttagtgacgatttttcagagccgtcaagctcattaacggcacaccgtcatgagtatgaagacggtgcggtgattgaatatgagccggcaacaggggcactaacagtaacaggaattaaaaccgccgtgattgaagccggagagtcggtcacggttacatcacccgacattacgtgtgtcgcgacaagcaaaatcaccttagatacccctaccgttatttgcaccaacaacttaaccacgggatcactgacggtgcaaaaaggcggcacaatgaccggcgatattacccatgttggcggacaaatgtcctctaatggcgtggtggtttcaacccatacccacggtggtgtgcgtacgggtgatggtaatacggggaaaccgcaatga

SEQ ID NO: 311537 - DNA, 405 bp, Proteus mirabilis
gtgagtaagtttacattgagtcagcgcagtaaaaataaccttattggcgttaacccactgctagtgaaaattgcttatcgtgcattagaaatttcaccggttgattttgcagtaattgaaggtgttcgcacacttgaaaagcaaaaagaaaacgttaaaaaaggcgtttcaaaaacattaaacagccgtcatttaacaggcgatgcgattgatattttaccctctgcgattaaaccggggatggaatggcaaccgtatttttttgaacccgtattaatggcattcaaacaagccgcagatgaagaaggggtaacattgcgttttggtaaaaactggaaaagtgatcccagtttacccgttgaaacccgctttcctgactatcctcatattgagatcccacgatga

SEQ ID NO: 311538 - DNA, 456 bp, Proteus mirabilis
atggattatgtttctgctaaccctgtgccacaaaaagacgaaaccattaaaaataatggctttttccctgatattcagactcgtgattttcaattgcaaactcgcgtcgatggtacggtgacaccggaacgactgaaaagcaccttactgaacgccatgattgaagtgaatcgagagttgtatcagtggcgtattggtcaatctgcgaaaacattaaaagacgtacctgctgaacaaattaacggtgaaagtgaattgatgattttatatcaacgtgccgtgttctgttttgcaaaggcaagtttaatcgaacgttatcgcgatattgatactaccgcacaaggcaataaaaaagccgacaccctgacaccagtgattgatgaagtgtggcgtgatggtcagtgggctttacaacgtatcaaaggggaaacccataacacggtggagcttatctaa

SEQ ID NO: 311539 - DNA, 540 bp, Proteus mirabilis
atgagttatcaacatgcaggaatatatgccatcgtaaaacgtgttattggttggcttatttttattcctgcctttatttcaacgacagtttcgttgattgagttagctgcgatgccaagagcaaatggcgagggtgttaatgctgtgattaatgatttttttcgagtattagcagaaatggtacaatttaacaccccgtggctagactttttttggcgtcattctccagtacccaacactcaaataggttttagccaacagaatattatcttctttgtgatcttctttttaatgtttattggcttagcactgagtgcatcagggttaagaatgtatcgccaagtgaaatatttaaaggaaaatattcaagatcaactaattattgaacgagcactaaaaagtggtattacagcgcaagagctagagcagaatataaaattgccaagacatacactatttactcaagtcatggtgctgtatatttcacctattattgtgatcgcaattggttattttctgctgaaatttttaggctggtag

SEQ ID NO: 311540 - DNA, 2634 bp, Proteus mirabilis; identical to SEQ ID NO: 305442

SEQ ID NO: 311541 - DNA, 501 bp, Proteus mirabilis
atgcaaaagtttaatcgtgaattacagaatcacattcttaccgtctgcattgcgtcatacccacatcacacatcatggaatcagtatgacccagaatcatttccaggattaatggatgaccatatacttgctgccaatatttattaccttagtgaacgaggtttaatttccgtctctccgcagcgcacagatgatccatactctctttttgaaaatattagggctactgcagacggtatagattttatgatgggtgatgaagggttaaagtctgtgctggacattagaacaattaaaattcactctgatacaatgactcaacttattgatattatttcttcttcaaatattcctgaagaagagaagcgtggtattttatcaaaactccaagagcttcctgcaagtgccataacacatttgacgaatgaattaacggtgaaggctgctcttgctctgccgggcgcacttcaactaattcaaaagtatttgcagaatttttag

SEQ ID NO: 311542 - DNA, 966 bp, Proteus mirabilis
atgagtacaaaaaatttatcaacacccttgctgatggtagcaactgtgttagcagggatgctatcaccaatgcagtctgcggtgaatgggcaactgggacatgtattaaaagacggtaatgctagtgcagttatctcttttgccagtggtttagtggtcatgttttttatcattatgtccaaaaaacaatatcgccagcaatttgcttctattccgacattaattaaaacacgtaaaattccattatggaattggtttgctggcctctgtggcgcaatggtggttttttctgaaggagcatcagccagtgcattaggaatagctacattccaaacagcattaatttcagcactgttattatcaggtttattatgtgaccgctttggtataggtgtggatgagaagaaatacttcaccccatatcgtgtattaggtgccgtattagctgttgttgctactctttttgtcgtttctccacagtggcattcaacctcttttatttacttagctattctaccttttttagcgggtttattagcgggatggcaaccagcaggtaattcaaaagtggctgaagcaacaggttcgatgatggtttctattacttggaactttattgttggatttactgttttaacgattgcgttagtagtacgtatggcgttagggcatataacactggagcttcctgctacatggtggatgtatttaggtgggcctttagggttaatgtctattgcattaatggctattttagtacgaggcttagggttactgatgttaggtgttgcatcaactgcgggccaattactgggttcggtattaattgacctattattaccttcgttaggaaatactgtttatttagtcacaatcatcggtacgttatttgccttagtcggcgccattgttactaccattcctgagtttaaagcgactaaatcagtaaaaagagcaggggcataa

SEQ ID NO: 311543 - DNA, 963 bp, Proteus mirabilis
atgtctattattcatcttgaatttgaaaagcctattgttgaattagacgagaaaatagatgcattacttgcattcaaacagtctcaagatgaaacaacggcagttgatatagacgaagaaatcgccaaacttcgccaaaaaagcctttcattaacacgctctatattttctgatttaggggattgggagatagtacagttagcacgtcatcctatgcgcccttatacattagattatatcaaagctatttttactgatttccaagagttggccggcgatcgtgcttatgctgatgataaagcgattgttgcagggttagcgcgtttagatagaaaaccagtgatgattatcggtcaacaaaaagggcgagacactaaagagaaagtaaaaagaaactttggtatgccatcaccagaaggttatcggaaagcattacgcctgatgaaaatggctgaacgcttccatttaccagtgattatttttattgactccgcgggtgcttatccgggggttggtgctgaagagcgggggcaatcagaagccatagcacgaaatattcttgaaatgtcccgattaaaaacaccgataatttgtacaataacaggggaaggtttttctggtggtgcattagcaataggtgtgggggatcgagtaaatatgttgcaatatagtacttatgctgccatatcgcccgaaggctgtgcctctattttatggaaaaatgctgataaagcacctattgccgcccaaaccatgggaatgacggcacctaaattacaggcattgggtattatagactcaattattcctgaaccattgggaggcgcacatcgccactaccagcaagcggctgaattcgtaaaaaaacagctcctcgcagatttaacagaattgaatagttattctaaagaagaactgcttgagaaacgttatcaaaaattaatgtcctatggttattgttaa

SEQ ID NO: 311544 - DNA, 888 bp, Proteus mirabilis
atgtcaattgaccttaatttattacgtattttttctgcggttgcagagcaagcacagtttgccagtgctgcacgatcgctttctatgccaacatctaatgtcagtagggcaataaaacagctagaacaacagcttaactgccgattaattgatagaaccacgcgaaaaatgcgtttaactgagcaagggaaaatcttgtatcagcaagccaaaaagaccttatatgaattagataatgttgtagaacatataacgagtgatggcccattaacaggaacctttagactcacgatacccagtgaatatggtagtgagttacttgccgatattttagcggattttgctgcacttcatcctaacttaaccattcaatgtgatacgcagctaatgccaagaaatgttatagaagatgatattgatttacttctaacatttcatcgtggccaattagccgatagtagctaccattcacgtctcataaagtcgtggcgtagtattgttgttgcctcagagagcttattagcaaaaacgggtatccctacagatattgaacaactaagccaattaccttgtatttccagtttaagtgcattagaagggcaaccgtggatctttattgataaagagcagaaccctgtaaaagtgacaattaatagctgttatcgtgtaaatagtgctatcttagccaaagctgccgtattaaaaggtttaggttttgctattttagctgaacattgttgccttgatgcgataaaggcaggcaaattgcgagctatttcttttcctcaacagcccgcatcaattagtttagtcgcgatatatgcaagtcgtcgttcgctttcacgtaatattgaacattttcttgcatttttaactcagcgtttataa

SEQ ID NO: 311545 - DNA, 735 bp, Proteus mirabilis
atgtcacgactcattaatgcaatgattaaagactatgaaaaagtgtttagtgaattaaatgacgactttgaaggttttacgatggatgccagctttgccagtcaaacacgcatctggcttaatcggctaaaacgcaaatgggataagatttttaaacaaaaatccacagagattgcggataaatttgtttcccaagtcgatataggcgcaaagcgtaatttagatgattctcttaaacagttgtcaggggggatcaccatcaaaacgccggatatgccacaacctctcaaagataaaatcattgcctctacagctgaaaacgtatcgttaattaaatctattccactgcaatttcatcaacgtattgaaagtgcagctttacgcgctattagccaaggtggtgaaggtacaaagacgctattagaggaaattcggcaaacaggcagtgtgactgaaaaaagggcgaattttattgcggttgaccaaacgcgaaaaattacgacagcggtgaactatgagcgcatgaaatccgccggtattcgtaaagccatttggcggcattcaggggggagtgcagaacctcgacaattacatcaaaaactcgatggtaaattgtttgacttagataacccgcctgtgattgatgaacggacaggcgagcgtggcttgcccggacaattaccaaactgtaagtgcttctggacacccgtaatagatttcggtgaggagacatga

SEQ ID NO: 311546 - DNA, 246 bp, Proteus mirabilis
atgtatcaagatattacccaacgcttcaaaggtgacgtaagtaaattaagcttaccagctaactttgaagatatggttaattcatttggtggcaatattaaattcgacgttgaacaacatcttgctcataaatggaaccaaacggtaggggctcgtttagaagtcacccgtaactttaatgtgatcaccgaagtgggctttaataatcgtaatagtttctttgtttctggtgagttccgtttttaa

SEQ ID NO: 311547 - DNA, 873 bp, Proteus mirabilis
atgcctcagcagtcttactttaaacccctcttatcagcactacctcattcattccaaacctctttttttaaccaactcaatcacctaattagctactctcccaccatcggcctgatgggtaaaacaggggctggaaaatccagcttaattaacgcactattccaatcgcccctatcgcctgtaagtgatgtatccggctgtacccgccaagcccagagtttcaccatggcgatgggctgccatgtgatgacatttattgatttacccggcgtaggggaaagccttgagcgagatagagaataccaccagctctatcataacttattgccagaactggatttaatcatttgggtacttaaagccgatgacagagcatggtcttccgatgaacagtgttatcgctttctcactgagcaatgtggttatcaaccaagtcgctttctatttgtgctgaaccaagccgacaaaatagagccctgtcgccagtgggatgaacacaaccaccagccatcccttgaacaagtggctaacttagaattgaagcagcaagccgtgttaacaacatttaaaccgcatcatccagtgatgacgatttctgcggcagaaggttttcaactcactgaattagcagagcaattaatacaggcgttaccggcgcaagccagtagcggggtcgctaggcaactgaacaacacttatcggacacaatccgtagagaactccgcacgtaacgattttgggcaatgtgtcagtgatatcgtcgataccataatcgatattattccattacctacattgataaaacatacgatcagcactgtcaaaaacagcatcgtctccgtcgctaaatccctgtggagcctgttcttttag

SEQ ID NO: 311548 - DNA, 795 bp, Proteus mirabilis
atggcaaagggtttaaaaatgttttttgctagacaatctaaaaacgatgatcaattggtttctatttctgcgattacaaaagatagtaaagatgggcttatttgcgagtattgcgatgcgaatgtgacttgggtggattcttttgtgcgtttaggtagaacgatatcgccatatttacgcttaggccctaatcaagaacattctgcttcatgcaaaaataatgtcagaacggcggtagaagtattggttgcaaagtctacaaatattgaagataccaaagatatttttctttcagagcaaggtacattcacatttcggatgaatgtattgttagaggctgaatcagatttcaaacgagcaaaaaaagcgtatgaagatgaatgtgatagtgaagttagagaatttaatggcaaaaaaatcaaatggaataattttttttatgatgaaagtcgatatcctattttgcataaaaaaggggatggaattgagcatcccgtcgctattgcttttaccgtgaaggaagcaagcaaacatatagatactgatagctcaaatttttatacagtcaaaggggacaagtacattgtccattcggctgaaaaacaagtaatacattatgtaccgtcattaaatgctcatacagatgattattttaataacttacaagagggagatgagcttattattattggtaaacctaagtgcccaataggagaaccttggcgtcatcttatttataaaaatctaaaattttgggtatcgaatgaaaaacaactgacaaagctaagtgaataa

SEQ ID NO: 311549 - DNA, 456 bp, Proteus mirabilis
atgaattttgatatcaacattatcagagctgaaattgaggactgggctgtagaacaagggcaagaacatgttgctattgagattagccgagcttacttacgattagtgattaatcaagaacatggtcgattacatgccattgaggatcaagcgggtaaggcagactggaaagcaatcaataataaccggcaacagatattccgttggttacgtggtgattctcgcgcatctcaaagaaaaattgctgagttaatgccagcgattgaaatggctctaccggcgtcgaggttagctcgagtacgtggagacaccaaaaactatttagcaactgtagccattcagcgttttgctgatgctatgactgaaatcttattagagggtcgtgacatgtcacaccaaataaacaatgtagtacgtgcactaaatgagatatcacgcccgaccagcgtgcattaa

SEQ ID NO: 311550 - DNA, 225 bp, Proteus mirabilis
atgattagatcaactgaaaaaatcacataccgcaatgggtttatgctgaatgataaacctgctcatatctcagatatccaacatatttttgatggtagacgcgttattgcgttgttaatttgtgagcagtatgagcgagaaaaacaaaaattactgtcaaaaaatttaacccctgagcagtaccaaaatgcttgccgtaatatagctaaagcactgggggtgtga

SEQ ID NO: 311551 - DNA, 852 bp, Proteus mirabilis
atgagtaataaattaaccggctatgtgtgggatgcatgtgctgtttcaggtgttaagggtaccaagttaatgatcatggtacgcctagccgattattcgagcgatgaaggggttgcttatcccagtgttgaaaccatcagtcgtcaaattggtgcgggaattagcacaattcgcaatgcatgtaatgaacttgagcgtgatggttggttagttaaaaagcaacgtagaaatggcaatcgtaatgcttcaaatttatattttttaaatgtcgataaattggaaaaaatcgcattagaagagaacgccaaattaagaaaacaacgtgaaaaactatcaaattttcaccgtccagattctgaccgttcagattctgaccgtacagaaaacagtaaaaatgtacgttttgaccctccagaatctggcgttcaaggtggttttcaccctccagaatctggaggcgatccacaagtaaattcaaaacatgatccacaagtaaattcaaaacatgatccacaagaattactcgaggggaaaaaatcgaaaaataaattcgatccgaaattggctaaaccgtcaaatgtgagtgatgaggtttggcaggattggattaacttcaggaaagaaattaaaaaaccgctgacagaaaccatgtgcaagcaacaagcaaaaaaattatcgctttgcaccgatgccaacgctgtgatttgtaattcaattgccaacggttggcaggggctatttcctgaaagatccgtagtacaaactcaaaaagtaaattctcatactgggtttagcgaaaaagattaccagtctcaagatcctcattggtttgtgggaggtggaaatgtctga

SEQ ID NO: 311552 - DNA, 594 bp, Proteus mirabilis
atgtctgaacaaaatttattaactgcggtgaatattccccctcgctttgctaatgcgacatttgaatcatttgtcgcctcaacaccgacagcaaaacataatttaaaaatttgtcagcagtacgtcgaaacttggagcgaccgaaaaaacgcaggggaggggcttgtactgtgtggaacacccggaactggtaaaacccaccttgcagtatcaatcgcccgtcagattgccggagaattgcaagaaacggtattcattaccacagcctcacgtatcattcgcgcttttcgaagaacatgggctggaaattcagaattcagtgaacttgatgtacttgaaaaatattgcacacctgatttgttaattattgatgaaattggtgttcagtatggcactgattctgaacgtaatatcttgtttgaggtgattaatgatcgctacgaagatttgctacctacaattttgataagcaacttgcccgttgttgatctacaagaaatgcttggtgaacgagttgtggacagattattacaggggggaacggtattaacgtttaactggccaacatatcgtagaggtaatcatcatgcatga

SEQ ID NO: 311553 - DNA, 1374 bp, Proteus mirabilis
atgcatgaaaaagaattagaacatgcggtgattagtggtttgttagctggtggtgctagtcaagatgcatatgaggtattagccacattacctgaagaagcctttagttctagatattttcgtaatgtctacaaagaaattaaaaaacaagcgctagcaagttctttaatagatcccttttttattgctgatgcgctaggtgaaaaaggcgatttagcaaatttacttgagctatctaaaacacctatttggacagcaaatttaaaaggctatgcctcaaaagtttatagttattatcgtgttagagaagtaattcaattaatttccaagtatcaaaatgatattactactgcaaataatcatgaacaagctgaagaatttattcatcaatttgcaacccaaattggccagctgacaattggtaatcagaacctacttcctgtgcatttaaatacactacttgaaggatatgtagatgttttagaacgcagaaacaaaggggaagatgctgttgggatgataaaaagtggtattgaagctttagatgacaaaattggaggctttaatccaacagacttagtttttattggcggtcgtccggggatgggaaaaacagagcttgcactaacgatgactgagggaatgaccagagatggaggcggtgcattattcttctcgatggaaatgtccaatcagcaaattactgagcgtctagttgcaggttctgctcaactaccaatatcaacattgagacatcgtgggcgattggatgatgaaggatgggggcgtttaagttcagcactaggccatttaatggatagaaatattcatatcatcgatgcgagtaatctaactattgaacaaatatgtgcaatcagtgaaaaccacaaacgtaaatatccaaatttgaaaggaatttttgttgattatttagggttaattaaaaaacctaaagcagaacgtaatgatttagcaattgcgaaaatatctgcatctttaaaaggattagcaaagaggttacacacgccaactattgcgttaagccagctatctcgtgatgttgataaaagacctattaatcaacgccgtcctgtttctgctgatttacgcgattctggtagtttagagcaagacgctgacttaattttatttacctatagggaggccgtatataaccccaatagccctgcgaaaaattatgccgagatcattattgataaatttagacacggagaaaccggcacagtctatcaagaatttaagaatggccactatctgcctaccgaccaaattacagcgtcagaagtgtccaaaatgcaacaacaatcacagcaaaacgataaaagacgtcgttacgcagaaaaagcattttag

SEQ ID NO: 311554 - DNA, 177 bp, Proteus mirabilis; identical to SEQ ID NO: 298784

SEQ ID NO: 311555 - DNA, 1023 bp, Proteus mirabilis
ttgagtcagctagcctctggtcttgccggtggactgactaccggtgatatagcgggtgcgattactggctcgcaagctggaaagaatgcggttgagaacaactttttacattctgaacaaattatgagttttgttgatgctcaagcgaaaactaagaccccagaagagagaaaacagttacaaaaagatattgatacactagacaagcaacttcaatcacaagcggaaagatggggaatatcaaccaatgatatgaagagcgctttagatagcttgaaaacattggaagatttgccagattgtaatgcacaatgccaagacatggtgaaagattcaatatctaaacttgagcaagcattagaaaatagaattgctaagcattcatcacaaacagagaacctcaaagagctaacaggtattttagcgacggtgattgtactgaatgaaagcggattgattgatggccgatccactacatcaggaggtggaaaagggatatctagcgttacaggttcttctaagattgataatgctgtacaaggcggcgggcaaaaagggaaagaaactaacccgataattaatcaaccgaatataacagtaatctcaccggaaatagaaaccaagatacttgcgggacaaagggttggaaactcaaacaaattaattgggggacactcgtcttcagtgagtaatgaaaatccaaattatgctgtagaaacaataaaattgaatccagacggtaccagagttgtgaagtttactactcagttcccagatggaaacttatcaaaaattaagacaagtacactttttccagagaattggtcagataaaagtattattgattctttcaataaaattggtaactcctcagctattggacaaagaagctcaacaggtgaaacgttacatcgtggtgtaattaatggtgtagaaattgatgtaattaaaaaaggaaatcaagttacagctgggtatcctgtaggtggaaaaccgactcctggctttaatccaatcgattga

SEQ ID NO: 311556 - DNA, 123 bp, Proteus mirabilis
atgatgagccctattacattatctgtacctttaaaacttattttatttatcgccatggatggttggggactgttatctaaaggactcattaatcaatatattgatttgatggcggtgaactag

SEQ ID NO: 311557 - DNA, 273 bp, Proteus mirabilis; identical to SEQ ID NO: 297876

SEQ ID NO: 311558 - DNA, 999 bp, Proteus mirabilis
  misc_feature (930)..(939): n is a, c, g, or t
atgcaacgcagagaagcggtggtggctaggcaagaaaaacggcgagcgaaaagcctatatgagacggattacttactaggcgttcacgattcatttcgcatgggagcactgcgctttcgtacatctccaaatggtccatttttagatgataaccatgagcttgcagcacccacaataaccagtttacccgagctacaacatgccgccaataaaatcgaagaaactccggatttagataatccagattatctgaagtggctcaatatgttgatctcaccgggatcatcactaggcggagccagaccaaaggcatcaataagaaatcacgacgatagtttgtggttagctaaattccctagccgtcacgatgattacgatattggcttatgggagttcattgtttatcaaatggctattgaatctgggatcgaaatggctgaatcaaaagctgaggctattggcaaacatcatatttttttaacaaaaagattcgaccgtaccaaaacaggaaagcggctacacttcagttcagcgatgactcaactagagtactttgatggtcaggataatggcgcaagttacttagagctggctgagtttctgatcaaaaacggctcgaatactcagtcagatcttgaacaactttggactagaatactgtttaatatcatggtatctaattgtgatgatcatcttagaaatcacggattcattctagagcctactggttggcgactatctcccgcctacgatattaaccctatgttatacgcctctggtctacaccttaatattgatgacgtcagcaatgcgctttctaccgacttggcatttgacgtcgcagagtattttcacgttaccaaaagtaaagcgaagtccatataccaaagattgttcaaagcggtttcacaatgggaaagccttgcccannnnnnnnnnccttgcccaacaagcgggtatctgcaaagaagaaagagaactattgagggactgctttag

SEQ ID NO: 311559 - DNA, 459 bp, Proteus mirabilis; identical to SEQ ID NO: 311012

SEQ ID NO: 311560 - DNA, 285 bp, Proteus mirabilis
atgctcgttgttgcacacatgctaacactcagaaaaatgattgctgatgatgagtcgcccaccggtgtggtgacgagtgtaaccattgataaggtaagtgtgtcatttacggcaccgcctgccggttctgattggtcgcactggtttaaaatgaccacctttggccagcagtttttagcactgattaagcgttgtagtgtacctcaatactttggtggtggcggtgagcgttcagcatttcgtggtgtaggagggcggtttacacgaggagggcgattacgttaa

SEQ ID NO: 311561 - DNA, 264 bp, Proteus mirabilis; identical to SEQ ID NO: 309926

SEQ ID NO: 311562 - DNA, 786 bp, Proteus mirabilis
atgccgatacctgctgtggttgctcgttcaacaacttacccaacattagctcgagcggttagttcaggggaagatcctggctcatccgcaggtggtgaacaacccaaattttgtacctatactgatagaggccatgtcatcgttaaatttacggcttctgacaataatgctatcagcgagcgttggcgtgatctccttcaagctgagcatcttgccttaaaggtgctaggcgttgaaacagaaatttttgattttgaagggcaacgttttcttgaaataccgcgttttgaccgtgtaggtgctctaggtcgtgtcggacttttttctttacaagcattagatgcacagtttgtcgggcgagcaagagagccatggcctgtgttagttgatgcgttaattgagcaaaaacaggttcagcctgatgcctcggtaagtacaatgcgacgttgggcatttggtatgttgattggaaatactgatatgcaccatggcaatttatcgtttattagtcgccatggccgaccatatgcgcttgcgcctgcttacgatattctaccaatgggatttgcgcctaaagtaggaggagaaatagtcaacacactgcgaccggcgacattacttgatgggatcagccgtgaaatttggcgggagagtttagcactcgcagagcagttttatactttgcttactcattgtcatgctctttctgacaatttttctccctgccttaacgcgttacgtaatcatctggatgaagcgagttcgcgtatctctcgtctagagtaa

SEQ ID NO: 311563 - DNA, 318 bp, Proteus mirabilis; identical to SEQ ID NO: 311075

SEQ ID NO: 311564 - DNA, 252 bp, Proteus mirabilis
atgttattaacgggttttaatcatgatgaaatacctgacatgatagatgcgataaagctgtcactacggtttgttgagtggcgcactgttgagcctgaatacggcgatttaccgcctcgagcgacacaaaagccagcgcagtcatcaaccgtaaatcggggaaatgtgcaaacaaaagaagccgatacggagactaaaaagaaaggttcggtggcaacacgtatcgcagatggggattggagcttctcatga

SEQ ID NO: 311565 - DNA, 516 bp, Proteus mirabilis
atgacggattatgatgttgatgtcgcaattcgcaaacaactcttgttgcagttaaaagtggtcggtattgatatctccgttaaagctggttttcaatctactaagcaaggccgtgaagataatatggtgatgttctttcccattaatgaaaacggctacggctggcaagggcgtaaatataacgttcaaggcaataaagctaatcaccaagaaaaccagttatccgaaaaaacgtaccaagttcaggctttcgttacccagttaggccgttattcagcgagtgatattaccgcgattgtcagaatgatcgccaattcattgccctttgttgaagctctccgcaaacaaggcattggcgttcagcgggcaagcggtattcgaacaccttattttctgaatgaccagggcaactacgaacaaaacccctcatttgatttcaatgtgacatttaatcgcacacttcatcctgatacagacgccgtgagtgcgttgtatcccgatatctatcgtatttaa

SEQ ID NO: 311566 - DNA, 534 bp, Proteus mirabilis
atgatggtaacaacggaagggggaacagtcgggcgtgcaccattggccaacattcccgtttttagatttggtggagggggtttctttattcgcgcaccgattaaaccaggtgattttggttggataaaagccaacgacagagatattagcctgatttttcagcgtgggggattggaggatcaacctaataccgcacgcctccattcattcagtgatgcaatgtttttccctgacacgattaaaggttgggcgattgatggaaaaaacattgatgccttggtgatccaatcaatggatggctctgtgtgtttatccctgcatgagggtaaagcggttttagattcgcccgttcttgaagtcaatgtgcctgaaaccacatttaatggcaacgtcacagtgaatggcaatcagtccgtaaatggtaatagtgactctagtggtggcacgatgaaacacaatggaaaagatatcggttctactcatcaacatagtggtgttgagaccggtcatggaaattcaggagcgcctctatga

SEQ ID NO: 311567 - DNA, 534 bp, Proteus mirabilis
atgatggtaacaacggaaggaggaacagtcgggcgagcaccattggccaacattcccgtttttaggtttgggggaggcggtttctttattcgcgcacccattaagccgggtgatttcggttggataaaagccaatgacagagacattagcctgatatttcagcgtggaggattggaggatcaacctaatacagcacgtctgcattcatttagtgacgcaatgtttttcccagacaccatcaaaggatgggcgatagatgggaagaacattgatgctttggtgatccaatcaatggatggttcagtctgtttctctttgcatagcgataaagtggtgctggaaacccctaagtatgaagtcaatgcccctgaaaccatatttactggcaacgtcacagtgaacggtaattacgcggtaaatggtaatagtgattcacaagggggaactatgcgacataacggaaaagatatcggctctacgcatcaacacagtggtgttgaaaccggtcatggaaatacaggagcgcctctatga

SEQ ID NO: 311568 - DNA, 591 bp, Proteus mirabilis
atgcgcgataactacggtgtgcaaatgacgggcagtgaagatacggttcagcaattcgatacctcattagcggatttagacgctacgattatgacgcaatatcagctggtggcatcggcttccaatgtacctgcaacaaaactgttaggcaccacaccaaagggctttaattcaacgggggaatacgaagaagctaattaccgagaagagcttgagagcattcaatcaaacgaccttgaagagctattacagcgccattacgacatgttaatgcgtagcgatggtttacctgtgacagaaatctctatcacatgggcaccacttgatagcccaacggctgttgagagtgcggatattgaactgaaagaagcgcagaccgatgtggcactggcttcgactggtgcgatagatgggttagatatccgtaaaaaactggccagcaataaagagtccagctattacggcattgaagtgaacgaggcagattatgtcgaggcgaatacgagtacgaacgaagcgagcgcaatgggcaatttcgcgtcaagcggtcatgaaggggaaacctctgcagtattcagtcgccccagctag

SEQ ID NO: 311569 - DNA, 528 bp, Proteus mirabilis
atggttttagctattcagaaagcattagggctcccttctggatggatggatggtataacagaatcagaattcaccccaccgcaacataatgataagttcaaggttgaaatactagacgtagaggcaagtgcaggcgctggcgtgatggttatcgatgattttatcgagactatcacggctattgagtattcagcggatgaagcaaaaagattattcggtggaagaccttcaaatacgataaagatgatcactgtaaaaggtgattcgatggctgaaacgttcgaacctagggatcagatattcgtagatataaccacaaacttttttgatggtgatgggatttatgtgttcgtattggataaccagctctacataaagcgattgcagaaacagtataagcgcctagcagttatatctgacaaccctagatatgaaacttggtatctggacgaagatgctattaatgggctttatatatgcgctaaggtgctagttagccagtctattacttataagttccacggctaa

SEQ ID NO: 311570 - DNA, 288 bp, Proteus mirabilis
atgcctcaagaagaaagccaaacggaaaaccaaccaccggttagacactctattgctcaagccaatgcacagttagatgcgattgccaataatgcaatgaatcctattaccagccaagctattagcaatcaatccaatgtgaagaatgaaagtaacgtaagtattggagaaattaaggttgaaactcaagccacagatgcgcagggtatggcatcgggcgtaaaggatgcattgcaagatcaactcgccgattttaatcagcaaaactcaacgggagtagcaaaatga

SEQ ID NO: 311571 - DNA, 288 bp, Proteus mirabilis
atgcctcaagaagaaagccaaacgacacaacagccaccggttagacaatctattgctcaagccaatgcacagttagatgcgatagccaataatgcgatgaaccctatcaccagccaagctatcagtaatcaatccaatgtgaagaatgaaagtaacgtaagcattggagaaattaagattgagactcaagccacagatgcgcagggtatggcgtcgggtgtaaaagacacattgcaagatcaactcgccgatttaaatcagcaaaattcaacgggagtagcaaaatga

SEQ ID NO: 311572 - DNA, 198 bp, Proteus mirabilis; identical to SEQ ID NO: 298965

SEQ ID NO: 311573 - DNA, 444 bp, Proteus mirabilis
atggatcatcaaaaaggcaccgcgccccatttttatttcatcccctgccatcgcaataatggacgcagcggaagcggcaatgcccaaaatattgaccgttaccttgccactgtgagcacgaagcaagttataaatcgccaacccttcaaacatatcgccccctggactattgaggttaacgacaatatcttgctcaccaatggcacgaagcgcggcggaaatccgtttagcggtgacaccttccccccaataatcttctccaacgacgtccaatatcgaaatcgagttatccgcactggatgcccgaatacggctattccatttatccagtgctttgggtttcagctcatagcgaatcgatgcgcaggggcgatcctccagcgcgactggcaactgattttttttcataacgatgactcctcgggacgaggtggattggattga

SEQ ID NO: 311574 - DNA, 240 bp, Proteus mirabilis
atgatttattcaaataactatttagataaattatcaaaacaaataataaataatgcgacattatcatgtgttgaacaagaccaattacatatccaagcgagtgagtctattacgttacagtgtggagaatctagcttaacaatgactgctgatgggtttgttcaaattagggctctttatattgataactatgcattagccacaaatcgtattaaaggtgcatcagtacaagtgaactga

SEQ ID NO: 311575 - DNA, 402 bp, Proteus mirabilis
ttgattgcaggacagggatcttctgaggtcaccagcaatattaaaaataaaattgttgcactaaatttagaaaataaagtgagcttaattggctttttagccaatccattccctgtgatcaaagatgctaaagcggtggtattaagctctgatagtgaaggtttaggaaatgttttagtcgaatcacttatttgtaatacccctatagtgagtactaattgccttggtgggatcagtgaaattatggaaggtgaattagcagattataagtctgaattaaattcagcagccttggctgaaaaaatgcgtttagcttactttcacccgcctaaaattacgcctaatatgtatcaaaaatttgatattgatgaagtgatccgtcagtatatttcattaatttag

SEQ ID NO: 311576 - DNA, 216 bp, Proteus mirabilis
atggaaaagttacggatgtttttaaattccctttccgtatccgaacaggaaaagttcgccaataaatgcggaacaactatcgggtacctaagaaaggcaatttctaaaggttcaaaactaggaacagagctttgcgtattaatcgaaaaaaacagcaattcaaaagacctatacccaactgattggataaaaaattggcctgaactggccgcttag

SEQ ID NO: 311577 - DNA, 408 bp, Proteus mirabilis
atggcaggggctttaggtatgtcactcgagacgtttaataacaagttatacgaaaaaaatggctgtcgtttctttgatattgatgaacaagaagccatggaagacatttcgggcactaagttgctggtggaatatcatctagatcgtcatggcatgagtgcattaccaaaaatagaagcggaaaagatagatcaagtagagctatttgatatgcgaatgacattggctgctatgcaaggttcactcgccgttttaagtcaagaaagccttgttgatggtgttttaacggatgaagaaatagggcgtatttatcgaaaagcagggaaagtttttgcatatgcaattggattcttggattcgctgaaagtgttatacggtgaaaaacaggaagcgactaagaaagggtga

SEQ ID NO: 311578 - DNA, 234 bp, Proteus mirabilis
atgaaactaaaaactattttaccgatttgtgccgcctctttctctttactgctattagcaggttgttcatcgccacaaaaaattgaaaccgtcgatgggcaaactattttgaccacagataaacctcaagaagatgagtctaccggattaattatttataaagatgctgaaaccggtgcaatcaaacaaattaatcgtgatcaaataagaagaatggttgagcttgatgattaa

SEQ ID NO: 311579 - DNA, 237 bp, Proteus mirabilis
atggggatagatatgaaggaatggaatacagaaggaagtatggcttcacaaatagggcaaattccttcaaatggcggggattatttgaggtttttgatatttgccagaaatatcaaagaggcaaaagcatcaagcgaagaaaaaaggaatatgataaatttaggtcgttgcatgtatggtgaggaaggcactccatttaaagacttcattgaagactataatttcagtaataaataa

SEQ ID NO: 311580 - DNA, 267 bp, Proteus mirabilis
gtgagattgagtgagtttttatattcttctcaaaaaatgggaacatctgaattttttaatgaatttgagattattaatagtattaatttaccttttgcaatttatgacacattagagaatcaattagtcgctgctattagttacattaatcctatcgaaaaatcgaatttattagaaaatcaagatataaaggttattcatttaacgatgttaaaagatacattaactaatggtgagctatcaatgttttattctgatagtgtttga

SEQ ID NO: 311581 - DNA, 1437 bp, Proteus mirabilis
atggggagtgagtggaaaacaactaaattacttgaacattatgagattcgttctggtttatctaaacctgcaaaggattttgggagtggatatccatttttgacgttcaaagatgttttttataattatttcactcctgataaactcggtgatctagtacagtctaatgataaagaacgtgaaaattgctcagttaaacgtggtgatgtatttttaacgcgaactagcgaaacaatgcatgaactagggatgagctcagtagctcttaaagactatgaaaacgcaacgttcaatggtttttgtaaacgtcttcgtccaactcagcaaagtgaattattaccagaatatgtaggatattacctgcgtagttctatatttagacaagcgatgttagcattttcaacgatgtcaacacgcgcaagcctcaataatgaaatgatcggtaggcttgaaatatcttacccacccaaaatggaacaggtaaagatcgctaccattttgaaaaatatagatgacaagatcactctcaaccgccaaatcaaccaaaccctagagcaaatggctcagaccctatttaaatcatggtttgtggattttgatcctgtggttgataacgcactagatgccggtttttttgagcaggatttaggcttctctgaagaattactgcatagagttgaagtgcgcaaagcagtgcgtaaaagtgataattttaaaccgttagcagaagatattcggcggttatttcctaatgcttttgaagaatgtgcagagcctgcattgggacttggggggtgggtgccaagtggatgggaactcggtaatttgagtgatgtaactaatattttgagtggttttgcttttaagagtaacgagttccaaaattctgggtttggtgtcataaaaattaaaaatattggtaatgataaaagtgtcgatatatgtgacattcaacgaattgatatttcattagctgagaaagctaaacgttttagccttaaagatggagatttattaatggctatgactggtgcaaccgttggtaaatttggttttcttgttactgaaaatcaagaaccgtattatttaaaccaacgcgttgcaaagtttgaggctattgatgaaagtactgcttatttatattgtattctaaatagaaagattaccgagtcttatattgttaatacagcgcaaggaagtgcccagccgaatataagtgcaaaagatattcttgcaatgccattaattactgctccacaatctataagggaactattcaatgacaaagtaaatgatagttttcaaaaaatcattcagatgagaaagcaaaatattattcttgagcatctccgagacacactgctcccaaaacttatctccggcgagttgtctctgagtgatataaaaatagacattccagaagaaacactcatctaa

SEQ ID NO: 311582 - DNA, 279 bp, Proteus mirabilis
atgagtattaattatgtaccaaagataattatcggaacagatatagataacgtgacaatcgatgaagaagaaatagatgatttgctagatgatgaatatacacgacacggctcatatttaagcggtgagtttagttttattggaaaggaactttttattcatgaactagctcaacacgactttcaattaagatttcgcgacctaaaaaatgaaatcgcagaagagctaggcgtaagccctaatgatatacacataagaaatggcttattaattatgtaa

SEQ ID NO: 311583 - DNA, 132 bp, Proteus mirabilis
atgactatagaattatctggagataatcgctcaaatttcaagacaaaatttgataaatatacacaaactgaaaaaacccgtggtttttaccacgggtttttgcttaaaaccgatatcgcggttaaaaattaa

SEQ ID NO: 311584 - DNA, 309 bp, Proteus mirabilis
atgaaatttttagataacacacctaattatttattttttactggaaaaggtggtgtgggtaaaacttctatttcttgtgcgaccgcaattaagttggctgaaaaagggaaaaaagtcttactggtgagcactgatccagcttctaacgttgggcaagtattctctcaatcgataggcaacaatattaagccaataactttggttccaaatctatttgctattgaaatagaccctcaagccgcagccgaagaatatcggaacaaaattattaatccaatcaaagaaagtttacctgaagcggtaatttaa

SEQ ID NO: 311585 - DNA, 426 bp, Proteus mirabilis
atgaatgaaattaccatttatcataaccccaattgtggcacttcacgcaatacgcttgctatgatccgcaatagcggcgttgagccaacgattatttattatttagaaacaccgccgtctaaggatatgttagtacaacttattgccgatatgaaaatgacagtaagggcgttactacgaaaaaatgttgaaccgtatgaacaattagcgttagaaaatgatatttatactgatgaccaactgattgattttatgttgcagtacccaatactgattaatagacccattgttgttacgccaataggaactaaactttgccgaccttcagaagtcgtattagagatattacctcatccgcaacagcgtgagtttatcaaagaagatggcgagcttattatagacaaacaaggtgtcagagttaagtaa

SEQ ID NO: 311586 - DNA, 1479 bp, Proteus mirabilis
atgctgttgtcctcctctcgtcaggactggctaggtaacatccgtggggatgtgcttgccggtattgttgttgctttagcgttaattcctgaagcaatcgctttttcaattattgccggcgtcgaccctaaagtagggttatacgcagcattttctatttcagtgattattgctgttatcgggggacgccccggtatgatttcctccgcaacgggagcaatggcacttttaatggtcgttcttgtgaaagagcatggccttcagtatctattagccgcgacagttttaactgggatatttcaagttatcgcaggatatttaaagctcggtaatttaatgcggtttgtttcacgctctgtcgtaacagggtttgttaatgcgttagctatcttgatttttttagcccaacttcctgagttaacccatgtgagttggcatgtttatgcgatgaccgcggcaggcttagggattatctatctgtttccattaatcaataagaccattccttcaccattagtgtgtatcgttgtattaacggtcatttcaataggccttggccttgatatccgcaccgtcggggatatgggggctttacccgatagcttacctattttccttttacccgatgtgccaataaacgtagaaacactcattatcatactaccttattcgctcgctcttgcggttgttgggttacttgagtcgatgatgaccgcaacgattgtggatgatttgaccgatacaaccagtgataaaaatcgagaatgtaaagggcaaggtattgccaatattgccaccgcgtttattggagggatggctggatgtgcgatgattggtcaatccatcatcaatattaaatcgggtggtcgaggtcgattatcgacactggttgcaggcgttgttttattgctaatggtagtttttcttaatgattgggtatcaaaaattccaatggcggccttagttgctgtgatgattatggtatcaattgggaccttttcttggcaatcccttgctgatatacgagttcatccgctatcaaccagcgttgttatgatagccacagtaattgttgtcgtttggacccataatctggcttatggggtacttgtcggagtgctcattgcagcgcttaattttgccaataaagtggcgagatacatgacagttacatcaacgctagataaaaaagtgcgccattatggagttcgggggcaaattttctttgccacatcagaacgctttgttaatgcctttgattttaaagaagatattgataaagcgattatcgatgtgaatcaagctcatttttgggatatcacctcagtcagtgcgttagataaagtggtgattaagtttagacgtgaaggcattgatgttgaaattaaggggatgaatgaagccaccgcaacgttggttgataaatttggtattcatgacgatccgaaaaaaattgaaaaattcatgggaggtcattaa

SEQ ID NO: 311587 - DNA, 858 bp, Proteus mirabilis
atggcagcagatatcattcaaaaaaattgcgtaattgggtgtattgaccgttcgtcctcggcaattgctgtatgtcacgccagtgcttggatagctcaaacactcgacctaccactgacactgttacacatgaatgaaaaaatctcgacatcagcacaccatgatttaagtgggatcatcggatttgatacccgagaaactttattgaatgaactcgtggatattgaggaaaagcgagcgcgtttaacccgtgaggaaggccgacaattattgatgagtgcaaaaaaaatcactcaagatttaggtcttcatgatgttaatacacttcagcgacaaggaacgttagccgaagtgctaaatcaagaagatacgcatattgttgtacttggtcgtcgaggcgagcaatctgaattaacgggccatattggccgtcaactcgaaggcattattcgacttcaaaaaaactcagtgcttatctgtaagcgaaactttaccccaccgaaaaagataatgattgcatttgatggcagtgaggaaggtgaacgagtcattcatcgattaatacaagtgaaattattagcgggtcgtgattgccatctggcgatgcacggtagtcaaggcagtcaactcaaaaaagcacaagatatgcttcatcaagcaggcattgaggtgaaagctaatttacttcagggtggtgacagcactgttgatgagttatgtggttttgcagtacaaaaccacattgacttaatcattatgggggcttttggacattcgcgattgaggcaattttttgcagggagtcatacgacagaaatgatagcgaaaactccggtatcattactcatcatccgttag

SEQ ID NO: 311588 - DNA, 870 bp, Proteus mirabilis
atgactcgtccttccatgaaagccctcgtagatttgctcggtaaatctccctcttccccaccacctaaaaaatggcaggatctggaatcgtatgtccagagtgtctatcaacaattgctcgatatccaaggtaataagacgatggtagcccgtaatgtgcagatttcaggtcgagaaggtagcagctatcaaatagacgtttattacgaatttgagatggctggtatacgtcatcgtgttgcagtggagtgcaagaaccgctcccggcccctagagcgagagagcgtattagcctttcatagcaagatacaccaatgctgcttgagccatggaattatcgtttcctcaagtggttttcagaaaggagcacgtgaatttgctgaaaaaaataacgttacgctaatgaattactcagagctgccctccattggtaatcttctttctcgaagactgacaaatgtggttattcccgatgaagactctataggtcagcctttctggactatttttgatattgaggaatattcaccattcggacatatcgacgcgaagaacgaaatcatgactgctttcttatttctttcgagaggccatgctcagcggtttctaaaaagccagaacttaggtcctaagtggcgggtaaggggaatggctcagcgacatctttcatgctatatcctaacctgtgatgcgtttaacgcaagatatgtcattgcccggccagggtatgctgctggcgtgccaaaaaatcagtttttgttcgatgaaatcctcagaaaagacttgatcaacgattttcatgagggcattgatttaccaaaagagccaaatactgcgcccggataccgttcaattttcaagaaaaaataa

SEQ ID NO: 311589 - DNA, 318 bp, Proteus mirabilis
gtgattgcccgtaaacctattgatgtatcagaacaagtacctgcaaaaaccacctttttaatggcaacggggcaacaagcaggggcattagttgatgctttaattaccttaaaacaatacagcattattatgactaaattagagtctcgcccaataaatggtacaccttgggaagagatgttttatattgatgtgcaagctaatttacgggatatcaatatgcaaaaagcattacatgacttatcaaaaacatctcgttcactcaaagtattaggatgctatccttcagaaaatattgtacccgttgaaatacaatag

SEQ ID NO: 311590 - DNA, 1734 bp, Proteus mirabilis
atggttactattgaaccgacattacgtcggcgtgtggcgaaagcaacagcattaccagaaagtctcgatcccttattacggcaaatttatgccaatcgaggtattacctctgaaactcagctcgagcgctcgttaaagggcttattgcattatcaagatttaaacggtattgatgttgctatctctttattagttgaggcattaaagctgcaatcgcggatcgttattgtaggggattttgatgccgatggggcaaccagtacagctcttgctattaaagcgttacggcaaatgggatttcagcaagtaagttaccatattcctaatcgttttgatgacggttatggacttagccctcaagtggttcatgatgtggcgaagaaaggcgtagatctgattattacggttgataatgggatctcctcttttgaaggtgttgatgttgctcatgaatatggtattcgtgtattggttactgatcaccatttgccgggtcactcccttcctcaagctgatgcaattatcaatcctaatttagcggattgtgcctttttgtcgaaatcattagcgggtgtcggtgtcactttctatttaatgaccgcattaagagctgaattagaaaaacaaggttggtttacaacacagggattagctcgccccaatatggccgattaccttgatttagtcgcattaggcacggttgctgatgtggttcctcttgatgaaaataatcgtatttttgtttatgagggattacgccgtattcgtgcaggacgttgctgcgcagggatcaaagccttgacggaagtttcacgtaaaacgttgtcacaattagtcagtagtgacttaggttttgcattagggccaagacttaatgcggctgggcgtcttgatgatatgtctgttggcgttgctttactgttaactaatgatattggtgtcgcccgtgaaattgccaatgaactggatggattaaatcagactcgtcgtgaaatagaagcaggaatgcaagaagaagcatcgacaatttttcgccaatttattactacccaagatgacttaccgaatggattagctatttatcatccacagtggcatcaaggtgtggttggcattctcgcctcacgaattaaagaaaaactacatcgcccagtgattgcttttgccccaagcggtgatggtttactaaaaggctcaggacgctctattcatggtgtacacttgcgagatgcattagaacgtttgaatacattaaatccgggattaatggtgaagtttggtggtcatgcgatggcggccggactatctctggaagaagagaaatttccactttttcagcgtcacttttcggcacttatggcggaattagtttcagctgaacaattacaaggcgtgattttaacagacggcgagttaagcgacagtcagttatctttacctattgcggaaatgttaagagaagcagggccttggggacaagcctttcctgagccacttttcgatggcaaattcaccttattacagcaacgtattgtgggaagcaaacatttaaaaatgatgcttcaaccgataaatagccatgtaatgattgatgctattgcatttaatgttgatgttaatatatggccggataacagtattaaaacggttgagcttgcctaccgattagacgtcaatgaatttagaggacagcgcaatgcacaactgctggtggagcatatttggccttgttaa

SEQ ID NO: 311591 - DNA, 729 bp, Proteus mirabilis
atggttcaacgggatagccatctaaaaacagtaaatgctaaagattataataagttatttgatgttcataatagagattcaaaaactctcgaagcagcatttaaacaagcatctgatataagaaaatttgaaatagaactttattggaaaagggctacgtatttttgggcattaattgtagttgcttttgcaggctatttttctgttttatccatagacatggataagttaaatgataagtatttggtttctttagttatatcatgtactggttttgtttttacttttgcgtggtttttatctggcaaaggaagtaaatattggcaagaaaattgggaaaatcacctagatctacttgagaataaaataactgggccattatataaaacaaaaattggtcgcaaaaatgaaactaggtttatagaaaaatatattacaggaccatcagaagtttcagtatcaaaaataaatcaatgggtagctctttatgtaggcattatatggctctttctttgtatttattcaggctgtaagttgatagaacaagatgttgctgttttaaatgctatatttttgatttcattgccgttagtatctgttttaacttgtttttttatgcttaaaaaagggagaactcatatagattcccataatttaaaagtagtattacgagaagtgaatgttacatcagaatcaactttagatagtaacgataaccagcatgattaa

SEQ ID NO: 311592 - DNA, 468 bp, Proteus mirabilis
  misc_feature (397)..(406): n is a, c, g, or t
atggatattcgtgttttacgctattttattgaagttgttcaattaaatggatttagccgagccgctgatgctttatttattacacaaccagccattagtcgtagcattaaaaaattagaggatgaattaggcactgttttattaataagagaagtggatggagtaaaattaaccgatgacggtgctattttatatgagcatgcaaagcagatcctcgctcaatttaatagtatgaataaagcattaaatgataaagatgaacctttaacaggcgccttaaatgtcggattacctcctgttatagcctcaacctattttgctgatattatcatggcgtttagctctcgccatcccaatgttgaacttaaaatttttgagctgtgcaccaaacctgtcnnnnnnnnnncagatggaagatgcaatgttagaaggcacggtagaaactgctgcagtgatgttaccttttaa

SEQ ID NO: 311593 - DNA, 234 bp, Proteus mirabilis
ttgcatactcttttacaaagtatgcagatcgagcatctcaccattttagggatagcaactgattattgcgttaaatttaccgtgttagatgcattacaattgggttatcaagtatcagtggttatggatggttgtcgaggtgtcaatattcaaccagatgatagccaactcgcatttaatcaaatgcaacaacatggggcagttttaacaaattgtaataacattattaggtaa

SEQ ID NO: 311594 - DNA, 348 bp, Proteus mirabilis
atgcatcggcaagtcaccgcagatacggaacaacgcacgttagtcacccgaaacaccaccattcaagccaccgataaaacgatggtgcttggcaccgcaacattactggtaggcgctatccaacaaatagcagatggtgattacagcattgcgttaaaaggcagtatagtggccagcatcggtaagaaagcggaaattgatattgccgaagacgccacgctcactgttggccaaaggctgattgaaaaggtaggcgcactcaagcaaagtatcgcagtcactaagcaagaaattattgcaccggttgtttggattgtggtagccaagaaattaacgtggcacagctga

SEQ ID NO: 311595 - DNA, 450 bp, Proteus mirabilis
ttgactatcgctttccattcagatgtctttattaaatggaaagtcaccgcaatctacgccatttttgcgctagtgcttattgcgatgcaactctttacgccgaaaacattaatggaaagaatgctaggtaaagaattagcgatgccagcgactaattggaaaaaactcaatatcgcttgggtactgttctttttagcttgtgcgctgggtaatctttatgtcgcattttctttatctcaagaaacttgggtaaactttaaagtctttgggttaacaatattaaccttaatctttactgtgattagtgttgtgtatatctggaacaaccggttacccgaagaagagacgaaagaggaatcaacagaaagtcatacatctgaaacatcagataacggaacaacatcaacatctaaagtattacataaagatgtgacatctaaatctgaataa

SEQ ID NO: 311596 - DNA, 237 bp, Proteus mirabilis; identical to SEQ ID NO: 301841

SEQ ID NO: 311597 - DNA, 537 bp, Proteus mirabilis
gtgaaaaagattgaggcaattaaaaagctcttagaatatgacaagcgcggtcgctgcgtttttactaattcagatctggccaacatctttcatcaagataatgaacgggcattgcgtgcaggaattaaacgtttgcaagacgatggcttactcactaggatcattaatggtgtgtacttatacaatttagcgcagtcaaaaggcagcgatacgttggagcaaattgctaaaactattcgacgtggggaatataactacattagcttggagtctgccctttctgattttggtgttatttcgcaaattccagtagatcgcttaactgttatgacaacgggacgttccggtgaattcaaaacgcctttgggtacaattgaatttacacatacaaaacgagctccaatcgacattatagagaataccactttagtcggcagaccacttagattagcaacaaaacaaactgcatacagagacttaaaacgagtcggccgaaatacacatttagtaagcaaggaggaactatatgaaaattga

SEQ ID NO: 311598 - DNA, 1590 bp, Proteus mirabilis
atgtctaatcctatttttcagcaagaagttgctcgtcgtagaacttttgccattatttcccaccccgatgcgggtaaaacaaccatcactgaaaaagtgttgttattcggacaagctatccaacgtgcaggaacagtaaaagggcgtggttcaaatcagcatgctaaatcagactggatggaaatggaaaaacaacgtggtatctccattaccacttctgttatgcagtttccttacgctgattgtctagttaacttacttgataccccagggcatgaagacttctctgaagatacttatcgtactttaactgccgttgactgttgtttaatggtcattgactcttcaaaaggggtcgaagatcgtactcgtaaattaatggaagtaactcgattacgtgatacgccaattttgacctttatgaataaattggatcgtgatattcgtgatccgatggaattaatggacgaagttgaaacagagctaaaaattgcctgtagtcctgttacttggccgattggctgtggaaaactgtttaaaggggtttaccatatcttaagagatgaaacctatctttatcaaacaggccaaggtcatactatccaaaactcacgagtaatcaaagggttggataatcctgagttagatgaagcgattggtgatgatttagccgttcaattacgtgatgagctagagttggtgttaggtgcatcacatgagtttgatcatgaagctttcttagcgggtgaattgactccggttttctttggtaccgcattaggtaactttggtgttaatcacatgcttgatggtttggtgaaatgggcgccagcgccaatgcctcgtcaaactgatatgcgagaagtgacagcggctgaagagacattcacgggttttgtctttaaaattcaagctaatatggatcccaaacaccgcgaccgtgttgcttttttacgggtggtgtcaggcatgtatgataaagggatgaaactgcaccaagtacgtacgaaaaaagatgtggtgatttcagatgcattgacctttatggcaggggatcgttctcatgttgagcatgcttatcctggtgatattattggcctgcataatcacggtaccattcaaattggtgatacttttactcaaggtgaaatgttaaaattcaccggtattcctaacttcgctccggaattattccgccgtattcgtctacgtgatccgctaaaacaaaaacaattgttaaaaggtctggtgcaattatctgaagaaggtgcggtacaggtgtttagacccctagctaataatgatttaattgttggcgcagttggggtgctacagtttgatgtcgtggttgcacgcttaaaaggtgagtataacgttgaagccatttatgaatctgtgaatgtatcgacggctcgttgggttgaatgtagtaacgaaaagaaactcgaagaatttaagcgtaaaaatgagcaacatctggcattagatggtggtgataacttaacttatattgcaccaacgatggttaacttaaatttaacccgtgaacgctatcctgatattgagttccatcaaacgcgtgaacactaa

SEQ ID NO: 311599 - DNA, 492 bp, Proteus mirabilis
  misc_feature (417)..(426): n is a, c, g, or t
atgacagcagttggcactaattttgatattaatcaacaaattttttatataaaagaggggagtggaacattagaacatctgattattaatgaggcactgaaagatgaaagccaattagaaccactttttgtgacaataagacacagtgaaagttactggcttatattacatctgattagttatttggatgagaaaaaaagcaatattgcacaaataggtgaacgatatggtgtatcagggacacattttagacggctgtgtaaacgttatttaggtaattgtggtaaaagtcaattacgttcatggcgtgcggcatcctctattttgacaacgctatcaacagatgaatcattgactcagattgcagtcgataatggttttagttcagcatctcatttttctaatgaaattaagacnnnnnnnnnnttatttggtattacaccaactgaatttcggcgaattggccaatatctttatgaacataaaaaataa

SEQ ID NO: 311600 - DNA, 468 bp, Proteus mirabilis; identical to SEQ ID NO: 103796

SEQ ID NO: 311601 - DNA, 1176 bp, Proteus mirabilis
gtgcaagctgtcgagcatttccaactcaatctacaacaaaataccttagggcgctttgtcatctcctttgccccttcacacccttactatccattaatgaaagaggaagtgcgcaaacagcttcatcaagaggttatttggcccgttatggaagggaaaaattcattaaagccaaaccaatcggcagaagaagttattgcattaagacaaatattgcgtaacttaaatttactgcctcaattggctgaaaatgagcaagaagtagcaacaacgatttatgatgagcctttaattgctgctgtaaaatcatttcaagcggctcatggattggaaactgacggtattattggtagacagacgcgtaattggttaaatatgacaccaatacagcgtgctggaattatggcattaaatatacagcggttacgcttaaccccacctattggcgacactggaatttgggtcaatattcctgattactccctctatttttatgctaataatcaactgattttagattcaaaagtgattgttggtcgaccagatagaaaaacccccattatgagtagtgcgcttaataatgttgtggttaatccgccttggaatgtacctacgagtatgacgcgtaaagatattgttccaaaaggaaaggctgatcctagttattttagtcgtaaaggttatacgatttattcagggtgggggaatgacgcttatccaatcaatccttatgatatagattgggaaaacatctctgcggctaattttccatatcgcatttggcaagcccctgggccaactaactccctaggccgatataaatttaatatgccaaactctgaagcaatttatctgcatgacacaccaaaccacaatttatttactaaaaatatgcgagcaattagttcaggttgtattcgtgtgaataaagcggcgcaattagcgacgatattattaggtgatgcaggatggaaacaagatagaattgatgcagccttaaaacgaggttcaacacaatatgcaccaattccagaacgtatccctgtctatttatattatcaaacagcttgggtagcagaagaaaatgcccctcaatatcgagcagatatttataattatgaccaaagcattaataatgcaacctcttttttagagaatattaagaaatatttgtaa

SEQ ID NO: 311602 - DNA, 417 bp, Proteus mirabilis
gtggtttatggtttaagaaatgcaggattaactaattatctttctgaaatacttaattaccttgctgataaagggttatggatagcaacaattggtacgggatttattaccgcctttttatcatcaataatgaataatatgccaacggtattaattggtgctctatccatagaaggaagtgacgcgacaggggtaattcaacaagcgatgatttatgccaatgtgattggtgctgatttggggccaaaaattacaccaataggtagcttggcaacattattgtggctacatgttttatcacaaaaaaatatgacaatcacatggggatattatttcaaaacagggatcatcatgactatccctgtgctcattgtcacactcgttgctttagtacttcggctttcactgtttaattaa

SEQ ID NO: 311603 - DNA, 219 bp, Proteus mirabilis
atggattctattgacaaagattatgtttcaataggttacactagtgccgaatctgacttagagtttgactctgaaattctagtaactttttctggagattttgaaaatgtaaatgccataactgacatagcaattgaagaaatacaactattgaaaaatctaaaatccataaactttggctttattgagccagatttagacatatacgacgatgagtaa

SEQ ID NO: 311604 - DNA, 180 bp, Proteus mirabilis
atgacaacacaagattactcaacatttaacttcttacaatggtatgttgctgaacaacatgaagaagagaagttatttaaatctattctggataaacttgctatggtcggtgatggtggtaaggcattgttcttgttagataaagacttaagtgctctttctacatccgcacatatttaa

SEQ ID NO: 311605 - DNA, 174 bp, Proteus mirabilis
atgcttaccacaggtttttgtggtggcttaaccaccttttctactttttccgttgaggtggtcgccttatttaatgaaggacgaataggctgggcattaggtaccatgggggcaaacttagcgggctcgtttctgatgacggcattcgcattctggctactccgtgaaatgtag

SEQ ID NO: 311606 - DNA, 321 bp, Proteus mirabilis
  misc_feature (309)..(318): n is a, c, g, or t
atgagtggttatgtgtatgcagggtttccaagctctgtaggagtcattattggtggttttttcctcgtgatactttttaagtggttacgatttgcattgcaagacaataaattacccactgctacaatgccagcaacaacagagcctgagcccgttttatcgtctccagcaacagaaagcccagtaaatcagttattacccaaagaatggggattatatgttgcagccccttatgctgtcatgaatgaatgggcgtataacgaatataatcaaggtaaagatgatggtgggctatcagcggcttggggnnnnnnnnnntga

SEQ ID NO: 311607 - DNA, 693 bp, Proteus mirabilis
  misc_feature (661)..(670): n is a, c, g, or t
atgaactcggaaaataacgtctcccgacaggggttttcacccgataatgaactcgatattcgaggtctttgttgtgcactatggtcaggaaaacgctggataatagggttcgcgctgctttttgcgctgattgcattaggggcatcttacttgatgcaacctaaatggagcgctattgcgatgacagagagacctactgtgaataatttaggtagttattattctcagtctcagttcttacgtaatcttgatacgcaaattaatccgtctgtgactgtttctcagttaagtatccctgatgaagcttatcaagagtttgtaacacagatttcagcttttgatacacgacgtgagttttggctgcaaacggattattacaaacaacgtaaagaaaatgatgcgcaagcagacgcggcattattagatgagctcatcaataatattcaatttacaccggctgatgagaagaaattggttaatgatcaattgaaactcattgctgaaacggccaacgattcgagtcaactgctcaatgaatatattgcttttgcgaataaacgtgccgcagagcatctaaatgaagaagtgattgccgcatgggcaactcgaacacaatcgatgaaagctttagtgaaacgccaagaaatggctgctcaagctnnnnnnnnnngctgcttatcaacgacaaattaa

SEQ ID NO: 311608 - DNA, 426 bp, Proteus mirabilis
atggatgtatctgaacaatttgaagtacaagaaattgttgctgttgaaggttcttctctacaactgagtgtgcttgagccacagcctgaaaaattaacacaagcattgagcgaattttttggtcaacataagcctattcgtcgtgcatttattgttaatgctttggagcaaggtgatgatgagtcattttatttgattgggctagaaatcactggagaagaaaatattattgctcagatactcccacaagctgctgaagccgcttttgagcatctagaagaaggacaatctcttgatttctgttttgtgaataaagatgagcaaggtgtaagtcattttatgactcaccatgtaacacctttttatcaacgcaaattagggggctttcttcgtaagggtattccaatcgttaatttgaatacctaa

SEQ ID NO: 311609 - DNA, 195 bp, Proteus mirabilis; identical to SEQ ID NO: 14548

SEQ ID NO: 311610 - DNA, 270 bp, Proteus mirabilis
gtgcacttatatgttacttttagtttattggttgtatttttactgcaaattgacagtgttactacaaataatagagcactgccacacaaaataaatacacaattatatacaaaagagtgtgagattatcatatacgtgaaagattctaaatatattgatgttgcagaggggaatatcttttataacatttcacacgctaatatctttagttatcaatctaaaacaggctacaataccgcgctgtataataatgaagagatgttcttgtga

SEQ ID NO: 311611 - DNA, 1479 bp, Proteus mirabilis
atgtcactaaatgcagaagctcaagagcaacaagcccccgcatctacaggctctttacttgatgaaattatggctcaatcacgtatgtctccagaaacagaagcatacgatattgccaaacaaggtgttgctgcttttattagtaatattttcgccagtgaatctgaagaccaacagatcaatcgattattaatcgataaaatgcttgttgaacttgataataaactaagtactcaagttgacgaaattcttcacgcgcctaaatttcaagaaattgaagcttcatggcgttctttaaaattactcgttgatcgcactgattttagagaaaatattaagatcaatattcttcatgcaactaaagaagagttattagaagattttgaattttctccagaaattgttcaatcaggcttctatcaacacgtctactcttcaggatacggccaatttggtggtgaacctgttgcaacagttattggtaactacgcctttaacaatactgcgccagatatgaagttaatgcagtatgttagtactgttggtgcaatggctcacgcgccattcctatcatctgtttcacctaatttctttggtattaatagctacgctgaactgccggcaattaaagatctaaaatctgtttttgaaggccctgcacacactaaatggcgctcactgcgtgaagcagaagattcccgttatttagggttaacagcaccgcgtttcttattacgtttgccatactctccaacagaaaaccctgtaaaaatgtttaactattcagaaaatgttaaacaagaccatgagcactatttatggggtaataccgcattcttattagcaagctgtattaatgatagttttgcaaaatatcgttggtgtccaaacattattggcccacaaagtggcggtacagttaatgatcttcctgtgcatatttttgaagcgatgggtgaattacaaactaagatcccaactgaagttttagtcaccgatcgtagagaatttgaactagcagaagaaggctttatcacgctgaccatgcgtaaaggcagtgataatgctgcattcttctcagcaaactcagttcaaaaaccaaaagtcttcccaaatactcctgaaggcaaattggcagagactaactataagttaggaactcaattgccatacatgtttattatcaatcgcttagctcattatataaaagtattgcaacgtgaacagattggctcatggaaagagcgtcaagatctggagcgtgaactcaatatttggcttaagcaatatgtcgcagatcaagaaaacccaccagcagatgttcgtagtaaacgtccattgcgttcagctgaaatcaaagtacttgatgttgatggcgatccaggttggtaccaagtcgctattcaagttcgcccacattttaaatatatgggtgcaaactttgaattatcacttgttggtcgtcttgataaagagtaa

SEQ ID NO: 311612 - DNA, 258 bp, Proteus mirabilis
  misc_feature (225)..(234): n is a, c, g, or t
atgaaatttactcctcaacataaaatggatgctgcattaatggtaggcacatccttaaacacacccaataatcattcaatacaagagcaacatcatcgtttaaaagatgatgctaccgttagtgcttatatgagccagaattatatttctgtttctgtcgcagattcggttgaacatgtaaaagcacagctggttaatgatttaaaagatgaattaattccaacnnnnnnnnnnaacttatctgtatgtcgtagataa

SEQ ID NO: 311613 - DNA, 1131 bp, Proteus mirabilis
atgtcttataccactttttcacaagttagaaatgatcagcttcaggagcccatgttttttgggcaacctgttaacgtagcgcgttatgatcagcaaaagtaccctatttttgaaaaactaattgaaaagcaactctctttcttctggcgtccagaagaagttgatgtttctcgtgatcgtattgactacaatgcgcttcccgatcacgaaaaacacatttttattagtaatttaaaatatcaaactctgcttgattcgatccaaggtagaagccctaacgtggcatttttacctttaatttcgattccagaattagaaacttgggtagaaacatggtcgttctctgaaaccatccattcacgctcttatacccatattattcgtaatatcgtcaacgatccgtcggtcgtttttgatgatattgttgaaaatgaagagattttaaaacgtgctcgtgatatctcatcttattatgatgagttaatcaatttaactaacctttaccatatgtttggtgaaggtacgcatcaaataaaaggtaaaactgttgaagttactttacgtaagctcaaaaaacagctttacctatgcttaatgagtgttaatgctttagaagcgattcgtttctatgtcagctttgcctgttcatttgcctttgcagagcgcgaactgatggaaggtaacgctaaaatcattaaattgattgcccgtgatgaagcattacacttaactggcacacagcatatgctcaatttactgcgttcaggtcaagatgatcctgaaatggccgaaattgccgcagaatgcgaacaagaatgttatgacctatttgttgaagcagcagagcaagaaaaagagtgggcagaatacctattctcagaaggctctatgatcggtttaaataaagagatcctttgccaatatgttgaatatattactaatattcgtatgcaggcagtaggacttaaattgccgtttaaagcacgttcaaaccctattccatggattaatgcttggttagtatctgataatgtgcaagttgcaccacaagaagttgaagtaagctcatatctagtaggtcaaatcgactcacaagtagatactgatgatttaagtaacttcgaactgtaa

SEQ ID NO: 311614 - DNA, 501 bp, Proteus mirabilis; identical to SEQ ID NO: 304242

SEQ ID NO: 311615 - DNA, 873 bp, Proteus mirabilis; identical to SEQ ID NO: 295763

SEQ ID NO: 311616 - DNA, 885 bp, Proteus mirabilis
atgaggcgttttattagggtagatcttcctcctgaacctatcattaatgataaatgtgttaggaaacgcctcaaacaaagcctttgtgatagctgttcaaaagtctgtcctgtggacgctatcacttttagtcttttgaacgttgaaatagataatgagcgttgtttccaatgcggtaattgtctatttacttgccctgttgacgctatagaaaatatctccccccatgaacgtagctttcaagataatctattagtcattaatcatgatgaaccactggccagtattgaagagcttttggtttggcatcgacaatatcaaatacgcggtatgaaaatagcggaacccttggttgataagtggctgccgatactcgcacaacttaatttgcaattaaaaaccttacaagagcctatttggcaattagttttagtggagcctgaaccggtcgatagtggtcgtcgctttatgctatttcgacaaaaattagatgaaaagccacttaataaaggtcacgtaaaaacaggattaaatgcaaggaaacagctttatccgcaagatagctggttccatattcaattagataaagaaagttgtattctttgttctgcatgtgccaaggtgtgtgatgaaggtgcaatcacaatcgaagataatcgctttatcattgatgaaaaacgttgcaccggttgtatgaactgccaagttgtctgttttccaaaatcaataaaagtcgtagaacaaattgctaaaaatagcacaccgacacattaccattattatgatgcacaatgtgataaatgccgccttgctttttttgcttgggagcctaatgccaccttatgtccgatttgtactcagcatcaaaaacagggatggctataa

SEQ ID NO: 311617 - DNA, 1017 bp, Proteus mirabilis
atgtttaacttaaattatttcaaagcagactcatcaacatttattattaaatcggtcaacgggaaagtgcgccaacaaggtaaaggcttaagtttttggtataattcggcaacaacatctattgcagcactgccgttaaatgcacaagaagccccttttatctttaacttccaaactgctgattttcaggcactacgtattcaaggacaaatttcattccaagtcacatcacctgaaaaagctgctgaagtcctcaactttaatttaagtaagaatggcaaatcttacgccagtgaagatcccctaaagctcaacgatcgcgtggtgcgtattgctcaaaccctgatccaagccaagatccaaagcacccctttacgagaagcactacaacttagccaatccttggttactttagtgatgaaacaacttactgaacacccttcattagaggccttaggtattactattttagatgtttctattgcggccatctccccctctcccgaaacgcttaaagcattagaagctgaggcgcgggaatccttactcaaagaggctgatgatgcaatttatgcacgtcgtaaattctcagtagagcaagagcgcaccattaaagaagctgaattagaaacagacttatctatacagcgtaaacgacaagaaattgaagaagctcgtttagaaaatgaacgtaccctattacgtgaacaagccgaaatagaaaaagagcgtcttgaagccaaagtcaatgccgaagcaaaacgtaaagaattagtcgcgttaagtgcggaaaatcaacgcatacaatctgatgctgatgcttatgctattgaagcaactatgcgagcttaccgtgagttgcccgttgaaaatctcaaagcaatggctctagcaaaaatggactcacaacaattaatggcaatggcatttgaaactttagcgcttaattcaggaaaaattggtgaattaaatatcactcctgatttatttagccaatttatgaaaaaaagaggataa

SEQ ID NO: 311618 - DNA, 1203 bp, Proteus mirabilis
atgtcaagtaagctggtgctggtactgaactgcggtagttcttctcttaagtttgcaattattaacccagaaaatggtgaagaattcctttcaggcttggctgagtgcttcaaccttcctgaagcccgcctgaagtggaaaatggatggtcagaaacatgaagcggctttaggcgctggtgctgcccacagcgaagcattaaactttattgttaatactattctggctgaaaaaccagaactttcacaacaaatcgcagcaattggtcatcgtattgttcacggtggcgagaaatttactaaatctgtcgtcattactgacgaagtcatcaaaggtattgaggcggctattccatttgccccattacataacccagctcaccttattggtattgaagaagcgcgtaaagccttccctcatttaattaataaaatggtggcagtatttgacactgcattccaccaaacaatgccagaagaagcttatctgtatgctctgccatacagcttatataaagatcacagcatccgccgttacggtgctcacggaactagccatttctttgtttcccgtgaagcagctaaaatgttaaataaacctgttgatgaactgaacgtaatcacttgtcatttaggtaatggtggttctgtttctgctattgttaacggtaaatgtgttgatacttctatgggtttaacaccattagaaggtttagtcatgggtactcgtagtggtgatatcgatcctgctatcgtgttccatttacatgacactttaggtatgagcgttgaagatattaataaactgctcactaaagaatctggtttattaggtttaacggaagttactagtgactgccgttatgttgaagataactacgaaacaaaagctgatgctaaacgtgcaatggacgtttactgccatcgcttagcgaaatacatcggttcttattgtgcactgatggaaggtcgtttagatgccattatcttcactggtggtatcggtgaaaatgcagcaatggttcgtgaattatcactgaaaaaactcgctctattaggttttgaagttgatcatcagcgtaacttagatgcacgtttcggtaaatcaggcaccatcactaccgataacagccgtcttgctgttgttatcccaactaacgaagagttagttatcgctcaggatgctagccgcctgaccgcttaa

SEQ ID NO: 311619 - DNA, 612 bp, Proteus mirabilis; identical to SEQ ID NO: 300820

SEQ ID NO: 311620 - DNA, 249 bp, Proteus mirabilis
atggcaaatggtaacgcactggcaatggtgacagtttgtaatgctgataaacctcctgccaataacaaggtaatggctgaaatacccattaatgcagcccagaagatacgttgccatacaggggtttctgaatctcctcctgacgctagggtatcaaccaccattgcaccggagtctgctgaggtgacaaaaaagacaatgaccatcagcattgcgacaaaggaaagcactgatgagaatggaaaataa

SEQ ID NO: 311621 - DNA, 216 bp, Proteus mirabilis
gtgaaagcgcttatttgtcatagctttgagactctacaattagataatctatggtgtggttattttgcagacaatgtaaactcgaagcgagtacaagaaaagtgtggatttaaatatcatcacataattaaagatcagtatgtggagtatttagacgaaataagaacagaagttatttgtcgtttaaccaaaagtgaatggcaaaaacaacaataa

SEQ ID NO: 311622 - DNA, 501 bp, Proteus mirabilis
ttgcgtcgtttcgtttgccagtttaaacccattattgcacctgagccgattgtgcgttttgaaaagcctctcggtcagcagatgcagattgatttcaccactattcgccgaagtaaacagaagctaaaagcgttcgtggcgacactgggctattcccgagcttattacgtcaagttctttgataatgaacgagccagcacttggcaacaggggttaaaagaagcgttcgattactttggcggcctgcctcaacaagtactttttgataacgccaaagccctcattgtcaagcgagacgcttatgctgaaggtgaacataaactgcatgttgaaatgcttcagatgtcaaaaaattatggttttaagttgaccacttgccagccttatcgggccaaaacgaaagacaaagtagagcgttttaaccattacctaaaaaatagctttatcgtgccacttaaggcggaacttcgcattcaaaaccttgaattggatgttgaatag

SEQ ID NO: 311623 - DNA, 549 bp, Proteus mirabilis
atgtctgaacactttcaaggtaaatttgaagcagaattgaaataccacttaaaacgacctcaagattttattgatgcattacaactcgctggagcaactttatttatatcgaaaaatgatgaaacagattggtatttagaacatcccaatacacctttccctgctccctctataagtttgtgcgtaagaaaaatggtcccctctggtatcaatttattaattgtaaaaggcccagaacaagcccaatgtgaagcagtaaaaatagaagatgcagaaaaaacggtttcgatgtttaaaacattaggttatcactgtattttaaactatacaaaatcccgtcaaatctactttctagagcaatttcatatcactatcgataaattagacaatcttggttactttgctgaatttgctattatgactgatgatgagagtaaacttgctgactataaacaacagttacataacttagcatatcaatttggctttaatgatagtgagcaagagcatcataactataaaacaatacttttaagcaagttagcttaa

SEQ ID NO: 311624 - DNA, 234 bp, Proteus mirabilis
gtgatagataggcaagatgggcaaccattaaaatatactttatatgacaatgtgaacgatccatatcaaatgaaaaatattgccaaagataatatgcctttaattgataaattaattaaagaagaattaaccccttggttagaaaaaacaggagattcttggagagcgactgagtttattacagcgacaacgaataaattaaataaaaaaatatcaatatgtgaagaaaaataa

SEQ ID NO: 311625 - DNA, 1245 bp, Proteus mirabilis
atgactgtttcccgtagaacttttatcaaaggtcttgccgccagtggggcagcaatctctgtttctacacctgctcttgctacttcaggtgactttacagcaagcaaacgcactcgaccagaaaatgcacctaacttattaattgtttttcctgatgaaatgcgagcccatgctctacagtttatgggggaagatccatcgattacaccaaatcttaataaatttgccaaacaagccaaagtaatgacacaaatggcatcaaattaccctctatgctccccttttcgaggcatgtttatgacaggtcagtaccctgtgcgtaatggtatcacaggtaatgcccatgattacggtggaaaagtaggtattgacttgtctccttacgcaaaatgctggtctgacgtacttaaatccttagattatagcactgggtatattggcaaatggcaccttgatgctccctatgagccttttattgaaagttacaataatccaatggaaggtcgttattggaatgaatgggctgctccagataggcgtcatggttttgatttttggtattcttatggtacttatgacttacacttgaaaccgatgtattgggcaaacgatacacctcgtgataaaccgatttatatcgatcaatgggggcctgaacatgaagccgatatggcaatcaagttcctcaaaaatgaaaataatcaatttagagataattcaaaaccatttgcattagtggtttcaatgaacccacctcactctccttatgatcaagtaccgaaaaaatacctcgatgcttatcaaggtaagacatcaaaagagttaaatacacgccctaatgtacagtgggacagtgaatatcaagaaggttatgggcctcaatatttcaaagaatatatggcaatggtcaacggtgttgatgagcaatttggtcgcattgtcgatgaattagaaaaacagggccttgcagataatactctcgtcgttttcttctctgatcatggcagttgcttaggatcaaatggacaagcaacaaaaaataatccgtatgaagaatcgatgcgtgtccctatgatgtttcgcttaccgggtaaaatcaaaccaggttttgatgatgcattaatgtcagcacctgatatttacccaactattttagggttacttggtttatcagaatggatccctgattcagtagaaggcacagatcttgcagatagagtcaagatcagccaaagggttttctaa

SEQ ID NO: 311626 - DNA, 258 bp, Proteus mirabilis
  misc_feature (213)..(222): n is a, c, g, or t
atgccagtacttgaggcgaatacaccttatataggtttccagtgggagccttatcgattagtgatacaatcaatacctttttaccctgaaattggacgagcgggtgtggctatctacaataaaagcaatcccaaaggggcctttattgttttagcgcccagtggatatggtttgttgcgttataaacgggctaacggcgcatatgagaatgcnnnnnnnnnntcgttcccaaaccaccgctatgacaaatatgtataa

SEQ ID NO: 311627 - DNA, 858 bp, Proteus mirabilis
atgatgaaacttaaacttcgtcatcgtcggcttaggaagtttcgtaagataaaaagtttacgtagacaacactcacgttgtcgttattttcatttaacccataaaacggaacatgaaatgaatttacccaaagtagtggtgctaactggggcgggcatttcggctgaatcaggtataaaaacctttcgatcagaagatggattgtgggaagagcatcgcgttgaagatgtggcaacgccagagggatatcaccgcaaccctaagctggttcagcagttttacaatgagcgccgtcgtcaattacaacaaccctcaattcaacctaatgaagcacattatgcattagcaaaacttgagcaatatcttggaaaggacaatttcctgctggtcacgcagaatattgataacttacatgaaaaagcagggagtaaacatattctccatatgcatggtgagttattgaaagtccgctgtccgcaatcaggtcaagtttttgaatggaaaggggatttatcaacgacagattattgccattgttgccaatttccctctcctctacgtccacatattgtttggtttggcgaaatgccaatcggcatggatgaaatttatcacgctttagcacaggcagatctctttatcgctattggcacttcggggaatgtctatcctgctgctgggtttgtccatgaagcacggttaacaggggctcacacggttgagcttaaccttgaacctagcttagtggagagtgagtttgaagaaaaacattatggccccgcaagccaagtggttgatgcatatgtccataaattgtttgatttaattaatgatcctaaagctgatttgacgcaataa

SEQ ID NO: 311628 - DNA, 246 bp, Proteus mirabilis
  misc_feature (220)..(229): n is a, c, g, or t
atgtctactgcaacaaatctgaatgaactacaggaacaagttcgctcccgctataatggattaagtaaaaggctacagcaggttgcacattatcttttggataataaaaacagtgtagcatttgatacaatcgcgatccttgcagataaagcaaatgttcctccatcaacattaatccgttttgccaatgcatttcatttcaaaggatttaatgaaatgnnnnnnnnnnccaccaaacttaaatga

SEQ ID NO: 311629 - DNA, 366 bp, Proteus mirabilis
atggatatcaacttaacttacctgtacaacgatggtgagttctggcatttcatgaacaacgaaacctttgaacaattagctgcagacgaaaaagcggttggcgaaaatgctaaatggttgattgaccaagcagagtgtatcgttacactgtgggataatcgtcctattgctgttgttccaccaaactttgttgagttagaaatcgttgataccgatccgggtctgaaaggggatactgcgggtacaggcggtaaaccagcaacattaagcactggcgctgtggttaaagtacctctgttcgtacaaatcggtgaagtgattaaagtggatacgcgttctggtgaatatgtatcacgcgtaaaataa

SEQ ID NO: 311630 - DNA, 483 bp, Proteus mirabilis
atgacagataagataaacagtacctatatgccttacaaacattataaaaatagcatagcaatattattcctcgcctctgccttgctacctagattttctgtggctgaatcacttactcatttacctcaaaaagatcgcatttcttattttgctcaagcggagaaaatggccatcactggtgtggctatcaaaaccaaacccgttttagccagacctgcaaaagaaggagaagtgatcaccacttacataaaaggtgaaggggttgaaactatttcggagccagccaaagcgggtgattgggttgtacaaaatatttgtccagcaacaggtaatgaagaaattctggtcagaaaagataaatttgctcagcgctataatctggctgatgcagacaaagcgaaaagcatcacaccgataaggcaaggctatcaagtttttatccctaaagggattgaaatgaattattttattgttccaaaataa

SEQ ID NO: 311631 - DNA, 147 bp, Proteus mirabilis; identical to SEQ ID NO: 304244

SEQ ID NO: 311632 - DNA, 729 bp, Proteus mirabilis; identical to SEQ ID NO: 306928

SEQ ID NO: 311633 - DNA, 375 bp, Proteus mirabilis
  misc_feature (313)..(322): n is a, c, g, or t
atgaaaaagaatattttcctaatattatttttactattttccctcataacggctagccaagctgctggaataagtgtgggaggaacacgttttgtctatgacgataatctacgtgaaatcagtattccaattatgaatacggataaggaaaaaccctatttaattcaaagttgggtttcagcttatcaaggtgatgaaaaaacaccttttattgcaacacctccactatttcgtattgagccagatagttcaggcacggcgcgaatttcatataccggagcacctttggcatcaaaccaagaagtggtttatnnnnnnnnnntatcaaatccattccaccgatggaaaaaagtccagagaatcaactccaattag

SEQ ID NO: 311634 - DNA, 375 bp, Proteus mirabilis
atgaaacaagcaacggcgatcttctttgcgtttattctggctttttcggcgggctggctggttaaaggttggcatcaagacagccttgagttggtcgcactaaaaacagcgaatgaaatcaataacgccagtttaaaggctcaacaagatttagcgagtcaatcagccaggacgttagaaaataaattagaggaactcgccaatgtgcaaccgcctgaaatacgcaccgaaattattaagcctgtgttcactaacctttgtgttagtgatgattttgtcaggatgtacaacgaagcaatcgacagtgccgaacgtaccctatcaggaaaatctactgacaaaatgcccgacaacattaccaaagttaaacagtaa

SEQ ID NO: 311635 - DNA, 246 bp, Proteus mirabilis
atgcttgagcagaatatccgacaaaattttgagtttctttatacacgtaaagagatgttaactgctgtaagtgagcatcgcacacagatttatcaggcgattattaatagagagccagaagcagcccgtgaagcttcacaccgccatctggcctttattgaagatgttttgttggatatgagtcgtgaacatactcgtcgtgagcgttctttgcgccggctccaacaacatcctgatttattttag

SEQ ID NO: 311636 - DNA, 438 bp, Proteus mirabilis
atgaaaaagcctgcaaacctacgtgacatcttaattaaaaaggtggcctatttaggggataaccccgataggctctacacctttattgacggcggggcgattgtggcaagcggtgcccgtagtcaatcttatgagtatcaatacaatctcaatattattattgatgattatcccggtgaccaagatgtgttaatggcggtgatcattggttggattgaacaacatcagcctgatattttcctgaatcccgataaacgccaaagtcattttacctttgacgcctttattgatagcaaccagaccgccagtattagcattgatttaaagttgactgagcgtgtcctcgttaatgtgcaagcgaataaattggttgttggtgccattgaagagccggctgatccgtttgaaagttgggagagtgtggctcatgaacgctga

SEQ ID NO: 311637 - DNA, 504 bp, Proteus mirabilis
atgaaaaggaacgtactgcttattattgtggcgggtgtgatgggtttgctactgatatttaagtttgatgctttgctcactgagaatagccagcttaagggtgataatctcgcccttaagaaaagtgttatcagtcatcaagacgccattgaacattatcaggaagaacttgcccgcttatcagaattggataaacaacacacaaaggcgttaaccgatgcaaaaaatgatattagccggcttaatgatgagttgcgcaataatactaaacgggtgtacatcaaagccgattgccccaaccccgataatcacaccaccgccaccgccggcatgggtaatgcaacctccgcacgacttaccgaaacagctcaacaagattatttacgtctcctcgaaatgatggcggagaataaggcgcaaacggaatatttgattgattatacaaatcaattattacaatacatcaataagttaaaccatgaaaaagcctgcaaacctacgtga

SEQ ID NO: 311638 - DNA, 315 bp, Proteus mirabilis; identical to SEQ ID NO: 310864

SEQ ID NO: 311639 - DNA, 456 bp, Proteus mirabilis
atggattatgtttctgctaaccctgtgccacaaaaagacgaaaccattaaaaataatggctttttccctgatattcaaactcgtgattttcaattgcaaactcgcgtcgatggcacagtgacgccggagcggctgaaaagcacgttattgaacgccatgattgaagtgaatcgcgaattgtatcagtggcgtattggtcaaactgcgaaaacattaaaagaggtgcccgctgaacagattaacggtgaaagcgaactgatgattttatatcagcgtgcggtgttctgttttgtaaaagccagtttaatcgagcgttatcgcgatattgatactaccgcacaaggtaataaaaaagccgacaccatgacgccggctattgatgaagtgtggcgtgatggcaagtgggcgttacaacgtatcaaaggggaaacccataacacggtggagcttatctaa

SEQ ID NO: 311640 - DNA, 669 bp, Proteus mirabilis
atggcattatctccgtgggaaaaacaccgcatgagccttagcgcgcaacagtccagccaattgggtgggcatgttagtcgcaatacacagggctatcacatgatgctgttacgtcttgcgacagataaaaaagagctaaaacattttcagtcacgcgaacgcaaagaagcttataagcgcaagatattagccaattatcagccgtgggttgatggggcattgtccggtggtagcggtgtgcaagatgatgtcttaatgacgattttgctgtggaaaattgatgcgggggattatgagggggcgttagatattgccgtttatgcattagctaaccgtttagtgatccccggtgtaaaccgcaccacgggcaccgtgattgccgaagaaattgccgattcggccatgcgagcgtatgccgtgaaatcaccggtatctttagcaacattagagcgtacacgtgccttgaccgatgatgaagatatgcctgatgaagtgagggcaaaactctacaaaatcttagggttagtgctacgcgataataatcgcccacaagaaagctactgcgtattaagtcgagccttagagttaaacatgaatatcggtgtgaaaaccgaattaaaacaactcgataaagtgctcaaagctcagcgtgacactgaaaaagcatag

SEQ ID NO: 311641 - DNA, 810 bp, Proteus mirabilis
atgtcgaagaaatcaaaaccggttcgtctttgtgttgaaggggcgacaacggacgggcgtcgagttgatcgcgaatggttaatccaaatcgcgaaaaactttgatcccacggtttatggtgcgcgagttaatatcgatcactataactattcatgggcaccacgctttggtgatgtggagtcggtgtataccgaggaaattaaagaaggggcactggcgggtaagttggcactatatggtgtgatcaatccgacgcctgatttaattgaactcaataaaaaacgtcaaaaagtctatacctctgttgaaattgacccgagtttttcagataccggagaagcgtatttagttgggctggcggtcaccgataaccccgcgagtttaggcactgaaatgctgcaatttagtgctaatgcacaaagtagcccgctttcagagcgcaaacaaagcaaagataacgtttttactgctgcagaagaaaatcactttgaatttattgatgaaaacccgcagagcgagaagccggggctttttagcattattaaagagatgttttctaaaaaacaacacagtgatgatgcgcgatttaccgatgtgcatcaggcggtggagctgtgcgcccaagaagtacaaaccctttctgcagaaattaccgcattaaaaaacgccgaccaaagcgaagcggtaaaagcgctcacgaaacaactcacggaattaaaaacccaatttgaaaatacagacgcctcgttctcacatcgtccgccggccacgggtggcgaaaataatagcgaagtgctgacggattgctaa

SEQ ID NO: 311642 - DNA, 1755 bp, Proteus mirabilis
atgactatgacagaaacatttgataaccgaaaaaaagcaatgcacctgtattttgccggttaccgcattgctcgcatagcggaatcgctaggcgaaaaggcgtccactattcacagttggaaacgccgcgataattgggatgaaatcagccctaccgaacgcgcagagctaaccgttgaggcacgttattgcaatctaattttaaaagagagcaaagaaggcaaagattttaaagaaatcgacttgttaggacgtcaactcgaacgcatggcgcggatcagaaaatatcaaaacggcggtaatgaaacggaccttaatcctaagattgccaaccgcaacaaaggcgaacgccgtcagccagagaaaaacttcttttcagaagaacaaattgaaaaactggaagatatctttcgcaatgcgttgtttgaatatcaaaaggtgtggtatcgcgccggtcatcaccgtatccgcaatattttaaaatcccgtcaaatcggcgcaacatttttctttgcgcgagaagcctttattgatgccctgaccaccggacgtaatcaggttttcctctccgccagtaaagcgcaagcctatatgttccgtgaatacattatcaaaatggcattggaggttgatgttgaattaaaaggcgacccattgatgttaagcaacggtgcaacgctctatttccttggcaccaatgcccgcacagcacaaagttatcacggtaatttgtatctggatgaaactttttggatacctaaatttcaggagttacgcaaagtcacttcgggtatggccatacaaaaacattggcgacaaacttacttttcaacaccgtcaaccatgagccatgaagcgtaccccttttggtcgggcaagctgtataaccgcggacgcaaaaaagaagacagagttgatattgatatctcacatgaagccttagtcaatgggcgtttatgtgaagatgggcaatggcgacaaatcgtcaatattgaagatgcgttgcggggcggttgtgatttattcgatttagagcaactcaaaaaagagtatagcccagacgaatataacaacctgttaatgtgtcactttatggatgatatcgaatccctattcaactttaacatgatgcaaaattgcatggtggacagttgggaagtgtgggatgacattcaaccattagcgctacgcccttacggttatgatccggtttgggtaggttatgacccaagcaaaggtggtgaaaatggtgatagtgccggttgtgtggttatcgctccgcctaaagtacctggagggaaattccgcatattagaacgtcatcaatggcgtggtatggattttcgcgcacaagctgacgccattaaaaaaatcaccgaacgtttctatgtggaatatatgggtattgataccaccggcttagggcatggggtttatcaaaatgtcatccagttctttcctgctgcgagggagtttatttataacccgaatgtcaaaaatgctttagtgattaaagcctatgacgtgattagtcacgggcgcttagagttcgatgcgcagtgcgttgatatcattcaatcctttacatccattcgtcgtaccaccaccggaagcggtaaccgcccaacctatgaggcctcgcgcagtgaagaaagcggacacgctgaccttgcatgggcaacgatgcatgcccttttcaacgaaccattaaccggcaccaccgagaacagtaataatattgtggagatttattaa

SEQ ID NO: 311643 - DNA, 405 bp, Proteus mirabilis; identical to SEQ ID NO: 303816

SEQ ID NO: 311644 - DNA, 336 bp, Proteus mirabilis
atgaaactgactgatgcaactgaggacgcctctatccttgatggtgtcttagaacaaatgcaatgtcagccgtcagtgccagttaatgaagcgtgtgattctaatgtgcctgcttatttactaacggcggtcggtgaagtggggaagttagcaacaaatacagtttcaggcggtaatttaaataatgcacgtgtcgctgactttaaacgttctgttaatacagcaattcgttgtttaacgttggcaggcataacactatcggcaagattacatactaatccggcgtttgcctgtgcagtggatgcagtcgctaatcttagcccatcaatgatatga

SEQ ID NO: 311645 - DNA, 516 bp, Proteus mirabilis; identical to SEQ ID NO: 301306

SEQ ID NO: 311646 - DNA, 252 bp, Proteus mirabilis
atgaatacatcaataccaacccccgtttttatgcctgcacaaattgctaataacgaacacgctattgttttagattctacattagcgttggcgcgtaacgaacaaaagcaagcctgtgcggatagatatgcgtcccgtattcgtaaactgtctagtttaattattcaaaataaaatggattacgccgacgttgctgaactgttggaaagtgaagcatcagagctagaacgtcaagcacaagaactggtttga

SEQ ID NO: 311647 - DNA, 2202 bp, Proteus mirabilis
atgactaccgcgatagataaaaatagcgatggattgaaattaaaacatcgctataaatttcctaagtatcctttcaaatatccatcccccgtagtgtgtgctgtgggggaatttcctcgttctgataaaaatgaaaaactatatttgtggaatgaaggtaaagggaaagcaatttatcgcccatttgaaacctacgagcaaatccatcaaaaggaacgtgagcataaggcgtttcatgatgcggaagccttattatcgaaacaacctaaattagtacaaatcgttgttaacaagcgatatagcgatttagataaagaacaaggtcgcaaacgcgctaatgcttatcttgcgaaaacctttgttgaaagaacctacccaagaataaagatgatcactgaccgttatgctttgcctgcaatgacggtagaaaactgtaatttcttcaaccgttttaatcgcctacctgatatgtcaaaaaaagatatcgaaaatcttgcatgggatatcgcaaacttaatgaatgaacagctcatgttagtaggtaaagaaaatatcactgatagtgaattgaaattaacctacaaactttttttacatgcttcaaaaataacctcaggttttaaacaagatgtgcctagatgggcaaaattaactactcgttattttaatcagaaagatgctgattcggctatttctcggatgatgtcagataaatggtggcttaaccgtttacgtaaatatgcgtctcaatggcgtgagcatttaagcattgcaatcaacttggtcagtaagaaagccaatatttatgcgagtaaaaccgccatcaacgaatggaaagagcaaaaaaataggactcgtgagtttttaaaatccatggagctggaagacgaagaaggaaatcgcgtcagcttgattgataaatactatggcagtgtggccaaccctgcgattaagcgtactgaaatgatggtgcgtattcgtggttttgaagacatctgtaatgaattaggttatgtcggtgagttctacacattaaccgccccgtctaaatatcatgcgacaacaaaacacggttaccgtaaccgtaaatggaatggttgcagtcctgctgatacacaaaaatacctttgtaagctatggagtaaaataagagcaaaattacatcgtaaaaatttgcgtgtctttgggatgcgcgtagctgaaccgcatcatgatggtacacctcattggcacatgctgttatttatgttgccgtctcaacttgaagaaatccgctcaattattaaagcctataccgtagcggaagataatcacgaattaatcactgacaaagcgcgtaaggcgcgtttttacgttgaagaaatcgatcccgaaaaagggtcagctacggggtatgtggcgaaatacatttcaaaaaatgtcgatggttatgcgcttgatggtgaagttgatgatgaaagcggtagaccaatgaaagaagctgcaatggcggctgctgcatggtcaggacgttggaatattcgccaatttcaatttataggtggtgcgcctgtgactgtttaccgtgaattacgtcgaatggctgaccatgatagggcgatgggtttagatgtggaatttgcccttgttcatgattgtgcggacggtggaaattgggcgggttatatcaatgcccaaggtggcccgtttgtgaaacgtgaaaaccttatcgcgcgtctttggtatcaggaatcggaagacaccaacgaatacggtgaagaagtgatccgtgtaaaaggggttttttctacattagttggcatagatacacctattttaacccgtttgaaacagtggaagattgtgaagaagttagacgacgcgcatgcggagtctgcttttagtggcgcgaacgcgtcacctaggagttctgtcaataactgtacgggggaaacccggacgattaacgatgatgaaaagggggtaacggaaattttagataatttcaggtcaatcgggcatgaaataaccctagaagatgccaaaaaaatgagaaatgggtcgggaatagtcattgatgatattgcatttagaagttttgacgatggttctttgataagaacgggcacgacacaactgaaataccgtcaattccatgaaaggaaagcgcgaatttttaacaaagtcaataaattaaggggaataaataatgaaagcgtttga

SEQ ID NO: 311648 - DNA, 201 bp, Proteus mirabilis; identical to SEQ ID NO: 299492

SEQ ID NO: 311649 - DNA, 492 bp, Proteus mirabilis
atgaaaaatataaaactgacattaggtttattgggtcgtctatattttaaacaaataaataatttgttaataaaaacgggtttagctcatgtcaaaaatagagaccttatcgaatctgatgatattacctttataaatagggcgttggggcatgcagaatatttttcgttagagtcaattttaaacgcattggaaacgggaaaaaataaattttttataggtgatgaatgcgagattaatcatattttagattgcttttgcgatcaccttggtatagcaaatacaggtgttagacggtttattttgggaggtgcaaaattttattttgttagtcatgatgattttaaaaagccattatttggcagtctggcgggggatgtctattatgcaatacctcaacaacccaatgatatcgaagcctatttaattgattctttatcatgccatacccgatattacgtgacgaaatatcaaggtttgcgcaataagtaa

SEQ ID NO: 311650 - DNA, 183 bp, Proteus mirabilis
atgacagataatataaaaagcatggaagcatttgaaagaattgcacttatcgcaaaagtgggcagttttgattctttcacatcacaggaaaaagatatcgttttatcattaatatttgagttagccgacaacgccagagtggacttattggaaaaaaataagccacacaatgtggctcaataa

SEQ ID NO: 311651 - DNA, 255 bp, Proteus mirabilis
atgaaagtgatgaaagtcctctgccccgcatgcggtgaaaaggcaatcataagaacaacaaatagaaaacatcgccaatttgcagacctttattgtcaatgcacggacttagaatgcggaatgactttcgtattaaacgtcacttttagtcacacgctaagccctagtgcgaaagacgtgaataaaatgattgataaactgctaccggataataaacaaatggcgcttgatttactcaaagcgcccattgcttaa

SEQ ID NO: 311652 - DNA, 285 bp, Proteus mirabilis
atgccgattggggatatttcagccaaagatgaatttaataatgttaaaaatatcagtgctcaagatattttaaccgcccaccgtttccctgcgggactggcggggattattcctggtaatgttggcggactgggtgacccaataaaagcccgcgaagcctatcgacaagatgaagttatccctgtgcaacgtatgtttgagaatgccgtcaatagtgaccctgaaataccgttacatttgcatatcaattttaagaaagataacgaccgtttgggtgcagaatga

SEQ ID NO: 311653 - DNA, 984 bp, Proteus mirabilis; identical to SEQ ID NO: 306071

SEQ ID NO: 311654 - DNA, 492 bp, Proteus mirabilis; identical to SEQ ID NO: 305263

SEQ ID NO: 311655 - DNA, 432 bp, Proteus mirabilis; identical to SEQ ID NO: 309573

SEQ ID NO: 311656 - DNA, 465 bp, Proteus mirabilis
gtgattgattatgaaatattatttgatgatatcccactcgtttatctacacaaaaatcatccgttaatgaaaatgaagtgggatcttaataattttttatcgttttctcaggtgagtacagaatatgacaaacaaagtcattgggctttggataatatcttaaaagaaatgaacaaaagtcgtcagatagcaattacttatacttcttttgagcaatctctttttatgatatctcaacctgaccatcaattaattacttgtgcaccaggatattgtcgttattatgtgaaaacacattttcctgatattgtaacattacctatccctctcccccctgtgtttttagaacagcttcatctaccttttgttttgttatggcataagcgtaatagccataatacaaaaattatatggttaagaaatacaataagaaaaagtattaaccaacaaacctccgatatctga

SEQ ID NO: 311657 - DNA, 642 bp, Proteus mirabilis
ttgttaattccattatatgaacaaaaagaaaagctgatctttgctcaaactaactatcatcgcaaagatcttcgtagccaatttaattatggtattggttatcgctattttactgaaaaatttatggtcggcattaatggcttttatgatcatgatttaacgcatcatcataatcgtttgggaattggcgccgaaatttggcgagactatttcaaattaagttctaaccattatcaccgtctatcaagttggcgagcctctaataatatcttagattatagtgaacgccctgcgaatggttgggacattcgaacagaaggctattttccagcttatccacaattaggcactaaattaatctttgaacaatactacggtaaagaagttggtctatttggcaaagataaacgggacaaaaatccacatacctacacattagggattaattatactccgataccattagtcacattaaatgccgagcgtcgtattggcttacatgatcgtgctgataataacttgaatatcaacttgtcctaccgcataggagaatcactcgcttcacaacttaatcctgataatgtcaaagcaatacgtacattagcaggaagtcgcttttcctttctatggttgattcaataa

SEQ ID NO: 311658 - DNA, 483 bp, Proteus mirabilis
  misc_feature (454)..(463): n is a, c, g, or t
atgttaggggcttgtgttgcttatttacccgtaaaagtaatcattaatcaaagagttaatagtgttattagtctcatcgccttaggggttatcttttggatagccgttcaaaaagatgtgattgctggttatccgaatttcaatacgttatatgtttgtcttagtgttgcactaattatttatacaggacaacatggcagtattattcaaaaagtgttgtcattaaagccaatagtgatcattggattattatcttattcactttatttatggcactggcccttatttgctattgcgcgttatataggcgtatttaacaccgagatacaaaaagggttatttttagcattaacatttttactctctattttttcttaccttcttattgaaaaaccgtttagaagaaagcgtttgaactttaaatattcgataacattattgtttgttatacctnnnnnnnnnnggattaaatgcattaaatga

SEQ ID NO: 311659 - DNA, 1188 bp, Proteus mirabilis
gtgactcgccgttacacagcgaagggatatcaagattaccattatgatgttaatgggcgattagctaaaaaaattgtccatacacgcggttttcgccccagagaatggcgctatttatggaatacacaaaatcagctgaccgcatgctttacaccgaaaggggattgctggcactacacttatgatgcttttggtcgacgtctgagtaaaaccaaaactgtcgacagtgacttagcccatattgacccattatttccgcagattaagcctaaaatcaccacgtggcgctatttatggtcgggagaccaactgatagaagaaacgccgatatatgccgatggcactcttgcggcgtctcagcaaatccaatggctgtatcaacccggagaaataacgcccaccgcgcgttatcaacagggtaaactgcactatgtggtcaccgaccaccaaggcaccccgcgagagatattcagtgaaggcggacaagccagttgggcaggacggttgaatacgtggggccaaatgcagttttggcgttaccgcgagggcaaggcggagaatgaccctaattataccgaatgtccttttcgctttgcggggcaatatgaagatgaagaaagtggcttgtattataatcgctttcgctattatgataaggaaacagggcagtatctttccccagaccccatagggttattgggtgggctgaatccgtatgggtatgtgcattgcccgacggggtgggttgatccatttgggttggagtgttgtccaggaaaaataactggagattctaagactctaagagaaaaaattaatttagctcgatcaggagatgtttctgctcaagcagaattggcttatgctaaatatatgcgtgacaaaggacataacattcattttaatacgcctccaaatcgttctatatcaatggctgatttcacagtagatggggttcaaattgatactaagctattaagtggaataggtggtaatgcagctaaaaatattacgaaaggtgtaagacaagttggtgataatggagtggttcaagtaattagaaactcagattcacctataagcttagaacaatttcaagggtttattaatggatataagtctccaaacccttcagttaaagttgagctaatcgatcaatcggtcctgaagccttactgggatttttaa

SEQ ID NO: 311660 - DNA, 1482 bp, Proteus mirabilis; identical to SEQ ID NO: 299923

SEQ ID NO: 311661 - DNA, 618 bp, Proteus mirabilis
atgaccatatccgcactcatctgtctagctaatggtagtgaagaaacagaggttgttaccaccgctgatttactcgttagagctggaattaaggtcatacttgctagtgctgaagatgatgttgatgacttagtgatcacctgctcacgagggatcaaattaattgctgatgtcccattagttcgtgttgttgatcaccattatgatgccattattttacccggaggattaataggtgcagaaaccttacgagatagtcctcttgttgttgaaaaagtacgccgcatgcacagtgaaaatagactagttgccgctatttgcgcagctcctgcgatcatcttagagtctcataacctctttccaataggcaatatgacaggtttccccggcttaaaagataaaatcgaacctaaaaaatgggttgattatcgggtttactttgacgaaagagtcaatctgattactagccaagcccccgctaccactatagatttcgcacttaaaattattgagcgcctaaaaggtaaagcagttgcagctgatgtcgctaaacaacttgtattaccaccaggtatttataattatcaagatgaatttactgggtttggggataggtaa

SEQ ID NO: 311662 - DNA, 513 bp, Proteus mirabilis
atggaaagtacaatttaccttataggacctagaggtgcaggaaaaacaacagtaggtaaagcgctttctctatctttagattatcaatttattgatacagataattggataacagataaatatcaacaaactatttcttctatggttgaagcggaaggttgggatgtatttcgccaacttgaatcagatgcgcttattcaagttagccaacctaaccaagttatttcaacggggggagggatagtgttggcagaaaaaaatcgtgtttatatgaaaaattcaggtgtaattgtttatttacaagcttcacttgaaactttagttgagcgtttatctcaagatcctaatgaggcacaaagacctagcttgacgggaaaaacattagtttcagaaatacacgatgttttaattaagcgtgagcctttatatatgcaatgcgcagatattattgttgatgctggattatctattaatgatattattgaggtcattctcgcaaaactcgctaaataa

SEQ ID NO: 311663 - DNA, 279 bp, Proteus mirabilis; identical to SEQ ID NO: 308085

SEQ ID NO: 311664 - DNA, 408 bp, Proteus mirabilis
atgcctgttgcatcaagtcctaaatcggctctgatctcttcttgtccaccttgtggcacaaaaagatcaggtaaccctaaattgagtacgggcactaaacaacgctcttgcattaataactcgttaacgccgctacctgcgccacccataatggcattttcttctaaggtgaccagtatgtcgtgttgtttggcaagagaaaggatcagttctttatctagtggtttgataaagcgcatgtctgcaactgttgcatccagtttttctgcaacatctaaggcttcgggtaataaggttccgaagtttaaaattgcaatacttttaccttggcgacgaataataccttttcctataggaagttcgctcagctgttgtaatggcgcaccaacccctgatcctctaggataa

SEQ ID NO: 311665 - DNA, 1101 bp, Proteus mirabilis; identical to SEQ ID NO: 303074

SEQ ID NO: 311666 - DNA, 138 bp, Proteus mirabilis
atgtattttcagtatggtgaaaaagagatctcttttttaaaacaaaaagataagcgtctagccgcggtgatggaaagaataggggaaattaaacgtccacttaaccacggttcagcaacgcttactttccctatgtga

SEQ ID NO: 311667 - DNA, 477 bp, Proteus mirabilis
atgagcaaacaacaacgtatcgctttatttgttttattattagctggattcgttactatctttgatctatttgtcgttaatgtcgctatagttaatattgaacaaacacttaacgccacactcaccgaactcacattgattattgtcggatacgaattagcatttggcttgctattaatcacaggtggacgattaggtgatatttatggacgtcgaacactctatcgctttggaatgtttggctttacgttatcatctgtattatgtgcaatttctccaagtgctgttttacttgttattgcccgttgttttcaaggactaactgcagccttgttattccctcaagtatattcaagtattcgccttaattttgatagctcacaagccaaaaaagtattcggcttacttggtatgacgttaggtgctgccgctatagcagggcaagccttaggtggattattaatatatttgggttag

SEQ ID NO: 311668 - DNA, 291 bp, Proteus mirabilis
atggtttctgtgatcggccaattagccccattgcgcagttcagaaggttatttagtaacccccattgtcggggtgatcccccccaatttatctttacggcataatcccacagaagtcgcttctgtctttgaaatgccattaagttatgtactcaatactcagcgctatttaccgttagattttcgtcgtgccggtaaaatgcatcgcatctatttttacccttatgaagggcatttggtgtggggactaaccgcagctattttacataacctcgcgttgcatattacttaa

SEQ ID NO: 311669 - DNA, 309 bp, Proteus mirabilis
atggtttcaatcactttatcaagtgaaactcgtggttcactggtacgacgtaatgccatacgagcagcatttaccgctttaacagaggcaattgcattacgttcaatacaaggaacttgtacttgtcctgcaacaggatcgcaagttaaacctaagttatgctccataccgatttcagcagcaacacagacttgttcagggctagcaccgagtaattcagcaagtcctgcggcagccattgagcaagcaacgcccacttcgccttggcaacccacttcagcgccagaaatagaagcattcattttgtaa

SEQ ID NO: 311670 - DNA, 1728 bp, Proteus mirabilis; identical to SEQ ID NO: 103825

SEQ ID NO: 311671 - DNA, 1413 bp, Proteus mirabilis
atggggcctaatggcgaaagtatgccgggggttgccgctaaatgggagagctcagaagacaataaaacatggactttctatttacgcgatgatgcgaaatggagtgatggtacaccggttactgcagatgattttgtttatagttggcgtcgattaactgatccccaaactggctcgccttatgccagttatcttgaatatgcctatgtggaaaatgttgcagatattctgacaggcaagaaatccccagagagtctaggggtaaaagcaattgatccacatactttgcaagttacgctcacacaaccggttccctatctggtggatatgctaaaccacacctcattaaaaccagttaaaaaagagattgttgaaaaatatggtgtcaattggactcgcccggaaaactttgtcggtaatggggcgtatttaattgataattgggtggttaatgaaaaaatcactttaaaacgtaatccgctttattgggataacaaaaacaccattattgaacgagcgacttttttacctattagttcagaaaccagtgatattaatcgctaccgtagcggtgaagttcaaatcaccaatagcgctattcctcctacgctttatcgaaagatgaaacaagagcaaccggaggctctacatattacgccttacctatgtactttcttttatgagcttaataataaacgtccaccttttgatgatccccgtgtgcgtgaagcggtaaaattaagtttagatagagaaattatcgcggaaaagatcatggggcaagggcaaataccggcttattcttttactccaccttttattaataatggcaagtttaaaccccctaaatgggctggttggacgcaacaacagcgtcatgaaagagcgcgtgagttattaaaagaagccggttatgacagccaaaacccattatcgtttacattgctgtacaacacatccgatcagaataagcaacaagctattgctgccgcttctatgtggaaaaagaatattggtgctaatgtcactttacaaaatcaagagtggaaaacgacgttagaaaatcgtaaccaaggtaattaccaagtagcaagggcaacatggtgtgccgattacaatgaaccaacatcatttttaaactctttcctctccactagcagtctaaatactattttatatgaaaatagtgattatgatgctgcattaaagaatgcgttactggccactgataatgaagcgcgtcaccaactgtatcaacgtgctgaagccttgttagacaaggactccgctattgtaccagtctattatcgtgtgagtgtcagaatggtcagtcctaaagtgggcggatttaccggtaaagacccctttgattatacggacttaaagcgctattttataaaggcagataaataa

SEQ ID NO: 311672 - DNA, 555 bp, Proteus mirabilis; identical to SEQ ID NO: 307423

SEQ ID NO: 311673 - DNA, 612 bp, Proteus mirabilis
atgctacctgatctcgtctcagccatagtgactccctttatcgctattatattacttttttatgtaaattggcctcttgccttattatctctaaccccattacccattgcttttatggctcaacttctcatgttgcgtcgagccaataaacaaaccaatgagtggatgaatattcagaaaaaaattgctaatgaaataggagaatatattaaaggaatacgagaaataaaagcgtttaacttaacctcccatacttttggtaaattatctcaatctatcaattcctctgttaaatggataaaaaataatgtcaaagctagtacaggctcttggatggtatttagtgggatattaacagcgaatctcgttattatagcaccagtaggtgggtggatgtatttaaatcaaaatattgatttatctacttatattttatttttaatgacatcccccctcgtacttgcgccgttattacgactaacatttgtgctaggagaacaagctcaacgaaaacaaaccttaaacaacatgataaacattttactctccctaaaaatagcgatattacttttaaagatgtctgtttggatcatggtgataaaccgatattag

SEQ ID NO: 311674 - DNA, 579 bp, Proteus mirabilis
atgaatattctacttattaatggtggacaaaattttgggcattctgcaggacaattaaaccgtacattacatgatatcgctctggcacatttagcgacattagggcatcaggtaaaagaaacacaaattgaagaaggctatgatatcaacgaagagatagagaaatttatctgggctgatactattatttatcagatgccgggctggtggatgatgatgccatggaaagtgaaaaagtatatggatgaagtctatacttatggtcacggcaaactatatgaaaacgatggacgtactcgtcatgatccaagcaaacaatatggtagcgggggattgttgcaaggtaagcaatatatgatctccgtgacttggaatgcccctattgaagctttcaatgaatttggtaatttctttgatgggcgaggggttgatggtgtctattttgcttttcataaatcacaacaatttcttggtttatctcagttgcctacttttatgactaacaacgtcattaaagagcctaatattgagaaagatattgtagaatataaagcacatctaaccaaagtctttggctaa

SEQ ID NO: 311675 - DNA, 606 bp, Proteus mirabilis
atgacaaatagcctagttgtttcgttgagcgttttcctttttattgcagccattacgcccggacctaataatttactattaacctcttcgggggctcatgttggtttaaaacgctctttaacgttgatggcaggcattatcgtcggaatgcaatgtgtattacttagctctgcgtttggtattgcgacattattgattatttatcctgcattgcatatcggtttaaagattattggtagcatttatctttgttggttagcttggaaaacagcaaccgcttcttatcaacgattagatatttcaagtaaagtgtcccaaacagtgacggcgtttcaaggtggattattgcaatttttaaatccaaaagcttggatgatggggctaggcgccgtaggaagttttagtttagccggtgatggttatttgggatcgattggtgtgattagtgttgtgatgttgttggttaattttatcgctggtatggtatggattttaggtggaacatttatcagtcgttttttacaaagcagacgagcatggttcttatttaatattataatggggatattaaccgccatgtgtattccattgatttggattgaataa

SEQ ID NO: 311676 - DNA, 441 bp, Proteus mirabilis
ttggcaggggggataaacttatatgcctatgcgccgaatgcgttgacatgggtggatccgtgggggcattgtgcggtcaaactttctaaaaatatggtagctgatggtacgcctagacctgccaatactgcagctcatcatattgttggtgatacatctaaaggtgcccagccagccagagatattctgaaaaaacatggtattgatgttgatgatgctagaaatggtgttttcctgccaaatagaaataatgttgatgaagcattgtcaggaataaaacataatggcagacatccaagtgattatattgacgcagtaaatacaagaattattgatgctgataaattaaatggaaaacaaggtgttctggatgagttatcaaaaattcgtgacatcctgtcttctgcaaatcgagatgcaagctggtatacaatattatga

SEQ ID NO: 311677 - DNA, 168 bp, Proteus mirabilis
atgctatatatgaaagatggttgtccacctatcttaccgcttaactcactaaaaaatgctctattatccagtgaaaatgaatgccatgtctttgctccatccttccaagggattcttgcaaataaaaaagattcgattatgcgctttttatcatgtttccaaccttga

SEQ ID NO: 311678 - DNA, 258 bp, Proteus mirabilis
ttggcttgtccttatggcactatggaagtggtttctcgtccggttatgcgtaaattaaccgctctcaatacgattgaagcatttaaagctgaagccaataaatgtgatttatgtcatcaccgtgctgaaggtcctgcttgtgttgaggtctgcccaacgcaggcattagtctgtattgatagagatgcacttgaagatatggttaaagagcgtcgtcgtaaagcggcttttgaaacaggcgctgatttattgttctaa

SEQ ID NO: 311679 - DNA, 315 bp, Proteus mirabilis
  misc_feature (293)..(302): n is a, c, g, or t
atgaggttaatccccctatccacggcacagcaagtgggaaaatggtcggctaattatatcgttgagaaaatcaacgcatttgcgccaagcgccgatcgtccttttgttcttggtttacctactggtggtacgccattagcaacgtacaaagcgctaattgaattacatcgtgcaggtaaagtaagtttccagcatgttgtcaccttcaatatggacgaatatgttggcattccagcagatcacccacaaagttatcgtacttttatgtatgagaacttttttaatcatattgnnnnnnnnnncttttatgtatga

SEQ ID NO: 311680 - DNA, 537 bp, Proteus mirabilis
atgtttaaaaaatccataattactcacgcacctattcactggttatcagatgaagagcgtgaagaagtcgcagaaaataccttaagttggctgctggaattaggttcaatgacacgacgttttgagcaacattgccatcaagtgacggtaatgccatatcaagaaggttttattgaatatatcgagcctgctgatgaacaaaagtgtttaccttatagccgacgctattggttaagagaaatcgtcctttgtggggataatgtaccttggttattagggcgaacattagtgccggaagagacattaacgggtgaagatcgccaattagtgaatttgcgtacggtgccattaggacgttatctgttccaggaaacaaccttaagtcgtgattttattcatattgggcaacaaaatggacattggttacgtcgttcccgtttccagctttcagataaacctttattattaactgaggtgtttttgcctgcatcacctgtatataagcacctgcatcacctgtatataagcagtagttag

SEQ ID NO: 311681 - DNA, 276 bp, Proteus mirabilis
gtggtcaatgacgtaaaacaagcaggtattaccgataaagaattacaagaggcaaaaaatatttggttaactgaatatgggcaagccaaagagagtgctagctattggactgatgcacttgcccaagtggcaacagatgaccaacaatatcaacgactattaactgagactgcgattgtcaacggaataagtgtcagtgatgttaatcaagttgctcgtcagtggttgggtgaaaatgaaaaaatcttcaaactaacaccaccaacaaagcaataa

SEQ ID NO: 311682 - DNA, 975 bp, Proteus mirabilis
atgacccgacaatcacatcgccggcgtctggcgggggctttgttactcggttgttcactggtgccggtggcggaagccagtctgagtaccgccactctggtcgcttctgcggcctcaccgtcgtgtatcagctggcgtatcagcgggatttgctactggctgaagtgtggccggggcggctgccgtatccggacatctgtccgggtgtcacattttattccgcaggcggtggtctcggcctaccatgccccgggtgaaaacccgtggcgggaaatgtcactggtcagcggggcggccggcgggattgaaaatgccgtgaccggcgtgctgagcggggtatctgccgggggcggaaatagtgaacagaagtttgaggcaaaacgtaaaaccgccctgcactttttttatgcggatgctatcggtcatccggcaaccacccttatcggcggcagtattccggggtattcctgtgacagcgcagccacaccgctgtttccttattacctgagcacgctcgacagtgtgccgtggcggctcggtgtgccggaaatggcgtatccggaagcgataattcccgggaaacgggaaatcggggggcagagccggggcaacatgtggggaaatctctatccgcgcagcggttttgtcaaccagcaggacggggataaagcggcggctgtggtggcgcagcgcgtggcagatattatgacccgcaccgggcaggcgcatacctatgtgcccctgaaaggcaaccgccgggatggctattggccgccggacgcggtgacggagaataccgggacaaaaaaccataaatggcagcgcctgtcgccggggctgaaaaacagctgtgcggtgtttccggatgagggcggagcacaggcacaggacggtaattatgcctgggcattgtggcagccgtacagctgctgcaagcgcatggggcaaaaatttctgtacagcacaacgttttaa

SEQ ID NO: 311683 - DNA, 441 bp, Proteus mirabilis
atgaaaaaacgatttttatctctttccggattgctgatgctgtcgctgtcatacctgccgttgaccgccggggcggcagtggtgctgtataccacgcaggatgacgctctgccgcagacggacatcccgtttgaggtggtgtatctggatgcgcctgaacgcctgctggatgaggccctgcttcagccggggacggaactgagtgaagcggatgccccgcacatcaccgccctgttacaaagtccggcctggcaggccagagaaacggcattacggcaggcttatcagggcgtggttcaggcctggcagctgggggtgtcatctctgccggcggtcgtcgttgatgcgcagtgggtggtttacggcaccaccgatattgcacaggcggtgacgcagatacagcagtaccgggaacaacaggaaggaggaggtcaaccatga

SEQ ID NO: 311684 - DNA, 2226 bp, Proteus mirabilis; identical to SEQ ID NO: 190872

SEQ ID NO: 311685 - DNA, 2607 bp, Proteus mirabilis
atgtcggtcggggcggtgtatgccgttgagccggcgccgacggaagggcgctctgccggccgtctgctcgaaatccgggatgcggtggaggatgcgcttcaggacagtctggatgagcatgatgataacccgtgggtggtgcagtttttttgtcaggatgaggacgacgtgagcgtcacactggccacattgcgggactatatcctgccggcggcccggggcaccgcgtttaccgaagcctggctgaccgaaatggcgcgtcatttacgggggattgcccgtccggaagggctgtttaaggacacggaggtgaccggacaaccctggcgcggacagcagcgccggacccggatggtggtttaccgccggctggggaacagctataccgatccgatgccgccggtggcgatgctcaatcagatgtgtgaccggctggtcagcagtctgggcagtgccggcgtgcagtgtgtccgccaggacgggaggcaggtgcatcagtggctgctgcgtcatttcaatccggcccctgactgggtggaccgggagacgctgtaccgggaaggggcgtactggccggcggcggaggaagccccgggcaccctgccggtgctgaaggattttgcggaaacgctgtggtttaccccgccccggtcggatgtggaaaacggcgtgtggtggtttgataacctggcgcacggtgtggtgaatatcgaaaaactgcgtaaagccccggggccggggcacctgaccggggagcagaagcgcggtgacaaaaatatcaatgcgctgatggacctgtttccggaagggacgatgctgtcgatgaccatcgtcacacagcctcaggatacgctggagcaggaatttacccggctggggaaaaactcggtgggggaaaacaccgactcgcaacgtacccgccgggacgtggaaaccgccagaggtttactggggcaccgccataagctttaccgggcctccctgtcattgctgctgcgtgccggctcggtggaggaactgaacaaaaagcgcgtggatctgacggccacgctgctgaatgccggtctggagccggtgaagccggaatatgatgtggcgccgctgaacgggtatctgcgtgccctgccgatgtgttttgacccgcagacggataaaaaacactggtatacccggctgacctgggtacagcacctggccggattactgccggtgaccgggcgcaccagcggcaccgggcatcccggctggagtttctttaaccggggcggcggggtgctgacctttgatccgcagaataaacaggatcgtacccagaatgcgcatctgctgttattcggtcccaccggggccggtaaatccgccaccttatgcgcacagttatcgcagctgatggcggtccgccgtccgcgtctgtttattgcggaggccggtaactcctttggtttactggcggactattacgccagtctggggctgagtgtcaataaggtcagtgtcaagcccggcagcggggtgcgtctgccgctgtttgcggatgcgcatcagctgctgatgatggatgaacagcgtctggcactgaatgcggatgaactgccagagacggacagtgaatctgaggatgatgacgggcagcgtgacattctgggggaaatggaaatctccgcccgcatgatgatcaccggcggggatgtgcgggaagaagcggagctgaagcgggctgaccgggcgatgatccgccgggcgctgatggcgggggcccgggcgtcttatgccgccgaccggcagatgctgccggcggatttgcaggaggcgctgtatgccctctcccggggggaaggtgaagaggaagggcgggcattaaatccgcagcgccgggcgaaagcggccgaaatggcggaatccctggggatgtttaccgaaccgggcagttttgagcatgagctgtttaatctgccgggggagctgtggccggaggcggatgtgaccctgattgatttggggcacctggcgcgggaagggtatgaggcccagatggcgctgacgatggtgagtcttatcaactccatcaacaatattgccgagcgggatcagtaccgggcccgggacattaattttgtggtggatgaggcgcatatcgtgacggtcaacccgctgttatccccctatgtgaccaaagtggtgaaaatgtggcggaaactgggggcctggctgtggctggcgacccagaacctcgatgactatccggactgtgccgagaaaatgctcaatatggcggagtggtgggtgtgtctgacgatgccgcagaaagaggtggaggcaatcgcccgctttaagacgctcagtgaggagcagaaacaggtgctgctgtccgcagccaaactctccggctgttacacggaaggggtggtgctggcgcggaaagtggaggcgctgttccgggtggtacagccgagcttatatctggcgctggggatgacggaaaaagaggagaagcagcaacggcgggtgctgatggagcaatacggatgcagtgagctggaagcggcgttcagggtggcagatgaacttgaccggaaacgggggttaccgccccgggtgccgggatga

SEQ ID NO: 311686 - DNA, 159 bp, Proteus mirabilis
atggaatttgattattttgttaccccacaatggctttttgaacatcacgacgatcaagatctggtgatagttgatgttagcgcgcctatgcctacgcaagatattgactatcatcagcgctatcttgaacgtcatatccctggtgcccattttttttga

SEQ ID NO: 311687 - DNA, 405 bp, Proteus mirabilis
atgcaacacacaattaattcacaatatgatgaaatggttgattttctaaaggagttagtgaatatcgatagcggctcttatgataaacaaggggttgatacagtcgctgatcttttaattcaacgctaccaaaaattaggttttgttgttgaagtatttgaaaatgaacaactagggaataactaccgtttagttcataaagatgccacaaacccacaaatttttattgctgcacatttagataccgtatttcctaaaggcacagtagcagagcgcccatttagtatcgatggctcccgtgcttatggtcctggtgttattgatatgaaagccagccatgttttaacttactatgcgattaatgcactcaaacaaagtggcgatctctcttatcaaaatgtttaa

SEQ ID NO: 311688 - DNA, 1212 bp, Proteus mirabilis
atgaaacagacacgcccagtgaaattactaagaacacgtctatttagtgcaacctttatattattagctattagccatcatgctattgctgatgacacattaaaaacaatgatacccgctgttcctaatatcgaagccgaatcctatattcttatcgactataattctgggaaagtcctcgcggaaaaaaatgcagatgtccgtcgtgatccagccagtttaaccaaaatgatgaccagttatgttataggtcaagccattcgtgcaggaaaaatatcgaacaacgatattgttcctattggtgaagaagcatgggcaacgggcaaccctgtatttcgcggctcatcattaatgtttttgaaacccggtgataaagtcaccgtttcacaattaacacgcggtatcaatctacaatcaggtaatgatgcctgtgtagcaatggcctcttatgttgcgggaagccaagatacctttgtcactatgatgaatgactatgttaagcgtctaggtttacaaaacacacaatttcaaactgtacatggtttagatgcacctgggcaatacagtagtgcacgagatatggcattgattggcgccgcattaattcgtgatgttccagaagaatatgccatttataaagaaaaagagtttacctacaataatatccgtcaaactaaccgtaatggtttactttgggatactagcctcaatgttgatggtattaaaacaggtcatactgaagctgcgggttataatcttgttgcctctgcaacagaaggaaatatgcgcttgatttctgctgtgatggggggacactcatctaaaggccgtgatgctgaaagtaaaaaactacttacttggggttttcgcttctttgaaacggtaaaaccgctgcaagtgggtaaagaatttgccgctgaacctatctggtatggtgatactgataaagtgcaattaggggttgataaagatgtttatctcacgatcccccgtggccgactcaaagatctaaaggccagttatgtattagataatgttgaattacatgcgccagtcagtaaaaaccaagtggttggcaccattaatttccaacttgatgggcaagtcattgaacaacgtccacttgttgttatgaatgaagtgaaagaaggtggcattttcagccgcttgattgattacatcaaattattattttcacgttggtttggttaa

SEQ ID NO: 311689 - DNA, 267 bp, Proteus mirabilis
atgatgaaaacaaaattaaacgaactattagagttcccttgctcatttacttacaaagtcatgggacatgctaaacctgaattagttgaccaagtcgttgaagtgatccagcgtcatgcacccggtgattatacaccttcagtaaaaccaagtagcaaaggtaactatcactcagtctctgtgactatcaacgcaacgcatattgaacaagtagaaaccctctataaagagttaggtgaattagagcttgttcgcatggtgttataa

SEQ ID NO: 311690 - DNA, 645 bp, Proteus mirabilis
atgaagattttcacggtgcaagataaaacaatcattattcgccaattgggtatgaaaccctatttaccggtttctgattctatgcatcagtttacggaaaaacgggaaagtcatacacctgatgaaatttggctggttcaacatgaacaggtttttacccaaggtcaagcgggtaaagcagaacaccttttaaacacaggctctataccggtgatccaatctgaccgcggtggacaagtaacctaccacggccctggccaacaagtgatgtatgttttgcttgatctaaaacgtaaccatattggcgttcgccaattagtcactgttttagagaatactgtgatcaacacactcgcagaatttaatgtagacgcatatgctcgtgcagatgcaccgggcgtgtatgttaatggtgataaaatttgctctttgggattacgtatacgcaaaggttgctcttttcacggtctagcacttaatgttgatatggacttatctccttttacgcgaataaatccttgtggttatcctgatctaaaaatgacacaactggttgatttggcgccgaatgcaacatcggaacaagtggcatcattattaatcaaccatttttgtacacaactgggattccaaccacagcaataa

SEQ ID NO: 311691 - DNA, 966 bp, Proteus mirabilis; identical to SEQ ID NO: 294402

SEQ ID NO: 311692 - DNA, 375 bp, Proteus mirabilis
atgcttaacattgcaatagctgtatttatcggcggtggtttaggtagcgtactacgctggctaattagctaccgccttaattctctttttccccattttgcaacggggaccttggtcgctaactgtattggtgcctttattatcgcctttggcattgcttggtttagtaaagctcccaatattgaccctatttggaaaatcatgcttaccacaggtttttgtggtggcttaaccaccttttctactttttctgttgaggtggtcgccttatttaatgaaggacgaataggctgggcattaggcaccatgggggcaaacttagcgggctcgtttctgatgacggcattcgcattctggctactccgtgaaatgtag

SEQ ID NO: 311693 - DNA, 210 bp, Proteus mirabilis; identical to SEQ ID NO: 296203

SEQ ID NO: 311694 - DNA, 474 bp, Proteus mirabilis
atgtaccaagattatctcaatacgccgaaaggttttccaaagccttatatatccattaccgcagatgatgatggcatcaccagccttaactttgttagtgaaaaagaggcgttagttaattcaaatgccataattgacctgtgtataaaacagttaaaagagtatttttcgggtaaacgaaccctattttcagtgccactagcgccaaaaggaaccgaatttcaaatacgcgtttggcagactttacagtctattccttatggtgaaatttggagttataaaaagttggcacttacattaggttccgtcaactattgcagagcggtaggaatggcaaattcacgtaacccaatctcgttaattattccttgccatcgcgtcattggtcataatggtaagttagtaggctatactgggggacttgatatcaaacgttggctattacactatgaaaaagtggatattgacgaatag

SEQ ID NO: 311695 - DNA, 225 bp, Proteus mirabilis; identical to SEQ ID NO: 302451

SEQ ID NO: 311696 - DNA, 183 bp, Proteus mirabilis
gtgaccgttatacctatatccctaccattacagcctcgtcgttgggaggataagaaagatgctctgtggactgtgtaccaacgtttgcaggagaatttaatcaaaggaggattatcaggtagaaatgcaaaaggtaagcaagcgcggacgcgctcagtgaaaatggtattaatggcggaatga

SEQ ID NO: 311697 - DNA, 177 bp, Proteus mirabilis; identical to SEQ ID NO: 302541

SEQ ID NO: 311698 - DNA, 525 bp, Proteus mirabilis
  misc_feature (443)..(452): n is a, c, g, or t
atgaagatccgctctttctttatttatactatctttctacaaacgatatctatcgtgatgctatggggcgtttggttagcttggatagaatttgattatcttgctgactttgaaactatctacaataagcaacaagaaattattgctgaaggatttgctaatacactcgaaacggtttcctctcaacccgagacagtaaaacagatagctcaccatttacaaaacatgtatatcgataccatgcttaatggtgaagatgatgatttacactatttaccttggtttattgtcttaaataaagataatgatctgatttataccaatagaccggaactttctctgcctaaacgggtactgtcgcttgcctctgaaaaaatctctgtggctggggagaaatggtatttatcttatagttggggaaaacaacataaaattaaagtttnnnnnnnnnntccgtcgaagatagaggacatgtcattggtaaccctatttccggtacttttgtgcccttcctatttattttag

SEQ ID NO: 311699 - DNA, 204 bp, Proteus mirabilis
atggatattgaattacctgactttttgatttatccactatgggatcttagccatattctggatgattcaagcatttttggtaatttcttagtttcattctttgcttatcgctcacaacccatcggtttaagtgttgttacttttattgtgttttggttggtggtcgcactgttatttaaacaaggggatcgtcatgccaaatag

SEQ ID NO: 311700 - DNA, 3897 bp, Proteus mirabilis
gtggcactatcatctgcgatgctctacaaagagatagagcaactctcgttgcgggatcagcaacgattgagaaaacgcttacgtggcgttgataaaataagtaaagaaacgtcgaaacaggcggtattaagcgagattgagcaggatattattgtcgcaaaacagcgtatattaaatcgacaaattcactgtcctaaaattgtttatccagaaaacttgcctgttagccagaaaaaagaggctatctacaatgcaatcaaagataaccaagtggttattattgcaggggaaacggggtcgggtaaaacaactcagatcccgaaaatttgtctcgaattagggagaggcgtaaaaggttatattgggcatacgcagcctcgacgtttagctgcacgctctgtcgcagagcgaattgcccatgaattaaatacaacattaggtgagtctgtcggttataaagttcgttttagtgatcatgttggtgataacacgctagttaagttaatgactgacgggattttattagctgaactacaacaagataagttgttattacaatatgatactattattatcgatgaagcccatgaacgtagcttaaatattgactttattcttggttatttaaagcagcttttacccaaacgcccagatttaaaagtgattattacttctgccactatcgatcccgagcgtttttctaagcattttaatcaagctcctattattgaggtatctggccgaacttatccggttgaagtgcgctatcgtcctattggtggtgacgctttggatagtgataaggatatgactgagggcattattgatgcgattgacgagttaagtcgagaaagtgcgggtgatattcttatttttatgagcggtgagcgtgagataagggataccgcagaggcattaaataaattacaactgcgtcataccgaagttttacccctatttgctcgtctttctaatagtgagcaaaaccggatatttcagcctcataccggaagacgcatcatattagcaaccaatgttgccgaaacttctcttacggtaccgggcattaaatatgtgattgatacgggttatgcacgtattagtcgatatagttatcgaaccaaagttcagcgcttacccatagagcctatctctcaagcttctgcggatcagagaaaagggcgttgcggtcgtgtttctgatggtatttgtattcgtctttattctgaagatgattttatttcccgtgcgcaatttaccgatcctgaaatactaagaaccaatcttgcttcggttattttacaaatgacctcgataggattaggggatattagcggatttccttttgtacaagcgcccgataaacgcaatatacaagatggtgtacgcttattagaagagctgggtgccttacaagagggtactgataataaaggtgcttatcgtttgacgccgatggggaaacaattagctcagcttcctatcgatccaagattagcgagaatggttcttgaagcacgcaaatatggtgcagttagagaattaatggtgatcacatcggtgctttctattcaagatcctcgtgaaagaccgatggataagcaacaagcatcagatgaaaaacatcgtcgtttccaagataaagattcagattttctttcattactcaatttatgggactatttaaaaactcagcagaaagagttgagtcactctcagtttcggaaacactgtcgccaagagtttttaaactttatgcgagttagggaatggcaagatgtctatacgcaactacgtcaagttgttaaagagctaggctttccaattaatagtcaaccggccgattttaaaagtattcatgtggctttattaagtgggctattatcacatatcggacaaaaagatagcgataagcaggaatttactggcgcgagaaatgcacgttttgctatttatcctggctctgggttatttaaaaaaccgcccaaatggactatggtggcagaattagtagaaacatcacggttatgggggcgtattgctgcacgtattgaagcggaatggattgaacctatcgccacacacctagttaaacaccactatagtgagcctcattggtcaaaagcgcagggtgcggtaatggctaatgaaaaagtcaccttatatggtttacctattgtggcctcgcgattagtaaattatggcaaaatcgatccactattatgtcgagagctatttattcgccatgcgttggtagagggcgattggcaaactcggcatgcttttttccgtgaaaatttaaaattacgtactgaggttgaagagttagagcataaatcacgtcgtcgcgatattttggtagatgatgaaacgctgtttacattctacgatcaacgaataccacaagatgttatctctacccgccattttgataaatggtggaaaatagcgcaaaagaattcacctgatttgctgagctttgaaaaaagcatgcttatcaaagaagatgctaaacgtgttagtgcattagattatccaaattattggcatcaagataatttaaaattacgcttaacttatcagtttgagccaggtacagcagcagatggcgtcactgtccatattccattaccgattttaaatcaggttaaagatgaaggttttgattggcaaattccgggtattcgtcatgaattagttgttgccttaataaaatcattacctaaacctatacgtcgtaattttgttcctgcgcctaactacgcttcagcttttttagaacgagtggttacccctgaaggtgaattactcgataaattagaaaaagagctacgtagaatgactggcgttacggtcgaacgtgacagttggcaacttgagcaagtggccgatcacttaaaaatgacttttcgagttgttggtgacaacaatagaacccttgctgaaggaaaagatcttaatcagttaaaagcacgtttaaaggacaaagttcaagaaacattatcagcggtagcagatgatggtattgagcagcaagatttacatatttggagttttggtgacttgccacaacgctacgaacaaaagcgtggtagctattcagttaaagcctatccggcattagtggatgaaaagaatagtgttggtatcaagctatttgaaacagaaacagagcaacaagcggcaatgtggcaggggataagacggttattattgcttaatattccttcccccattaaatacttgcatgaaaaattgcctaataaagcaaaattaggtctttattttaatccttatggcaaggtgctagatctgattgatgactgtatcgcttgtggggttgataaactcattgcttcttatgggggattaatatggcaagaagagcaataccaaaaactccaagattatgtccgtgctgaattaaacgatgttgttgtcgaaattgctaaacaagttgaatctattttaactcaggtatttgcaataaataaacgcttaaaagggcgggtcgatattagtgttgcttttgcattgtctgatattaaagcacaacttaatcaattagtttttcccggatttgtcacatcccatggctggaaacgacttgcggatattcctcgctatctcagtgccattgaaaaacgtatggagaaattagcgattgatcctaaccgtgatagagcacaaatgagccgagttgaaaatgtcattttgcagtggcaacagtggttagctaagttaaccgagaagcaaaaacagcaagaagaggtacaaaatattcgttggatgatagaggaattaagagtgagtttatttgctcaacagataggaacgccttatcccatctctgataaacgcatcttacaagctattgagtctatctcattaagttaa

SEQ ID NO: 311701 - DNA, 150 bp, Proteus mirabilis
atggaaacatttcaattagatggtcacccctatgtagaactgtgtgatctattaaaactccaaggctgggtagaaacacgtaaacgctgtaaaattactgccggtaaagtcgtcacattcggtgagtttgctgtcactgtcagcaactag

SEQ ID NO: 311702 - DNA, 2127 bp, Proteus mirabilis
atgacccactctatagaacaactcgattatcacgccttaaatgccatgctcaatctctatgatgagcaaggcaatatccagtttgataaagacaaattagccacccaccatttttttcgtcaacacgttaatcaaaatacggtgttttttcatgatctaaaagaaaagctcgattttctggtgcaacaacactactacgaagcacaagtattagagcagtatgatttcccgtttatcaaacagctttttaagcatgcctatagcaaaaaatttcgctttcaatcgttcctaggtgcatttaaatactacaccagttacaccttaaaaacctttgatggtgagcgttatctcgaacgctatgaagatcgtgtttgtatggttgccttaaccctagcacaggggaataccaaactcgccactcaccttgtcgatgagataattagtggccgtttccagcctgcaacccctactttcttaaattgtggaaaaaaacagcgtggcgaattggtctcttgttttttattacgtatcgaagacaacatggagtccattggccgagcagtcaattctgcgttgcaattgtcgaaacgtggcggaggtgttgctttcttactgactaatttacgagaagcaggagcccccataaaacgcattgaaaaccaatcgtctggcgtagtaccggtaatgaaaatgcttgaagatgccttctcatatgccaatcaattaggcgcaagacaaggtgctggagcggtttatctccatgctcatcatcctgatatctatcattttctagatacaaaacgagaaaatgctgatgaaaaaatacgtattaagacgctttcattaggtgtcgttattcccgacattacctttgaattagctaaacgcaacgaagatatgtatctattttcaccttatgatgtagaacgagtatatggcgttcctatgtcagaaatcagtattagcgaaaaatatactgaaatggtcaacaatgcagagatacgtaagaaaaaaattaaagcacgggcattttttcaaactttagctgaaattcaatttgaatcaggttatccctatattatgtttgaagataccgtcaatcgcgcaaatccgattgcgggccgaattaatatgagcaatttatgctcagaaatcttacaagtaaatagtgccagtgaatacaatcctgatttaagttatcgacaaattggtcatgatattagctgtaatctcggatcaatgaatatcgccatggcgatggactcaccagattttgcgcataccgtaaatgttgccatcagagcactgacgagtgtggcacaaatgactaaaatagaatcagtaccttctattgaaaaaggcaaccaagcatctcatgccattggcttagggcaaatgaacttacatggttatttagcccgtgaagggatttattatggttcagaagaaggacttgattttaccaatatctatttctataccgtaacatactatgcccttttagcctctaaccaattagcgatagagactaaacagcgctttaaagggtttgaacagtcaaaatatgccactggggagtattttgataaatatttatcaaaacagtggttacctaaaacccaaaaagtccaccagctatttagccaatccaatattcatattccaacccaagaagattggcaaaaacttaagctctcgattatgactcacggtatttataatcaaaacttacaagcaataccaccaacaggatcaatctcttatatcaatcactctacatcgagtattcaccccattgtggcaccgattgaaataagaaaagaaggtaaaatcggtcgggtttattaccccgccccttttatgaccaatgaaaaccgtcatttttatcaagatgcttatgaaattggcgcagaaaaaattatcgatacctatgcccaagcatcacaacatatcgaccaaggattgtcgctaacattattcttttctgatgaagcaaccacaagggatgttaataaagcacaaatttatgcatggcgtaaaggtataaagaccttgtattacattcgtattagacaaacagcattagccggcacagaaataaaaggctgtgtttcatgcgccctttaa

SEQ ID NO: 311703 - DNA, 1461 bp, Proteus mirabilis
atgacaacattttatactgtattaagttggctaacttttttcttctattggctattgatcgcaggggtcacattccgtgtcctaatgcatcgacgacctgtcacctcaacgatgacatggctactgattatttatatcctccctttagtcggtgttatcgcctattttgcctttggtgaacttcatcttggtaaacgccgtgtcgaacatgctaggcagatgtggccttccgtagttgcctggcttgaagaattaaaaaaatgtaaacatattttcgctaaacactatagtgatgttgcggagcccatttttcagttaaccgctaaacgccaaggtattaatggtgtaaaaggtaataagatccagctactaacaacttgcgaagactcattaaatgccatcacgcgtgatattaataatgcgcgcgataatattgaaatggtgttttatatctggcaatccggaggattggtagaggaagtcactgaagcccttattcaagcggctaaacgtggtgtaaaatgtcgcattatggtggattctgcaggaagccgtagtttctttcgcaccaatggccctgcaagaatgcgagccgccggcattgaatttgtcgagtcattacaagtcaatctgttccgtttcttcttgcgtcgtatggacttacgtcagcatcgtaaaatagtattaattgataactacatttcctataccggcagtatgaatatggtcgatccacgctattttaaacaagatgcgggtgtcggtcagtggattgatattatggtcagaatggaaggccctgtttctacgacattgggtattatttatgctttcgactgggaaatggaaaccggtgaacgccacttaccaccgccgccagataacaatattatgccatttgaacaagcaaatgggcatactacacaggtgattgcctcaggccccggctttcctgaagaactcattcaacaatcattaattacggccatctattcagccagaaaagaattagtcatgacaaccccctacttcgtgccaagtgacgatctggctcatgccatttcaaccgccgctatgcgtggtgttgatgtcagtattattgtgccacgaagtaatgactctttcctggtacgttgggcaagtcgagccttttttactgaaatacttgaggcgggtgtaaaagtttttcaatttgaagatggcctattacatacaaaaagtgtgatggttgatggtcaactgagtatggttggctcggttaaccttgatatgcgtagtttatggcttaattttgaaataactgttgtgattgatgatgaatgttttgctagtgatcttagcatcgtacaatatgattatattgcccgttcaacacaacttactcttgatgaatgggaaaaacgtccatttatgaatcgggtgttagaacgcctttgttatttctttagcccacttctctag

SEQ ID NO: 311704 - DNA, 291 bp, Proteus mirabilis
gtggcccgagtttctgaaggcggtagtttattaattggtggatatacacgagaagataacataaaagcagaaaacaaaattccttttttaagtgctatacctttagttggccgagcatttagctatcagtcagataataataaaaaaatggtgcgtatttttatgttacaaccgcgtttattagataaaactgatacgcacggattggactctttaactgaacacccatttttaccgatggataaaaaaacatctcaagcgctaaaacaaattcaggcatttatgaggtga

SEQ ID NO: 311705 - DNA, 450 bp, Proteus mirabilis
ttgtcagagactttaataccacttgttttttatctttccaaggaaaaattaaattcagttaatgatgaattaagtaatgatattgagtggggaataaaagagtttgattttagtttaaaatataaaatttttgttgatggtttttcccatcatgaagatataagctcattattaaatgaactttgcaattatcatatgtcgataaattatcctaaaattaactcaactgaaaactctaatcatgtaatttacaaattaataccttgtgaagtaatagtattacttagaatgagagagttaaataaattacctattaataatattgatcatcaactaataaatagatttaagatgtttttaaataaagatatacctttaagtaattttaatcgttcattaagaaaatctattttacataaagcatcacataaaattagtcagaatcactga

SEQ ID NO: 311706 - DNA, 189 bp, Proteus mirabilis; identical to SEQ ID NO: 301309

SEQ ID NO: 311707 - DNA, 198 bp, Proteus mirabilis; identical to SEQ ID NO: 298965

SEQ ID NO: 311708 - DNA, 444 bp, Proteus mirabilis
atgaaattaaattcattacagcttcaacaacacaaatataaattatcaagtgattcatttaaaaatgaaaataacaattctattaacgaggttattatgtatcagaatcaagttgaaaacgaacaacgtgcttttcatattccagttgctcaacgtgtcgatggattaaaccataccgctaaattacgttctcgtcactttggtttacaaaatgaagaattaaaacgtttcttttttgatatgagagatccatttgataattgttataaagaaaataaaaaattcttaggtgtcattttatatatggcgggtattccaaaagaaagacatgatttaaaatttgaagattttcaaacatcggaaatatttgacattattaaagccattaatcatatcaaagcagttacggcattattacctaaacaattagcattaccgcaataa

SEQ ID NO: 311709 - DNA, 249 bp, Proteus mirabilis
atggcgggtggggtatcaaaaggagaggcactacaaaaagtcgctaagttgatgcaacattcagtaaaagacgccattgcatttggtgatggtatgaatgataaagagatgctacagatggcaggtaagggctgcattatgaaaaatgcccaccagctactaaaagatctattaccggatatggaagtgattggctcgaatgttgatgatgctgttgcacactatttgcgtaagttgtatcaggtttaa

SEQ ID NO: 311710 - DNA, 168 bp, Proteus mirabilis; identical to SEQ ID NO: 298470

SEQ ID NO: 311711 - DNA, 252 bp, Proteus mirabilis
atgattagcccattcattttgggggtggtaatggggaaattaacagtcttacttctgatgttacttggttttctacaatattcattgtggttaggtaaaaatggtattcatgattacaacaaagtaagtcaagaagttgaatctgcattagcgcaaaacgcacaattaaagtcgcgtaatgatcgcttatttgcggagattgatgacctcaatggcgggcaatcaggatttggatctaatgtttcatcgtaa

SEQ ID NO: 311712 - DNA, 831 bp, Proteus mirabilis
gtgacgctaccttcaatatctttaccaacaagaattgaccaagcccgactgaaatggacgtcgttacagcaacaacatctctattttgcccctgtacgccaccatagcccagcttgtgcttatgcagttttatcattaattgattctgtaaaacctgattatatcttaattgaaggtccggatacctttaattcgcttattcctagcctaacggataaagatactctccctcctattgctattatggggcaagccgaatattgtcatcatgatagtggcctagaagagcgtgaaaaatcgctacactctgcctatttcccattttgtgaatattcccctgagtggcaagctttgcgaggtggtttacgcatcaatgcaacaacacgttttatcgatttaccttgggcggctcaagtcaataacgaagagtatagcgatctacaaagccgtagcttacaaaaagaacgttatttagcccatagccaatttattgcacaattagctaaacaatgtcattgccgtgatcatgatgatgtttgggagcatctttttgagttacgcagtattgaggcattagcagattggcaaactctgtttaatgacatttttatttggtgtgcacttgcacgccttgactatgaacctgaagtacttgcatctgaaggctcttcacaacgtgaagcacatatgctcactcatataaaaaccatcaaacagcacgagcctaatgccaaaatattaatcgtcacagggggagcccacacccttgcactaatcgaaggcttagcttcttcacaaccccactctttcgctatttctagctcagaataa

SEQ ID NO: 311713 - DNA, 375 bp, Proteus mirabilis
atgtcttataccactttttcacaagttagaaatgatcagcttcaggagcccatgttttttgggcaacctgttaacgtagcgcgttatgatcagcaaaagtaccctatttttgaaaaactaattgaaaagcaactctctttcttctggcgtccagaagaagttgatgtttctcgtgatcgtattgactacaatgcgcttcccgatcacgaaaaacacatttttattagtaatttaaaatatcaaactctgcttgattcgatccaaggtagaagccctaacgtggcatttttacctttaatttcgattccagaattagaaacttgggtagaaacatggtcgttctctgaaaccatccattcacgatattattcgtaa

SEQ ID NO: 311714 - DNA, 873 bp, Proteus mirabilis
atgatcaaaatatttattgcaatttcattcctcttttactcagtatttgttatggcttctcctaaaattattgcacacagaggtggcacagcggatgcacctgaaaataccgaaattgctatcaaaacagcactaagcaatcaagctgatgcaatttggataaccgttcaactgtctaaagataatgtccctgttctttatcgtccaagtgatctaaaaagcctcactaatgggcaaggggcaatttcaacctttactgccaaagaattggcgcaatgggatgcaggatataaatatggggaagcacaacaatttccatatcgcaataaaggagttactatcccgacattggagtatattctgactcaatttcctaaaacacaattctatattgacttaaaatcacctgatgccgatcccgttatacaaggcaaagcattagcttcggtattaagcaaacataatgcgttagagagaacgcgtgtttattctaccaatagtgcttttttagatgcgttacctgataacgtacaacgctttgaaagtcgtgatgttacccgcgatatcttagccaatattactatgggacatatctgtttactgccagaaaatcttgatatcacacgttggtatggccttgaactgcacagaaaagttgaggtggttgaaaaatataccttaggtgaagctcgttcagcggctgtattaagttgggacaaagatgcgatgtcttgttttcgtgcggggggtaatgcgcatatcgttttattcggtatcaatactgagaaagattatttgcaagcagtagaattaggtgctgatgcagttatggttgattctccagctaaaataaaagcattcagaaaagagtaa

SEQ ID NO: 311715 - DNA, 2169 bp, Proteus mirabilis
atggcgactcaacaaaggatacaaacctcatctgagaaatcaccggtattccagttttcagtacgtcccgataaggtcggaattatcaccattaatgttgtagatgaaaaggtcaatacactgaaagctgcttttgttgaacagtttcaaaatgtattaaaacaggctcagcaacattcaggtgtaaaaggattaattatcacctcaggtaaacctgataattttattgctggtgctgatatatcaatgattgcagattgcaaaaccaaagaagaggccaccgcattagcgaaagcaggacaagatctttttactcaattagaaaattatcctttgcctgtcgtcgcagccatcaatggcgcctgtttaggtgggggattagaattagcattagcctgccatgggcgaatttgctccgataacagtaaaacacgtttaggccttcctgaagttcaattaggattactaccaggttcggggggaacccaacgattaccacgtttaataggggttacgaccgccttagatatgattttaactggacgacaaattaatgccaaacgggctttcaagcttggcttagtcgatgacgttgtgccacaagctattttattagatgttgcagcccaatggattttaacagctaaaaaagctgctaaaaaacagactattatggagcgtttttgggcaaataccacattaggaagaaatatcctctttgatcaagctaaaaagcgcactttagctaaaaccaaaggtcattacccagcggcagagcgtattcttcatgttattgaacgaggcttagagaaagatattcaaacaggttttaaagaagaagctaatgcgtttggtgaattagccatgaccccggtttcatctgcattaaggcatctcttttttgcctcaacagcattgaaaaatgaaacaggatcatctgcaaagccagataacttacaccatataggtattttaggtggagggttaatggggggcggtattgcttttgtgacagcaacaaaaggtaatttacccgttagaattaaagatattagtgataaaggtattgcgcaggcacttaactatagttggaaagcgttatcaactaaggtcaagaaaaaacggctctctgctcgtgaacgccaaagacaaatggggttattatcagggacattggattatagcggtttccatcaaactgaccttattgtcgaagctgtttttgaagatttggctttaaagcaaaaaatggtggctgatattgaagccttaggtgaaggcaagatcatctttgcttcaaatacttcttctcttcctatccataaaattgctgaaaaagcacaatatccagaaaaaataattgggctgcactattttagtcccgttgaaaaaatgcccttagttgaagtgatccctcatgaaaaaacggatgctaagacaatcgccacaaccgttgcttttgctaaaaaacaaggcaaagttgccattgtggtaggagataaacccggtttttatgtcaatcgaattctcgccccttatattagtgaagccttaacctgtttggttgaaggggaaacgatagagaatattgacaaagcattagttcaatttggctttccagtcggccccattcaacttttagatgaagtgggaattgatattggtactaaaataacgcctattttagtcaatgagtttggtgagcgttttgcatctcctcccgcggtggatgcgattattgcggatgacagaaaagggcgtaaaaacggtcgtggtttttatctctataatcagcatgccttacctttctctttaggaaaaaataaaaagcgtgcagacccgatgatttatcgcttattacaggttaaacctaaaaatcagttatcggcttcagaaataaccgaacgttgtttattgcttatgcttaatgaagctgttcgttgtttagatgaaaacattattcaacaacctagggatggtgatattggtgctgttttcggtattggttttcctcccttctttggtggaccattccggtatatagatagtatgggaacaacaaaaatagtcgataagcttaatcaattaactgaaaaatacggtgaaaagttccaaccatgtgagcgattagcagcaatggccaagttaaatgaacgattctatagctag

SEQ ID NO: 311716 - DNA, 399 bp, Proteus mirabilis
atgagacaccctcaatggactactcgcctacctgaaaccttgaaaaatgccattaatcgccctttcgtatggggtgaacatgattgttgtttgtttgcttctgactgtgtcatagccgtttgtaatttcgatccctgcgaacgtattcgtgggcgttataaaacaaaaactggcgcattcagagtgttacaaaaagagtttggaacattggacggagccgtgagccgtttttttgatgaaattccaacaaatgaagctggtcgtggtgacattgtgatgttcgagggtgacgaaggggaaacgttaggggtgttatgggcgggtaaattatgggctgtctcaacagatggcgttcgtgcggtgagcaataaaccaaaaaaagcatggagagtacaataa

SEQ ID NO: 311717 - DNA, 333 bp, Proteus mirabilis
atgaaagcacaacctgaaagcctaacagtcacactctatattcatgctcaaaaacagttcgatggttcttaccaatataatgcctacgcatttaaagccgatcccaatgctggactaggttttgttgttgctgaacacactgttgatgttccttttaaagagcctacccaaactgatctcattcacgctgaaattgattttctacgtaatgaacaagaaaaaatcctagctgatgcccaagtgaaaacaagcttgttagaagatcaaatccaaatgcttctctgcttggaaggcaaacccatttcgaaaactgacgaagaaatcccttattaa

SEQ ID NO: 311718 - DNA, 234 bp, Proteus mirabilis
atgctaggtgtttatttaggctcttttattgttgatataaaaatgcttggtttagatgcgatgtttccagcgattattttggcactaagtttaccggcattgaaaaataaattaacacgaaaagccgctattattggtagtgtgattgccttagcaacgacactgtttctccctgcgggaataccggttttattatccttgttaggcgttttatttgtggtgagaaaaatatga

SEQ ID NO: 311719 - DNA, 249 bp, Proteus mirabilis
ttgcctagtcatggtgatgatgtaaaccgtttactgcatattcatgaaaaccgtccgggtattatgaatagtatcaataacgtatttacagaagaaaatattaacgttgctgcgcaatatctgcgtacagctggtaatgtgggttatgtagtgattgacgttactacacaaacgaaagcacaagctgagttagtattgcagaaactaaaaggactaccgggtaccattcgtgctcgtatgttgtactaa

SEQ ID NO: 311720 - DNA, 195 bp, Proteus mirabilis
atggatgttgatgctaataagaaacaacataaggtgatcacaaggtttcttaagcggcccacaagtctatcatctaagtcagttaatgcggctgcgacaacacctaatgtaagaggtatagtatattttggttcttgtcctaaagcccatggaaataaagtcgttcccgtaagtgcgattattatgcgaatataa

SEQ ID NO: 311721 - DNA, 756 bp, Proteus mirabilis; identical to SEQ ID NO: 302254

SEQ ID NO: 311722 - DNA, 612 bp, Proteus mirabilis
atgatgactaatattacactcgataatataaaacttgcagtacaacgtatcgcaattgcctgtgaacagtctcaaaatagactatgtgaagcagatagccaacttggtgacggtgatttaggggtaaccatgcaaaaaggatggcgacaaattgctaacgatgcccaagattggcctgacgatttaagcaaagcgctttttcaatgcagcaaatcattacaaaaagcctgtgcgtcttcttttggtactttgcaagcaacggcttttatggcaatggccaaatattgcaaagaaaaccacctgcaagaaatagcgcttgccgatatttccccactattgacggtcgcataccaaagcatgatggcgagaggaaaaggggaattaggtcaaaagtcagtattagatattctttatcatttatctgaagatctagcgtcgatctcatctctgactgaactaaaacccaccgctttaaaaagtattaataatacgctaaatgaatttcgccctaagcctaatttattgggacgtgcccgtatgttcccagaaaaatcgataggattagacgatcccggaatgttagcgattaacgttattgttgaagcaatttga

SEQ ID NO: 311723 - DNA, 1899 bp, Proteus mirabilis
atgttttatccagaacattttgacgtcattgtcatcggtggtggtcacgccggtacagaagccgctatggctgcagctcgtatggggcgtcaaaccctattactgacccacaatattgatactttgggccaaatgtcttgtaacccagctattggtgggattggtaaagggcatctggtaaaagagatcgatgccatgggtggattaatggccacagccattgaccatgctggtattcaatttagaacccttaatgcaagtaaagggccagcagtaagagcaacaagagcacaagccgatcgcgtactgtatcgccaagctattcgtacaacacttgaaaatcagcctaatttaatgatcttccaacaaccagttgaagatctcattgttgaaaatgaccaagtaacgggtgcagtcactcgtatgggattaaaattccgtgctaaagcggtagttttaaccgtaggaactttccttgatggaaaaatccacattggtttagaaaattacagtggtggccgagcaggtgatccaccatcagtctctttatcacatcgattaagagaattacctttacgtgtaggtcgcttaaaaacaggtacaccacctcgtattgatgcaagaactatcgattttagtcaattagcgccacagttaggtgataatccaatgcctgttttctcatttttaggtaatgtggatcaacatcctgaacagatgccttgccatattactcatactaatgagcaaacacatgaaataattcgtaataaccttgatcgcagtcctatgtatgcaggggttattgaaggtatcggccctcgttattgtccatcaattgaagataaagtgatgcgatttgctgatcgcaattcacaccaaatctttttagagcctgaaggcttaacaagcaatgaaatttaccctaatggtatttcaacaagcttaccttttgatgttcaaatgcaaatagtaaattccatgaaaggtatggaaaatgccaagatcatccgacctggttatgcgatagagtatgacttttttgatccccgtgatcttaaacaaacactcgaaagtaagtttatcaacggattattctttgctggccaaattaatggcactaccggttatgaagaagcagcagcgcaaggtctattagcaggtcttaatgcggcacgttatgcttttgatcaagaaggttggttccctcgtcgtgatcaagcctacattggtgtattagttgatgatctttgtaccttaggtacgaaagagccataccgaatgtttacttcacgtgctgaatatcgcttgatgttacgtgaagacaatgctgatttacgtttaactgaaattggtcgtgaacttggtatggttgatgacaaccgttgggcgcaatttagtgaaaaagtcgaattagttgaaaaagagcgtcaacgtttaagagatatttgggttcatccaaaagcggataacctagaagaaatcaatcaattacttaaaacgccactgtctaaagaggcgaatggggaagatttattacgtcgtcctgaaatgacctatgagattttgaaaaagatccctcgttttgctcctggtattgatgattcgagaccacaagcggcagagcaagttgagatccaagtaaaatacgaaggttatatcaatcgtcaacaagaagagattgaaaaacaactgcgtaatgaaagtgctgcattgcctattgatatcgactacaaacaggtgagtggattatcaaatgaagtcattgccaaactaaacgatcacaagccaacttcaataggtcaggcatcgcggatctccggtgtgacacctgcagctatctcaattttacttgtttggttaaaaaaacaaggtttattacgccggagtgcatcatga

SEQ ID NO: 311724 - DNA, 678 bp, Proteus mirabilis
atgagtagtcttattgctggtgtttatgatagtgatgttactattgctgatttattaaagcatggtgattttggtttaggtacttttaatcatcttgatggcgaattggtcgcctttgatagtaacgtttttcaattacgttcagatggcagtgcgcgagaagcccgtccagatcaaggctcgccttttgctgtaatgacattctttaaacctgatattacacatcagttttcggctcctgtctcccaacaacaggttcacaatattattaaccaatatgttccttccgataatctattttgtgccatcaaaattgaaggcgaatttgaattagttaaaacacgtacagtgccacgtcaagagcctccttatgtgcccatgctagaagccattgaaaatcagcctatttttacctttcacgatgaaatgggtattattgccggctttcgttccccgcaatttattcaaggccttaatgttgctggatttcatgagcattatattaatcaccaacgtgaaggtggtggccatgtacttgattatcaattaaaaaaaggcaccctacaaatcggtgttatctctcgttttactattgacttacctcatcaatcaacattcttagaagctaatttaatgcccgatgaccttcatcaggcaatagaacaagccgaaaactga

SEQ ID NO: 311725 - DNA, 198 bp, Proteus mirabilis
  misc_feature (183)..(192): n is a, c, g, or t
atgtttaatttcaaaaagatactcgcactttctatcttgcttcctatgtcaataatggtgaaagctgaagaaattggttatgtcgatacggtttttaagttttttggtgccaatcataaaattgtcattgaagcttttgatgatcctgaagtcaaaaatgtcacttgctatttaagccgtgcnnnnnnnnnntgctaa

SEQ ID NO: 311726 - DNA, 399 bp, Proteus mirabilis
atgaaacaacctagctggacactccagttaccagaaatcataagggcggcgatgagtcgccctttttcatggagtgaatttgattgttgtatttttgcctctgaatgtatttacgcacaatgcggtttctcgccaataaagccttatctcaatcactataaaaccaaagctgaagccttcaatctgatcaaatctaaatttggctccttagagaaagccgtttcacgctatttcaagcccattgagattgagcgcgttcagcgtggcgaccttgtactgttcaaaggtgaggacggtgacagtttagccgtggtctgggcgggacattattggggcgtcaccccacaaggcgtgaagccggtgcagattaacccaatcaaagcgtggagagtggaataa

SEQ ID NO: 311727 - DNA, 732 bp, Proteus mirabilis
  misc_feature (718)..(727): n is a, c, g, or t
atggatatatttattagcgcattagcttatattgattacacgacaatacttgttgtcgtcggcgcttgcttatttggtttatttgttggagcaattccggggttaacatcaaccatggcaattgctttaatggtgccttttactttctttcttgatccaattcctgcattagcactgatgatctccgtaggtgcatcctcgatatttgccggcgatattccaggggcattattaaatattcccggaacacccgcctctgcagcttatactaacgatgcccatacattggttaaagaaggtaaaactaatcgtgtattagggatgtcattaacaagctccgttattggtggggtgatcggcacaattattttagcgtcaaccgctccgttgttagccgagtttgcacttaaatttagctcttacgaatatatgtggcttactttaattggattaagctgcgccactattgtttctggcgctcaaattagaaaaagtttgctagcactgtttttcggtattgctttagccactattggctacgatgaatttacaggacaagcccgttttacctttggtgaagtctctttaatgcaaggtgttagttttattcccgccatgatagggctatttgctatctctggtgcgattaaatattacgtcgatcgctggaaagaaaagcaaattaaattagcagttaatacagataatagctcttatnnnnnnnnnngataa

SEQ ID NO: 311728 - DNA, 756 bp, Proteus mirabilis
gtgggaaaggttgtttgccaacgtaaagggggcattttccgtagtggtattattggtacattgataggtgctttacccggtgctggtgccgatatcgctgcgtggatctcttatgcggtatctaaaaaattatcaaaaaaaccgcaaaagtatgggcaaggctcagaagaaggtattgttgatgcatcagcaagtaataatgctagtttagcaggaagttggataccttcattggtttttggtattcccggtgattctgcggcagctattatcattggtgtattgtatatgaaagatatgcaacctggaccaactctctttttatttaatccagataaactgtacgccgtttttatcattttctttattgcgaatttaatcttattacctatagcttttattgttgttaattttttaaagaaaattgttgctattgataatgcaattctttatccagcaattattttatttagtattgtcggttcatttgctattactaatacgatgtcatccattgtggttatgatggtgatgggagttatcggctattttcttcaacagcgtaactttccaatctcaccgattatattagggatgattttaggaccgatgctagagaagaatttactttcttcgttgatgaaatcggacggagagctaattaattttgttaatagacctatttcaattgtattagccagtgttttcctattaattgtcgctatgcaaattaggagcgcatttaaaaccaaataa

SEQ ID NO: 311729 - DNA, 597 bp, Proteus mirabilis
atgtctattcttgaatggccaaaagcggtgatccccatacaggaaaactggcaattattgagtaacagcaaaacctttacctcgccatttaatggaagtagccagacggtacgctttccaggaagtcgttggcgttgtgagctgacatttaataatttaaatgaagagaaatcgcgccagttagaagcgctggtggcttcattggatggcatgtcggggcgagtcaaaatagccagttggataagaaaagggcgttatggatatggttcgcctcgtattgcaataccaagccaattaggtcatcgactagaaacaaaggactggaagcgcaatatgcgcgtgttacagcaaggggatcgcttaactgtgggcaatgaactcaaaatggtggtggcggatgtggtcagtgatcatcaaggacgtgccattattcttatttcgccgatgttaagaatgtcacctaccgtcaatgaaatgctcgaggttgagcgtccttttggaatttttcgtctcgttgataatgaacagggtaaatttcagcatcgtcgattggggtataccaatatcacgttatcttttgaggaggtgttgtactaa

SEQ ID NO: 311730 - DNA, 486 bp, Proteus mirabilis
atggtgatgaaaatgctggttttcaaagccattgaagcaggcgggcaggcaatgggctttgatatgggatggatgagcaaagggcatgcttatggtggctatacggggcatggcgggaaattcgaacctaaagggattgtacatggtggcgagtttgtttttaccaaagaagcgacggctaaattgggtgtcggcaatctctatcgcttaatgcatgcggcgcaaggttatgcttcggggggctttgtgggggcggtcgcagggcgaataccggttacaccgcaaccgacgttagcccgtgcgggtggtgtacaaatgacggtcgtcaatcatattacggtgacaggaaatggtgacgctgtacttgcgcaggcaatgaaggaagccgcacaacaagggacagaagcaggcgcacagaaagctcacgcgatgatgttacaagactttcaaagtaatggtgcagcacgcagaacattaggagtttaa

SEQ ID NO: 311731 - DNA, 204 bp, Proteus mirabilis
atgaaaagtgcagatttctataaaaaatttggaattgtcgcagacactaacgttaacctagaaggtaatcgccaatttatcaagaaggctattaataattcgtttttcgtaaaaccgaattatagtcaagttcagtattcctatggaactgaagtgacgaatggtatgcaacaaacaatacataaccctttatacacatactaa

SEQ ID NO: 311732 - DNA, 714 bp, Proteus mirabilis
gtgttgatccatgggctttttggtgatctcaataatctaggcgtactaggtcgcgatctacgtcaagaccacaccgtgatacaaattgatgtgcgcaaccatgggcattctcctcatagtgaaagtatgcactatcacgatatggcacaagatgtattagccctgcttgatagcttaaatatcgcaaaagcaatcgttataggtcactcaatgggagggaaaattgcaatggcaatgaccgctctcgcacctcttcgccttgaacgtatcgtagttattgatatgtctcctgttgcttataatgttcgtcgtcatgataaaatttttgcagcccttgaagctgtcactaaagctcacgtcacacaacgtacagaagctattgctattatgcgcccttttattgaggaagacggcgttatccaattcctgcttaaatcatttaaaaaaggtgaatggttatttaatttacccgcaatcaaacaggcttaccccgatattattggttggcaagaggtgcctgcttggcatcatcctgttttgtttatacgtggtggactatccccatatattttagatgaatatcgcaataatattgctcgccaatttccacaagcaaccgcctttgttgtcgccaatacaggacattgggtgcattctgaaaaaccagaaacagtaattaaggccattcgtcgcttcttagccaaaacagtataa

SEQ ID NO: 311733 - DNA, 468 bp, Proteus mirabilis; identical to SEQ ID NO: 307747

SEQ ID NO: 311734 - DNA, 519 bp, Proteus mirabilis
atgaatagaattgttgaaaaatggatgtatcgctctcgttggttatttgcacctgtctatattggcttatctcttggattgctggcattaacgattaagttttttcagtcaatgtacgagatcttacccaatatatttgccttatctgaagctgatttagttttacgtttattatcgctaattgatttggcattagtggggggattattgataatggttattttctcaggttatgagaattttattaccaatatggaaatcgaaggcgcgaaggataaactctcttggttaggtaacatggatgcagaatcgctgaaaaataaagttgctgcttctattgttgctatctcttctattcatttgttaggggtgtttatggacttaaaaaatatccccgataacaagttattatggtatgtggtgctacatttgacttttgttttttccgcttttgtgatgggctatttagagaagatctctaaacgaagtaagcgagcaaataaagccaatcaagggtga

SEQ ID NO: 311735 - DNA, 351 bp, Proteus mirabilis
atggccgttttcttttcatttggagaaaatattaaagcaataaaattaaaaaaattaacaccagaaaatccgataatatttaagttttatgatacaggaattacctttaaagagcctcatcaacatggatcattatattggcaagcttttactttgattgaattgacaaatgattatctatatttaagcttatgcccagaaaacacagagaaaggaaaagagactgcaggtatttcagatctttttattctgacggaaaatctaagtaatgtcgatagcctgatttcattattatctcatgaatattttcttagtagttttacttttcgtgataatcgtaaaaagaaatag

SEQ ID NO: 311736 - DNA, 432 bp, Proteus mirabilis
atgaccaataactgctactatcttgatgcgatcctcattcagtattatcaaggaagagataatagcgttaattatcgtattgcacgtcgtaatgcacatagcagtgatggtgagttagcatctttaatttctaacatgtcatcagagcctaaaagctttcaaacctctcaagaagaagcatttaatgatactgtctgttatattgattcagcgttgagacgtaaaaaaccacaagataatgattttatacaatctcacgatcaacttatcgcacgtgttaatgcacaaccaagttcggataacgcccgtattcaattagtgttaacgcaaatacgcttgttactggatttactgccacaaattgtcaattgcattgagctaattgagcaaacagaatggcaaaacgataaagataaattagctacagcttga

SEQ ID NO: 311737 - DNA, 480 bp, Proteus mirabilis
atgggggcccaagttgcctttgaaactgctattcaattagaaaaaaatggctgggaattatctggactaatattatcaggctgccaagctcctcatattcaagcaaggagattactgagtgatttaaatgatgatgactttattcaacaattaattgccattggtggatgtgatgctgaattaatcaagcagccacagttgttaaaacagtttatgccattattacgtgctgatttccttgctaccgagcgttatttttttcaaaaaagcactaaacggctttttcatacccctgttttattaatgtatggtagtcatgatagtgaagctgataaaaacgaagttgaagcatggcaagattggatagataagcattgcactattaattgcatcgctggagatcacttttatccaattacacgcccaaatactttttgtcgttttattattgatttttatcaccaatttatcaatgattaa

SEQ ID NO: 311738 - DNA, 138 bp, Proteus mirabilis
atgcaggtcacaaggaaacaagagcgtgttattcgtcaagcacttgatcattggcaacaatctggtgagctatcagcacaacagcatcaacaactagaaagtacattacaacgccttccctttgattggaaaagatga

SEQ ID NO: 311739 - DNA, 312 bp, Proteus mirabilis
gtgactagcgaaataggctcaccgccttttgacgttgctggagttgcttatatactcaatggtatggattcttttgataagaaaagcattgttgaatcagcatatagaacgctagctagtatggtttctgatgggctgctagagaaagtatcaagttatgaacgtcggcaaaatcgaattcaaggctttggtgattctcctagagttaactgcatagtaagcagatatggattacctgagcattgcagactagttaaatatgaagatgatggacgtaattatattgaggacgagtttaaaaaaattgactga

SEQ ID NO: 311740 - DNA, 726 bp, Proteus mirabilis
ttggttgctagattttcatttggaagaagtgaaaaaatcaaacaaacagctctaaatatagagaatggtaataaaatttttttaaaggtagcggatattcaggattcattggttgctgtgaaacttaattattataataaactaaatgatgaccctcataatagaattataggttatcactatatagtttctaacatggaaatgattaaggttgatatcagtacaatttcatttttgatcaataggttcgatccaagtgatgaagctaagtcatggtataatattcgcagaatcaatatgctttttgataattataatgcttttgtcatgttgtttaatgaaaaaaatgaactttcaaatgaatttcaaaataggataaattccaataaaggaaatggcaaaattacatccgaggaaatatggaaatacggtggtaatgatttaattcctaaattaatttcacttaatgagaaagcgatatattttcttgatgatttattaaaggaatcaatagactttttagagtcatatgaaaaaatagtaaagtcaagcgtcgattataagcttgtgtataaacaggctagaatatttggttatgtgagccctgataaagaacagaaaatatataaaagagttatcgatgtgaattattctgctttagcagagatttcaggaatagatgaggaattttggagaaaagagttagattttggttatgaaagatag

SEQ ID NO: 311741 - DNA, 378 bp, Proteus mirabilis
atgctcttgagtccaaatcccctctataaagcgtattgggttgctcaatgccgttatactcgcaacggtgaacaattcaagggggtgatgaccgtagcaggtacaagtcaatcacaagctattaagcagatgcgtcagtactttacggctcacccaggtgaatatacctttgcggactatgacacattaatccctttaatcacccatattgaacaaagttcaaccttagaattaccgttaatacggcaagtacgtgagcaacataatgcaaaggtttcagccgtattagtggataaatgcaacctcacacacccaagaccgtcagaaaaaggcgacattcattatcatgaggggcaacctacgtttattgaatattag

SEQ ID NO: 311742 - DNA, 339 bp, Proteus mirabilis
atgatgaatattaaagctaaacgagatattgtacataaaacaaaaatcttaaatcatgcccgtgagagcaaaaatattgctaaaacttgtcgtcattttgggatcagtagagaaactttttatacttggaaaagagcttatgagcgagatggcaagaaaggattaatcaacaataacccctgccctgaaaatccaatcagaagagttgcaaaacatatcgaagagctggttatttatctgcgtacgacttacgattttgcccccagcgcatcgcttggtatcttctgcggtttcataacatcaaaatatcacgctctggctgctactatgtattgctaa

SEQ ID NO: 311743 - DNA, 483 bp, Proteus mirabilis
atgttttatactgacaagaatataattaataatagttcttttgctagttttctatttgtgctatttactgaagaatatgaaaaattatccattgatgatcgccgacctgatttaatgcaatttctacttattcttccatttatttggcacaaacttagttgtgatgccataaaatcaaaaaaaagaacaaccctattaaatactgtgattcaagaaacccctcttattaaatttgattttaaaaatcgcataaataactactcaggaataacacttcaaggattaaatttagcagtttcatctggattattaatacgagaaaataacaataataaaatattgtttcaacgaagtaagaaaaaatggcctgctaatataaagacacaattaccttcagatatgattcatgcgaacacacgattagcttactggttttatcatatggatacaccaacagtttataatttaattttagagaaataa

SEQ ID NO: 311744 - DNA, 1197 bp, Proteus mirabilis
atgataactcaagaagcaagttctaaatttttaggttttctttatcagatagaacgagttctctatcgaatattttctagtgaacatagtttagccgtatttgccgttgaaactgctgatgatgttgtagaagagatcacatatagtaacggtaaacttcatatcatttttgagcaagataaacactcaattgctttaaatagtcaaccctaccaagatagcaataaaaatctttggcacactctacatatatggctatccacaatagatgaatataaaaataagtatgaaaaaataacttattgtttggtcacaaataaatctgtcggggaaaaaacactagcaaaaaaaatttcaattgctgaaagtgatgaagatataaataaagcaattaaagaattaaaaaatcaagcaaagatgatttcaggaaaaacaaaagaaattgctgaaaaagtaattaattattctgaagataagttgaaatatctaattaaatgcattgtactacttgataatgatggaaccatatcaggtgaaccactaaaacaagcaacaattaatttatttcatttaacatcagaatacaataaacattctaactatctctatcaaacactgatcggtttcatcatagataaatgccaaacgtcttggagaaaaaaagagcccgttctactaacaaaagatcctatttttaatttactacagaatgaaataaataaaataaaaagaaaaagtttcactgaacaatcactttttaaaacttcatttcaagaatatctaaagaatgacaataattcaggaaatcatttatttatagaacaattacaaagtattggtcataatactgaagcatgcaatttagcgctaataaactactgggctttttattcagaaaagataagattacaagaagccggtgaaactcctatctcagcatgggaagatcgtgatgaccaactatataaccgatggattaacataaacttaagcacaatagttaatagtaatgaaaaagatttacctcactatcagaatatatattctaaaactgtaacccctgattataactgtcccataaatgggtataatacaactaactcttattttacgattggtaattaccatgcgttagcaaatgattctgaaggtgattattttatctattggcacgataattacaagaaggataattga

SEQ ID NO: 311745 - DNA, 900 bp, Proteus mirabilis
atgaatactaaaataaaagtcgctattgtgggctatggcaatattgggcgctttgcactagatgcagtacttgcagcacctgattttgagttagtgggggtagttcgccgtgatagtcaaaatattccagaagaactgcgaaatataacagtaataagtgatattaaaagcttaggtaaggtggatgttgctttattatgttcaccaacgagagccattaaagatttgtctaaatcgatattgagcttaggcattaataccgttgatagttttgatgtccacagtgatatcgttgcattaaaaacagaactggatgaggtggcgaaaaagcataaccgcgttgccgtgatttcagcgggttgggatccgggttcagactctattattcgtactttaatgttagctatggcacctaaaggtattacctacactaattttggtcccggtatgagtatggggcatagtgttgccgctaaagctattgatggtgtaagagatgcactatcaatgactattccattaggtactggtgtacatcggcgtatggtttatgttgaattagaaacgggtgctaactttgcacaggttgagcaagccattaaggccgacagctatttctcatctgatgaaacacatattaaacaagttgatagtgttgatagcttaaaagatgttggtcacggagtacaaatgacccataaaggggtgtcaggcaaaacacacaatcaattatttgaatatgctatgcatattaataatccagcattaacatctcaatttatggtttctgcagccagagcaagtatgaaacaacaagcgggtgcctatactgtgattgaaattccccccgttgattttttagcaggggatttaaatacattaatcgcaaaactggtgtaa

SEQ ID NO: 311746 - DNA, 1095 bp, Proteus mirabilis
atggcacaagtcattaataccaactatctatccctggtaactcaaaacaacctgaacaaatctcagggaactttaggaagtgcaatcgagcgtctgtcttctggtctacgtatcaacagtgcaaaagacgatgcagcgggtcaagcaattgctaaccgtttcacttcaaacatcaatggtttaactcaagcttcacgtaatgcgaacgatggtatctctatcgctcaaacgactgaaggtgcattgaacgaaatcaacaataacttacaacgtatccgtgagttaactgttcaagcgaaaaacgggactaactcagaatcagatatcacttctatccaaaatgaagttactgagcgtttagacgaaatcactcgtatttctgaacaaactcagtttaacggtgtgaaagtactgagcggcgaaaagtcaacaatgactatccaagtgggtactaatgataatgaagttatcgaatttaacttagataaagttgataacgatacattaggtgttgccactgataaactgtttgaaacaacacctgctggtaaaaaaggtgttacagctgcgggtaaagatgctgatcttgatgcactatttacaggtgcaactaagttagatggtattgactctctaaaagagcatacagtagatggtaaggcttcaggcaaatttgttgcagaagttggtggtaaagagtatttagttaacaaatctgatttagaatttgatggtactgatactgttaaaatgaaagcagctcctaccactgaatttaaacctgatgcaggtaaagatgcaccagcaggcttaaacgttaaagatgacgctttagcgactttagacaaagctatcaacaaaattgatgaaagccgttctaaattaggtgcgattcaaaaccgttttgaatctactatcaacaacttaaacaacactgttaataacttatctgcttcacgtagccgtatcttagatgctgactatgcaacagaagtttctaacatgagccgtggtcaaatcttgcaacaagcgggtacttcagtacttgctcaagcaaaccaagtaccacaaactgttctgtctctgttacgttaa

SEQ ID NO: 311747 - DNA, 804 bp, Proteus mirabilis
  misc_feature (767)..(776): n is a, c, g, or t
atgcatttaaatccgttaaaaatatcaataagcccttcgtcactcccctgcactcaacctttaacctgcattgaatatgaggacttaaaggatgggatgttagatatgattaatcgtaacagtaatatattacccactgttgtggatgaatttaatcaacaagatccgcttaatgcgcctattatggtgggtgaagtggtcgtgggtcatatcattggtctaatacctgttgttgggggggtactttcaaaaattacttccgcactttttggcctcatgaataaaaatatgaaagatagctctttagctgagcaaattattgcccatgtctctcgtattattgatgctaaaatcactgataacaatataaaaatcattaaactcacaacagaaggtattagcgacgtttatcaattattttcagattctctcgctcgttaccttgaccccaatgtgcattattcagaagaacaattacgagatttacgggaacaagttcttaaccgttttgatgatgtgatttcgacaattattgctcaacaaccattagtattaaatttagcacaatcagcaggattgcccttttattgccactgttgcgcactttttgtcgccgcccattgcgatatattaaccaataaagaaaaacttgctctggaagaggattatttcaaaaataatctaaaaacattaagaaacagcattgataaatttaacgccaatattcataaagcgatttatcagcagacctcccaagtttttaaagnnnnnnnnnngattataataaatgtaatacttttttag

SEQ ID NO: 311748 - DNA, 204 bp, Proteus mirabilis
gtgcttggttatgaagcccaattagtaaatgcagttattaccagttcaaatgctgttgtaggtcgattccattacaaatacggtggcgactgggaaaagattgtagggatgaaagataaacttgatgaatcgggtttatttattgaagtcggtgcaattttaagaggtgaagaagaaattacatggggtgagcctgtttactga

SEQ ID NO: 311749 - DNA, 255 bp, Proteus mirabilis
gtgaagaagaaattacatggggtgagcctgtttactgaattaaaaaataaagcagtacaggcataccaccgcattgatgcacgtaatgccttagaagcttctattaactcacttcctgaatctggctcacctgaagctaccgaagcatttgaaaaagtagacaagctacttaaatcaagcaaaagaaaacttggtgatgagttatacgagtctttctctatctcgcttgatgatatgcgccctgaataccagtga

SEQ ID NO: 311750 - DNA, 1392 bp, Proteus mirabilis
ttgcaaaatctctcggaaaccttacagcagtctgcctcacagatgctgattgtgaatgatgatcttgagcttgcaagagctaagtggaacaacgctaagtcccagttacaacaactagaacatgaaatttcaattaaatggcaggtagtagagaaattgaaggcaacagcgactcgggctcgaaatctcatgggtgacagagttgttgatgagcagtttttcgagcgagagcacgaggctatccacctgacagcaccatggcttcccgatgaaattcatcgcctgcgtgaggatctcttcgccgccgccttggctgtgcataaagcattcatcgatgcttcggctaaccacttacaacacaatcttgggttattgatgtcgaacatggtagctggcgcatttcagtctccagctcaccgtagacttctccctgacctctggtctagcctttttatggtagtacctacagtatccacaaccttcgcctccgtccggacgatgttcggagatctgcctcctgaaagtattggctggcttctagtcgatgaagcgggtcaagccgttcctcaggcggcaattggcgctatcatgcgggcaaagcgttctattgtagtaggcgatccgttgcagatcccgccagtagtttctcttcctgagaagctgaacgctgcaatctgccagtttttcaatattgacccgttagaatggtctgcccccacagcatctacgcagacactcgcggatcaagcatcacgcttcaaatccacattcatcacggacgctggtgatcgagaggttggattacctctccttgttcacaggcgctgccagaatccaatgttcgatatctctaacgctattgcctattcagggcaaatggtccatgccgtcagacctaaaaaaccggattctattggatcaacattaggacaatcacgctggttcgacgtcaatggcgatgccgagacgaaatggtgcgctgacgagggagacatggttgtgcaaatgcttaaaaaattagcggcatcaggcattacaaatccagatgtctttatcatcacaccattcaagatcgtagaacagcaaatgcgtcggcgtctcaacagtgagacaagtctgctgaagacgttaggtgtaaagttggatgaatggagccgtgatcgtgtaggcactattcatacgttccaaggccgagaggcagacacggttatcctgctactgggtgctccgaaagccagtcagcaaagggctcgccagtgggcagctagcccgccaaacattattaatgtagccgtctcacgggctaagcaaaacctatatgtggtgggttcagctgttgcatgggctggggcaggaactagtctgcaggtcctacaacggcaattagcataa

SEQ ID NO: 311751 - DNA, 2196 bp, Proteus mirabilis
atgacgacaagagagtatttgcaaaaatcaatttttgagttggaagcaatattcgaacggtcgcacaataatgctagtgaacttgaacgactattgaacgaactggcctttcgaaacacagctaaggcgcgaatgctgacgactaaagtcgaacaagccctaactgccgttaacgattgcagtttagtctctatgcctagttccactccatcagagcttaatcctaattcagtattcactcaatcatccgaagttgttgcccacaatacacccgaaatgacggtacaactaaagcataaacctactccagacacagaccagcaaattgagctaggttcgttcccgtctttcactccgtctggtaaggcaaatgatgcgcccgcgatattgactgcatggacagcactcgaagctctgtcacctcaaagctataagcgcccagaagatatggcagctggtgaccgttctagagttgccctattggatcgagacattccatggggaccaaatgcccgcagcaagcctaagcataaactttatttcgaaatcattctcggcgctatcgcactcgacaaggcgacagacgaattggtcaaggtttttggtgaggatgaggagcaatcaaggccggatggcaagaaagcggccataggctcaatcttggtcgacaaggaaggctttgttcttgaaaataacggagtcgccgtttccagttttgcttgggcgctcaaaccagcactcgatctgaagcttggtagcttaggagcctggccgaaagtagaacggcacattatcgagtgtttagagcagatagttagtcgccataacgaggatggagaacccttaccgatcgatctggatactattattaatgctcatagatggcttgtgtcacaattcgatgtacccgagcatttggttgaaccaccttcatttgtaatcaaagtatttcattatttcaagaacaaaacaccacctgagccttcgttgctgaattctttctaccttgaagatcttgacgaagcagtaaaattgctcgaagcggataatgcaggaattggtttgcaacgttacatgggaataggcagacctagccagaaaatcgatgtgttgtcccccgtttccgcagtcgagccgttcgtcgcaccgtcgctcataccgcaggctcgttggccttcacaaggtggtcacccattagtgttacttcaacaggccgctgtgaatgcggcgcgtgttgagctggttgatgctccaggtatcattggcataaatgggccaccgggcacaggaaagacaactcttctccgagatatcgttgttggttgcattcttgatcgagccacagctatggtcgccttcaacaaaccacaggatgccttttccacaacaggcgagaagcaggcatttggctctaatgcttttctgcatttctacaggttacatgaatccttgaagggccatgaaatcgtcgtagcatcctccaataacaaagcggtcgaaaacgtcagcaaagagcttcccctcaaagaagctaatggacgccatgaacaaattgcctatttccgatccatcagtgacttaattgcaaaccccaaacgcacaggcgccttcgaaccagaggatgctaccctatccgaacctatcgagacctggggattgattgccgccacacttggtaatagcagcaatcgaggtaatttccagcaaaatttctggtggaacgaggaccgcggtttccttacctacctgaaagctgctcgcggaatgaacgtcatgcgtgaaatcaaggatgaacaaacgggagcaatcattgatcgagtgatgcctagcgtagttatcaatgagcagcccagcaccaacaaagcagatgccgctgccgcttggcaaaaagcacgaaccatattccttaaactaaaggaaacgatagatactgaaatagccagtatcgaaagtatgcgccgagatattcaggcactcaagggagcgaccattgaacttcaaaaactggaacagcttcgtcctagtctaaatgaagccctcgaacagacataccagattgctgaatctgcccatagggaacaggaaaaggcaaagtcgcaagttgagttgaacaaggctttgcagcttggaagtcttggaagtcggccttgcaaaatctctcggaaaccttacagcagtctgcctcacagatgctga

SEQ ID NO: 311752 - DNA, 771 bp, Proteus mirabilis
  misc_feature (320)..(329): n is a, c, g, or t
atggtgagtttattccgcaaagcgaatcttcctcgcagacttattccggctgtctattttgcaggtgcgggtacctttgtgatgataatgccaggatcgcctcagatccaaaatcttatcccaatgaaattcttaggtacctcagcaacagcgggtttagtaccgggtatgttgaccgcgttgtttcaagtcactttagtgattatttatctcacttggttatttaagcgtgtaaaagcaaaaggtgaaggctgggttgaagacgaaaaaacagcgaaagcagaggaaggtaaaaaagatcgtcaattacctaatgtgcnnnnnnnnnnggtgacctccctctttaataccgcggtgattgtcggatttggtgcgttagtcatgacattacctgcgttcaaagaatcattccaagcgattgcgcaatcgggacttaatccccttgtcgtcacggcgatttccgtcggtgctctggtgtttatcagtggttcaggctctggagcgttaagtatcgccatgccaatgattgctgcgatgttccctgccaccgtggttgatcaaggttcattacaccgtgtcgccacaatggcatctatgagtacaacaccgccatttaacggattgattattactgtctttagcgtctgtggtgtcagccataaagagggatacggtcctgtggggacattaaccctcgctatcccactgttagccatgatgtttatgttgctgctgtacacctttttacctgcatctatcgcgacgatgtag

SEQ ID NO: 311753 - DNA, 1401 bp, Proteus mirabilis
atgtcatttactaaatcaatgcttgcactcgctgttatggcggtttcttttactagtcacgcagccaaacaggctgatttaatgattgtcgatggcacagtgttaacaatggacgcacaaaatcaggttatcgaacaaggaacggttgttgtaaaagaaaataaaattatcgccgttggggggcctgagttaacacaagaataccaagccaacaaagtgttagatgtggatggtgatatcgtgatgccaggattaattaatacccatacacatgcatcaatgacggtttttcgctctttagccgatgacgtgccagaccgattacatcgttatattttccctttagaaaataaaatggtgtctcgcgatatggttcgcgtaggagcaaacctcgccaatgttgaaatggtaaaagggggagtaactacctatgttgatatgtattattttgaagatgaagtcgctaaaacggttgataagatgggaaatagagccatcttaggtgaatcagtgattaattttccggtggctgatgcacaaactcctgaagaaggcattcaatatgctgtcaattttattaatgaatataaagatcacccgcgcattattcctgcctttgcgcctcatgcaccttatactaataccacagagaacctgcaaaaaattgctaaactctcggtagaacttgatgcccctgtgatgatccatttagcagaaaccgatagagagaaagaagaaattgcaaaacgaaccgatggtaaaagcccagttcaatatatggcagatattggcgctttaaataataaagtcattgccgctcatgcgattatggttgataagcaagatattgatttattaaagaaatatgatgtaggtgtggctcataatattagtgctaataccaaatcagccaaaggtgtttcgcccgttgttgccatgctagagaaaggtgttcgtgttggtttagggactgacggtccaatgtcgagcaatacactcacaacgatgaatgagttaaatttagtaggcaaaattcataaattagagaataaagatcgcgccgcaatgccaccattaaccgtcgttgaaatggcaacaataggctcagccaaggcattacatatggaagataaattaggctctttagagcctggaaaacttgctgatattattgttgttgatactaaagcacctaatatggtgcctatgtatagcccatatgcagcattagtttatggtgcgaatggaagtaatgttcgtcataccattgtagatggtaaaattttgatggaagatcgccaactgttaaccgtagatgaacaagcgattatcagtgaagctcaaaattttgcgaataaagtacgccaaaccgttgttgatagtggtgaagtcgttaaatag

SEQ ID NO: 311754 - DNA, 786 bp, Proteus mirabilis
atgagtagacaaaaagcagcaacacgtttacgtagagaaaataaacgtacattacgtaaagagcaacgtaatgccgcccatcgagataatgttatggttttaccaggatttggggatctagaaacaattggtatggcgagagagaaacgtgatcaacgaacactctctcctcgtaatgaagttcaacgccaatatatgaacgctattaaacatcaaaatttagtttttgcgacaggggaagcggggtgtggtaaaacgtttttaagtgcagcaatggctgctgatgcccttattaataaagagatagagcgaattattgttactcggcctgtattacaagctgatgaagatttgggttttcttcctggcgatatagcagaaaaattcgcgccttattttcgtcctgtctatgatgtattagttaaacgtttaggcgcctcttttttacaatattgtttacggcctgaaatcggcaaagttgaaatagccccatttgcctatatgcgaggacgtacttttgaaaatgcatttgtcatattggatgaagcgcaaaatgtcaccattaatcaaatgaaattatttttaacgcgaatgggagaaaatgtgacagtgattgttaacggtgatattacgcaatgcgatttacctgccaatgtaagctcaggattagcagatgcactaagtcgttttcaagctaatgatcgtgttggtgtcattaaatttaatgaagaagattgtgtgcgttccagtctatgtcagcatgtattagcagcatatagtgattaa

SEQ ID NO: 311755 - DNA, 1143 bp, Proteus mirabilis
atgacagtattaaccgtttatttttgtggtaccggcgcttcatcttttgataataataatcataataatcctgtttattggcaaggtgagcttgtttccactttggcgcataataatcaagatcgcgaatttgctcagtggtttattgtagatggcccaggtagcggtaatttgcaagaagatgatttatgggttgaaagccctaattattcagatataaaaggcgctttatttggcagtggatgggaagaaaatgttgaacatgcactgtgcttaatgaaaggcaactttgactggcaacgtgaaaagttaacagaacaacaatataatcaactgaaaaaagcgggtattcccattgaagatgttgaagtgaccggctcttttttatggcgtaaatataattatggtgaccgctatgtcactcaacaacaacttcagcaacaaattattcgtacctttcgcaaagatggcatcattcccacccaagtgaatttaattggttggagccgtggtggcatcacctgtcatatgcttgccaatgccatgttaaaagatcccctattaaaagatattccagtcaatatttttgctattgacccagttccagggccacttaatttccaaccagaaaaggtgacactaggtagcaatgttaaggaatatgtcggattttatgccattgatgaacgctcaaaaggatttgcttgcgttattccaaccgtgacttctgagactaaaatgcatattttcccgctttcaggacgccatgcgactttagtaggcaatgctgctattgatggtagtgaaggtaaaaatgcactattttcaccggggttaattgtgcgacattttgcagaaagatgtttaacacgttggggatgtcaattagcgaacaagctagaattaactgataaggagatatttgagcatcatactgatattaaaaatgatgcagataaatatattgctatgcgccgtaaaacttattccatatatgaaagtagcggtgatgatgaacgtaaagtttcattaggtaaagaggggaaagcattctctgatatatatggggcacaatatgagccttctatggcattaaccgcagactattttgcagatcctcaactctacgatgtgattaaataa

SEQ ID NO: 311756 - DNA, 399 bp, Proteus mirabilis; identical to SEQ ID NO: 297845

SEQ ID NO: 311757 - DNA, 531 bp, Proteus mirabilis; identical to SEQ ID NO: 296302

SEQ ID NO: 311758 - DNA, 978 bp, Proteus mirabilis
  misc_feature (865)..(874): n is a, c, g, or t
gtggcggaagaattcaacttacgccccggtgttgccttaacaccagcgcaaatcgccgccctacaacaagacatcgtctggctagtcagtgaaaccatagatacatcacaaggcccacaaaccgtttgggttccgaaagtctatttagcaaacacgacacttagcctgacacaacaaggggcgatgataagcggtaagacactgaatttatccgctgacagcattgataatgccggaaacctattagctcaaaaaggccttgaggtcgatgcgaaacaatttatgcatcgtgatggggatatcaaagcagataccatcaatattaatgctgataacctcacattaagcaccaacttacaagatgccttacgtcaagcaacaatgagtgccactgatatcacccttagtggacataatatgcaattgcaaggcgctaaattggatgcgactggggatattaagcttaacgcgcgcgataacttgtccattacggcagtgaaaagtacccataccggcagtatcaatgtgattgcgggagcaatgggggatcgtaataatattatcaatacatctgaaaattttgcccacgttagcggtgaatggcaacttgcacaaagtagcgaactgagcgcgggtggaaatctcagcctcaatgctggaaaagatatctctgtcaaaggcagccaagcccaagctggcggctcgttggatgtcaacgcgggtggcgatatcaatatcctgtcggataaaaccaccaataaaagtcaacttgatgcacaaggcaacggttcttccgtcagcaatacccgtgaagaagacagcttaatgctcagtaccctcagtggcaacaaaggcgtttccctcnnnnnnnnnncttggtggcagaaggcgcccaagtcgatagccaagcaggtaaaatcagcgtctcagcgcaagatgtcactatcaaggcggcaacccaagacacctatgcgctag

SEQ ID NO: 311759 - DNA, 444 bp, Proteus mirabilis
ttgggtgggattaatctgtatcaatatgcgccgaatccgttgggctgggttgacccttgggggttaactgctgttgatgctcccggatattatgtttatggcttgttcgattcaggcgcaaaagagccttattatgttggtattactgatgacccgatgagacgatcaggtgagcatcgagttagtggtcgattaacttcaggtgcaagcatgaaaactttagataaaaatgtcaactacggccaagcccgcggctacgaacagtattatattgagaagtatggtacgagaactggaactatcggtgaagatatatcgtcaatcaaccgagggaacaaatacaattcatttgaccataaccgtgctgatacgcgtgccgatgcttttagagaagcttatgacagtaaaacaagaagttctggaaaagtcggaggaaaattctaa

SEQ ID NO: 311760 - DNA, 351 bp, Proteus mirabilis
ttgattcttttagataagactggtactaatgatgaattagacatatatttaactaaggctattgagtttgactttgttaaagtggggtgtgagttgtttacttatgtgaaatatcttaggtttttacatttatgcccggttaaaataaattctaataggggatggaaaagcgctagaattaataatagttctggtatgctatcagtgaaagatcaggagttacctaactatatccaagataaaattaataattctatggttttttttcaagaaaaaaagaactctttatctttaaatcaaaagcaaaaaatagaaaatagaataattgattcactatctaggaaaaagtaa

SEQ ID NO: 311761 - DNA, 450 bp, Proteus mirabilis
ttggcccccttaaaaaaatattttgaaaataaaaattttgataatgatgaatatactacctatacaaaaatcaataatttgatagagaaatatgcagataaatttagccttaaacgtagtgggcaaattaagtttgataaaaaagaattaacactgagtttctctaatcctagatttaaaaaatatgaatatctctgggagataggtagtggcgctaattggatggggtatcatatatctacatttttagcattccatgaatacttttccaaagaagacaatcaaaaattgccaccattcagctttctagtcatagaccaacctagtcaagtatattttccaagtgctgaatctggagacaatattctagatgatgagaataaaatgaaaatcatacgaaatactagagaaaatgatattagtgccacaaaaaaatatttgaagtattag

SEQ ID NO: 311762 - DNA, 369 bp, Proteus mirabilis
atgtgcataccaaataaagtaagtggggatgcccgagaagcgaaagtgctaaaacgattgcaaaatatgtttggcaaagaaaatgttattagtcagcgacatttacgtaatgctgacggaaaaatggttggtcttgttgatgatatagttcaggaaggtaaaaaaggttctcgtattcttgattttgtagttaaaacgaaagatggctggaaagggatagaagtaaccagtaaaacagcgtccaaaatagttcaatctgcaaaagaagaaattattcgagcctctggtggtaattttgttcgccatcctgtgacgaaagagttaattgagctttctgatgatatatctcgaataatacgtcttgattag

SEQ ID NO: 311763 - DNA, 615 bp, Proteus mirabilis
ttgcagctcagcacgtcgaatgtcgacaactcgcaaggcggtttactgtatagccaaaaacaactgttgttatccattgaaaatgcactcaataacgctcacggcaaattgcaaagcggtgaaaatctcacgttaaccagtaaaacgttagacaatacgtctggcaaaatagaaagccagcaccccctgaacatcacaagtacagagcgaattgataatacggcaggggcaatcctcagtaatcaaaaccagttgctagaaaccaaaacttttaaaaaccaacaagggacggtgagtagcctcggcaagcttgcgctgaatgcaaccgaacttgataacactcaaggtgccctcattagccaacacgcaggcacctatagcataaagcaactcaataacacacaagggaaaattcacagcggtgataccttgacgttaacagctaccgatatccaaaaccaacaaggacaattagtttccactaatgcactgaaactgattgcgctcaccttggacaatcgacaccacgggattttaagtagccaaggtcgccttaacctgttactcaatgctttagataaccgtgaaaatgggctgggtatagatggcaagtga

SEQ ID NO: 311764 - DNA, 216 bp, Proteus mirabilis
atgggactgtggttaaatattatgaaaaaatacggccctgcttattgtttacctaaaactctagcttattaccgacttgattctgggatgactcaaaataaaattaatgcggctatttaccagtggatattttatagaaaagaattaaagtttaatatatttaagtcaacaaaatattttataggctatgcttataatggattaataaaaaaataa

SEQ ID NO: 311765 - DNA, 441 bp, Proteus mirabilis
ttgactaaagaagaacaggtatttgctaataaagctcagaaagagcttattaatgaaataaatatgttttcttctaaaagtcaggcttctaaaaatgcaacaatgatcggagcttatgattcttctacaggtaaaacagccgtaggtaatagtaatgcaaatattacagcagattcattacatccgacgacagtcagctacatagaaaagcagctgggcgttaagataggagagtttacaagtttttgtaaaaacaaggctggagcatgcgcagaggtatcagcagcggatcagcttattaggcagggttccaatccctcaaagattaagtttactgaagcattaagacctagagatgtttggcgaaaagatgatatcccagcagatgcaataattccatcttgcgacaactgcagtgttacatggccaaaaggaaagtaa

SEQ ID NO: 311766 - DNA, 219 bp, Proteus mirabilis; identical to SEQ ID NO: 103816

SEQ ID NO: 311767 - DNA, 141 bp, Proteus mirabilis
atgatacagcaattaaaagagaccctttcaccgctggtcgatggaagggttttttttcaggtattacctgaaggcaaaaggcattatcccgccattgtgatccagttcgccacagccacaacccctcatggtcttgcgtaa

SEQ ID NO: 311768 - DNA, 474 bp, Proteus mirabilis
atggaccttggtggtaaaaatataaatatccaaggcagagtaattgacgagaaactaacttgtgtcgttcaagatgttgctccaattcaattggatgatgcttacattgattctttactacttactcctgggaaacgatttagtgtgaatttttctggctgtactaatcaagcaagagatagaaaagtcaaagtagttgttgcacgaaaaaacactactcatttaatgaatactggttcgacagcaaatgataccaatgtacgagtagcattattcgattctacaggtgaatttgttccacttaatggtaacgacaccgatcgtacattttcttcggatgttgtcggtgaacatggtagcttagaatttttattaaaatatgatagaccagaatcgattgatgatgatgttaccgcaggtgctttcaatgctgccttatctcttgatgcttacgtcactgatgatatccaataa

SEQ ID NO: 311769 - DNA, 312 bp, Proteus mirabilis
atgcacggggaacacaaagatccaaataatatgaattggtttactgccttattaattgccggtatggcggtttttggtggtattgccagttatgccaataaaatagtgaaaggggaaccgttccgctttgccatcttatttgcacaaattgttgtctctatgttttcaggggcattgattttattcggtgcaagttattaccagtggcaacctgaaattgccggcgctattgccggtatggcgggctggtctggtgctgcattggtcagtgcgttagaaaaaagattcttaaggaaggtctctggtgaataa

SEQ ID NO: 311770 - DNA, 195 bp, Proteus mirabilis
atggacattatcgactcagcaaatgaaacaaacgaactatatattcaagtgtcattatcaaatcgaaaggtagcaattaaatcatataacggcatgtgcatctggtgtcacgaagaaccagtcgcacctaatagcgcatactgcagtaaagattgtggtgatgatcatgaacagtataaaaggaagaatggatag

SEQ ID NO: 311771 - DNA, 348 bp, Proteus mirabilis
atggcatatgacggtacaattagtcttactggatgcactactggacaaaatggatctagtaatgtgaaagctttttttgaacccggagctaatactgactttaatacgaacaaactaaaaaatgcaagctctgacggagcacaaaatgttcaaattcagttattaaataacgatggtactactgctattcaattagggaaagactttgtcggacaggatgtccattcagaagctattaatagtgacgatgaagcgacactacgctatatggcccaatattatgctacaggaaaagcaattgtaggggatgtcatttctagtgttaattacactattgcctatgagtaa

SEQ ID NO: 311772 - DNA, 282 bp, Proteus mirabilis
gtgcatatcaccggcacccgttttgctatcgtttattggaaaaaacaatttgggttaattgaagtcacctttcttgatggtcgggtgcgacgtgaagtgattgcgtggtatgactctgcggtaaatgtgacggctggcgttgttggggcacatgtgagtcgtgttattagtgctgaaattaaatctatctctgaattgatagaggtaatgactcacgttgctaaactgtgcgaaacggccattgaaattattgatccgaagcatttaggcggtgtgcggtaa

SEQ ID NO: 311773 - DNA, 228 bp, Proteus mirabilis
gtggtaattgatgcgagtcgtgaagcgtctttacaaatggaagatagcccaactaacagcagtaaaacggggaccggagcccaattggtgagcatgttccaaaccaacagtgtggctattcgtgcagagcgctttatcaattggcgcaaacgtcgcccagaagcagtggcctatgtgtcgggtgtcaactaccgcacagtcacagggggagataaaagcccaaagtga

SEQ ID NO: 311774 - DNA, 195 bp, Proteus mirabilis
atgaaatacaaaaatggcagtgaaaaagccttggttcgtccaccgattgatttcttggaaagtggtttacctgaataccgtcgtggtcctttgttaggcgaagacacaccgtctgtattagctgaattagggtatagcgctgaagagatagcaaaccttgaagccaataaagacgtgatgacgtggaaagaataa

SEQ ID NO: 311775 - DNA, 207 bp, Proteus mirabilis
ttgaccgatgatgaagatatgcctgatgaagtgagggcaaaactttacaaaatcttagggttagtgctacgcgataataatcgcccacaagaaagctactgcgtattaagtcgagccttagagttaaacatgaatatcggtgtgaaaaccgaattaaaacaactcgataaagtgcttaaagcccagcgtgacgctgaaaaagcatag

SEQ ID NO: 311776 - DNA, 1419 bp, Proteus mirabilis
atgttatcgactcgacgtgatctttttcctcctcatatcgctgatcagttggcgttactgcaagataaagtagccccttttgatggtaaaaaagcgcgacaatatattgaaaaatcatttggtggccctatcgataaatggtttgatgattttgacgaaacacctcttgcttctgcgtctattgcacaagtccataccgctacattgaaagaaaatggtaaagaagtggtattaaaggtgatccgtcctgatattcagcctgttattaaagcggatattcgtttgatgtatcggttagcgaatttattgccatttttacccgatgggcgtcggttacggcctaaagaagtgatccgcgaatatgaaaaaacattacttgatgagctaaacctattacgtgaagcggcaaatgccattcaattgcgtcgtaactttgaaaatagctctatgctttatattccggaagtgtattcggattattgccatgaaaatgtaatggtgatggagcgtatttatggtattcctgtttcagatattgatgcgttaaatgcccaaaataccaatatgaagctattggcagagcgtggggttaaagtcttttttactcaagtatttagagacagttttttccatgcagatatgcatccgggtaatgtatttatcagttatgatcatccggaaaatccatactatattggcattgactgtggtattgtcggctcactgaataaagaagataaacgttatttagcggaaaacttcttagcattctttaatcgtgactatcgtcgtgtggctgagttacacgttgattctggttgggtacctgctgataccaatgtagaagattttgaatttgctattcgcacagtgtgtgagccaatctttgaaaaacccttgtcagaaatttcttttgggcatgtgctactgaatctttttaatacggctcgtcgttttaatatggaagtacaaccgcaattggttttactgcaaaaaactttgttgtatgttgaaggcttaggtcgtcagctttatccacagcttgatctttggaaaacggcaaaacctttcttagaagattggctacatagtcaaattggtattactgcgttggtaaatggtatcaaaagtaaggcgccttactggattgaaaagatgcctgaattgcctgaattggtttatgatagcctgaaacaacacaaaaatatgaagttaacgctagaaaaattgacggaacaaataagttcacagagagtcaaacaaagacagtcctattttttattgggtatgggaacaacgctatttttatgcggtagcctgttttttgtttctggttttaaaacattatttagtgtttttatcagtttaggccttctcgcatggatttggggctggtttaaatcaggtaatgcacaataa

SEQ ID NO: 311777 - DNA, 261 bp, Proteus mirabilis
atgaacacacctaatattgtctggacccgcattgatgaacgtttacttcatggacaaatccgcattacatggggtaaacatacggaagcaaacctaattttagtcgctaatgatgatgctgctgaaggtcccaatgctgcatttatgctggcggcgaatatgcggttcgctttttctctattcaaaaaactattgatgttattagcaaagcatctcctcgtcagaaaatttttgttctgtgtaataacccaactgatgtag

SEQ ID NO: 311778 - DNA, 354 bp, Proteus mirabilis
atgctaataaaaaattctttagcttatgcgattacactaagtttctgcttatccttacccgcacaagcattaccttctctttctcatgaaccttttggcgatctttatctttttgaagatgaaatgccaaataccttgagcacctcaaatgaccatcagctatcactaagtaaagagcatgctaaagatggcgtacagtcactcaaatggcagtatcaaccccaatcaacattaacacttaataatgaagttaattatcaagatgataaaaatacagcaacaccactcacttttatgatgtggatttacaatgaaaaaccacatgaaaggctcagcaacaggcaaattagataa

SEQ ID NO: 311779 - DNA, 450 bp, Proteus mirabilis
atggctgacacagcacatcagtgcacaattgtaggtatcgctggagcctctgcttcaggtaaaagtcttattgccagtacactttaccgtgaattaagagcgcaagtaggtgatcataatatcggtgtgataccagaagattgctattatcgtgaccaaagtgatttaacaatggaagagcgatataaagttaactacgaccaccccaattcgatggatcacgcacttttataccaacacttgtgtgaactaaaagtcggaaacgccatcgaactccctcaatatgattatgtcgctcacacccgtaaatcagaaaccattcattttaaaccaaaaaaagttattattattgaaggtattctgttattaacagataagcgcttacgtgaagagatggatttttctatctttgtcgatacgccattagatatctgtttgtttaatgcgtag

SEQ ID NO: 311780 - DNA, 246 bp, Proteus mirabilis
atgaagtacttgcaactcacaaaaacactgtttcgcttaagtgatacactctgcttgcatatcgatgatttaactatcaatgaaggagaaagttgggcattcgttggtagcaatggtagtggtaaaacggcgctcgctaatacattatgccaagaggggattttattatcgggtgagcttattaataggtttactcgtccgattaatctctcttttgaaaaattacaaaaaatgatagaggattaa

SEQ ID NO: 311781 - DNA, 468 bp, Proteus mirabilis
atgctggattttttaaaaaattatgacaatttaaccgtcagtgaaaagaaagtattaaagtatcttaccgataatatcgccgatatcccctatttaaatattaatgatttagtcgctaaaacctttgtatcaaaaacggtaattattaatttatcgcagaagttaggttttagtggctttaaagagctaaagtttcaaattaataattatattctttcgcgtaataaaatagaaaagagtgatcactcatcttataaaaaacaactagagaagaatgctttaccctcatcaatgaagagcaaattaaagagtgtgctaaaacactgcgccattctcgtaatatttttattgtggcaaggggaacaagtaaagcagtcggttattatcttgaacacttattgtttgcactgggcctgcattgcttttttattaatgattataacttatcagattcatttacacgtttag

SEQ ID NO: 311782 - DNA, 423 bp, Proteus mirabilis
  misc_feature (406)..(415): n is a, c, g, or t
atgccattgagagagaaaaagtatcaccaaaatcaagagagcattttattttttccaggtcagggtaggccttatttaggtatgggaaatagggtatatcgtgacgttccatcaataaaagaagtatggaattgtgcgagtgaaatagcagggttcgatgtaaggacggtttgtttaaaagggcccatgaataaattggtacaaacctgttatcagcaagtggcgttaacaactatcaatattgcttctctttatttactgcgtgagcattgttgtgtgaatgaggcgggttattcagggcacagcgctggagaatattcagcgttatttgcggcgaacgtactggaacttgaatctgtctttaagttaattagttatcgcgcatctatcatgcaacagctcgctnnnnnnnnnnaggggtaa

SEQ ID NO: 311783 - DNA, 411 bp, Proteus mirabilis
gtggttttagtcaataataaccattgggttgcgttattgacttataaagatagctgttttttatgtgattcattgccctcaagcaaaaaagatgaacgtcataacttattaattgaactagaaaaaaaaggatttaatactatcaatatagaatataatctacaagaaaatgtacctaatggatgtggtcttttggcgcttaattatattgatagtttacataatgaatggaataaatttaatcatgaaaaagaagatgatttaatatccacaatagaaacagtattacaaaaaacaggaaaagactttctaaacctaagttgtggtgagcaaaccacatttaatcatgatgttaggaaaaaattgattatggatacacttttttgtattgttaaatctaatgatgaatag

SEQ ID NO: 311784 - DNA, 897 bp, Proteus mirabilis
  misc_feature (847)..(856): n is a, c, g, or t
atgattgtgttgttaaatgtatttttagctatttatttgcgtattaataaccatataaaagatactattatgaactttttgttaattaagcatgagcctcattttcagggaatgggggccgtttcattttcatctcatgcgatttttttattactcactacacttgcttcgtttaatagcgttgcttcacaaagcacagaaaaagcatcacaaactcaacaatctgaaactgtggtgcttgatcctatttatgtttccggaaaattaaattcgagtgttgaagcaggaagcacggctttgacattaaaagatatcaatagaattcagccaaataatatcgctgaattggtagataaattaccagggatttcttcatctggctcgccaagacctggtgggcaaactttaaatatttggggaatgggcaatccggaagatgtgaaaatcactcttgatggtacaccgaagacgtttgaaaaatatcgtcaaggttccatatttatcgatcctgaattaattaaacgccttgatgtcgataaagggccacataatatcacccaaggaaatggaggattgggtggctccgtacggattgaaacgaaagatccggatgacttactgttacctgatcagcatattggtatgtttttaaaatatggacatcatactaatgataggcaaaatcgttatagtggtgcgatatatggcaagttaatggatggaacggctgacggtctattttattttaatcgtcgtaaaagtgatgatttacgtcgtcctgatggcactaaatttggttattcacaatcagatcaagattcgtttttaattaaaaccaatgtctatnnnnnnnnnngcacaaacattaactttatcagcatcaagatctgtcagtga

SEQ ID NO: 311785 - DNA, 528 bp, Proteus mirabilis
atggccgttattcttacttatgtcaatatttcccctattgtagtgatgcaacaaatgaattattcaacaggagagtattcaatattaatgacatcattagcaatgataagtatgaccatttcttttttaatgccaaaaatattaatgaaataccgctataagcatattttatcagtagggtttatatgttttggaataggtattattttcctttttatagggaaaaagagtgaaatgcgttggttttttattacctttgcattatgcggctcaggatttgcgttattatttgggattattatgagccaagcactttctccatttagccaacgagccggcgttgcgagctctgtgctgggtatttcacaattaagtttttcttcactttatatttgggtaatggggtggattgaagtatcctcaataaatatgttggtggttattttatttatcagttgtattgtaggtactctttttctatgctttcctcggttcacagaacaaaaaaaggttaaatataatgtctaa

SEQ ID NO: 311786 - DNA, 465 bp, Proteus mirabilis
atgctaacggagttccgtagtaccacacaataccttgatgttatgcgttattctgaaaaaggcttaacagacgaagataaagctgaaattcagaaaacaaccgctaacgacatggcacagttaaaaactgaattacagcaaaatatcaatcaaatttctcaagacgagaaagatgctctgccattgatgctgttatcacaagacggtaataaactgtctttaaacctgaactatgctgctgataaatttactatgaacggtaaaacttacagctttgatgagtttatggaagtaacacaagcccctcaaatgttaggtttagcggctatgttatttggtgcaggtgcttcttcttatgattatgatgactctgattatcctgaatattcagaagagccagatcaaaatgatgcaatagaagagccacaagttgaaatcccagcggcacctgctgaaaacaattaa

SEQ ID NO: 311787 - DNA, 1770 bp, Proteus mirabilis
atgaatgagagtagcagctccacaaaccagcattttattcgtaagttagaaggtattgtcggtaaaaaacatgtattaacccaagagcataaaacagagcgatatcgtaaagggtttcgttccggacagggaaaagcgctggcagtggtattccccggctctttattagaacagtggcgtatttttaaaacctgtgttgaagccgataaaattattattatgcaagcggcaaatactgggttaacagaaggttcaacccccagtggtgatgactatgatcgtgatattgttatcatcagtaccttgcgccaagataaaatacaagttctttctgaatataaccaagttattgcctttcctggcagtacattatggcacttagaaaaagtattaaagccattaggaagagagccacattcagtgataggttcttcttgtattggtgcttcggtgattggaggcatttgtaataactcagggggggcattagtgcgccgcggtcctgcttatactgagttatcactttacgcccgtgttaatgaacagggtgaagcagagcttatcaaccatttgggaattgatttaggtgacactccggaagagatattaaccaatctggataatcgacattatcatgcgaaacaaattcatgcgacggataaactggcatctgatcatgaatatagtgagcgagtacgtgatattgatgctgatacaccatctcgatttaataatgacgaaagacgtctctttgaagcggcgggaagcgccggtaagctctctgtttttgccgtgagattagatacttttcctgctgatcatcgcactcaagttttctatattgggaccaatgatcctgatgagttagaagatatccgtcgccatattctcagtcaatttaaggtattacccgttgcgggtgagtatatgcatcgaagttactacaagatggcagaagtttatggcaaagatacctttttaattattgataagttaggtacagataagatgccagccttatttgctattaaagggcgtgttgatgctgttcttaataaagtgccatttttacctaagaatctaactgatagaacaatgcaattgatgagtaagttatggcctgctcatttacctgctcgtatgacagaatatcgcgataaatatgagcatcatttaatgctaagaatggcggatagtggtatagaagaagcctcaacttatttaaaagaatactttaaacatgccacgggggattatttcgaatgtacagaagaagaaggtaataaagcctttttacatcgttttgccgccgcgggtgccgcggtgcgttatcatgccgttcatattaacgatgtggaagatgtgctacctttggatattgcattacgtcgtaatgatcgagattggtttgaaaaactgcctcctgaaatagaaaaccaattgctctataaattgtactgtggtcactttatgtgtcacgttatgcatcaagattatattattaaaaaaggtgttgacgctaaggcgcttaaagcacagatgttagccttactagacaaacgtggtgcggaatatccagcagagcataatgtaggacatctctattatgcaaaaccgcaattaaaagcgttttataaacataacgatccgacaaatagcatgaacccaggcattggtaaaacctccaaattaaaatattggggagaagagtgtggttgcgggcataatcataatcaagctgaagttaatcatatagaaaacaaagaataa

SEQ ID NO: 311788 - DNA, 1233 bp, Proteus mirabilis; identical to SEQ ID NO: 301599

SEQ ID NO: 311789 - DNA, 804 bp, Proteus mirabilis
atgagtgttcccgttttaggtcttggtacttttcgtttaaaagacgatgcggttataaattctgtaaaaactgcactagaactaggttatcgtgctattgatacagcacaaatttatgaaaatgaatctgctataggacaagctattgcagaaagtggtatatctcgcgacgcgctttacatcacaacaaaaatctgggtagaaaatttaagtaaagataaattaattcctagtttgaaacaaagcttaagtgatttacaaacagattatgttgacttaactctagtacactggccatcaccaaatgatgcagtttctgttaaagaatttatgcaagagttattagctgcgaaacagatgggattaacgcgagaaattggtatttcaaattttaccattccattaatggaacaagctattgctgccgttggtgttgaaaatatcgcaacaaaccaaatcgaattatcaccttatttacaaaatcataaagtggtaaattgggctaaacagcatggcattcatattacatcttatatgactctagcttacggcaaagcattaaaagatgaaacaatacaaaccattgctaaaaaacacaatgcaacaccagcacaaatcattttagcttgggctatgaatgaaggttattctgttattccatcttcaacaaaacgtgaaaatttagccagtaatttactcagcgtaaatatcaaattggatagtgaagataaacaagcgattgcaaagttagattgtcatgatcgtttagttagcccagaaggtttagcgcctcattgggattaa

SEQ ID NO: 311790 - DNA, 309 bp, Proteus mirabilis; identical to SEQ ID NO: 298420

SEQ ID NO: 311791 - DNA, 510 bp, Proteus mirabilis
atgtcacttcgtagtagtggtaattactatggagcggctgtaggtgttaataatgttgtagattattgtagtaaaaacagtgcgcaatggcagaattttttattcccattcccaggaagtcaagagggggagtacggattaaaattatataataaaaacgtaagtgaagaggaaaatagggaaaattatttagttgcagctatcaatggaatagtatctatcgatgcgttgtattatcagaatggattaccttccccgacaagaattaccctgcgtcgaggaaaagaaatttctagaacagaggaatattctaatcaatttgtctatcgtcacccaatgtgctggtatggtaatttatcacgtgtaagtaatactagcttgagaataagctcttattctatttatgcagtaggccatgttaaacccggtatttacgattttgtagctccaatatattttactacagctcaaacagcaacctcaggcggggctaatccagatctatcgtaa

SEQ ID NO: 311792 - DNA, 405 bp, Proteus mirabilis; identical to SEQ ID NO: 297821

SEQ ID NO: 311793 - DNA, 402 bp, Proteus mirabilis
atggtaggctcgggtaataataagaaatctatggcttatgtagaaaatattgcagctttcttaaaatttgctactcaaatagaatccggtcatcatatatttaattatatagataagcctgattttactatgaatgagttaaccgatattatctatactgcactcgacaaacgccatagtcatattaaagtaccttatgctattggattacttggtgggtattgttttgatattttatcgaaaataacaaggaaagaatttcctgttagtagcattcgtattaaaaagttttgcgcgcgtacccaatttaaatctaataatatagataaaaccagatttaaagcacctgttactctggaacaaggcatcgcaaatacagttaaagcagaatttagtcattaa

SEQ ID NO: 311794 - DNA, 150 bp, Proteus mirabilis
atgaaccaattaattaagcaaagaaataaatacaaactaaacagtgaatcttttacttataaaagtaaaaaatattcaaaagcggataaagcaacactggttttatgtgccattgttattgtttcgtttcttgtgaaagtttctatatag

SEQ ID NO: 311795 - DNA, 396 bp, Proteus mirabilis
atgaatgctgcggagcttattcaagcaagagagcaactacaaggcaatgatgatttttatcagtctaaagtggtaaagcattatcgcaatgatggtctttcatttgatgagcgcgtcagtggtatgaataaaacagccgaagttagggctgatttattaagtaagttaaataaaaatagtgatgatattttgattggtgagtttcttgattatttaagaaatgaaaataatcgtatatatcagatgatttattaccttgctgagatagaaaaagaaaagaacggaatagattatttattattaaagaggaaagataaaataaaaatcattaatgcacttcatcaaataaaagtattgagcgcattaatcccgaataaattagcaatgcctatttaa

SEQ ID NO: 311796 - DNA, 567 bp, Proteus mirabilis
atgagtgccaaaactatttttaatatcggcacaattggtgagcctggtcatgctgataatactgctcttgtgaaattaaaacaaactgccccattcgcagcactattaaaaattgatggtgttaaacatcgtcaaaaagaattagcggaatggttagaagactggcgtgattatttaatggcgtttgatgctgacggcaatgttttagatatcaaacaagctatttctgctgtccgccgtattacaattgaatcaacacgctctgctgaacatgaagatcacgattttagcgccaaacgttcagtattagaaaatgttgaagcaagaagcaaagatgttatgcctactgcattccagtttacctgcaccccatatgacgagttaaaagaacgtagtattaaattgcgttatagcgtgcttactggcggtgatgttcccgttttagtgctccgtattgtccaacttgaaaaccttgaagaacaaatcgctcaagagtttcgcaatctactttgtgatgaatttgatgaaagtgatatcgaaacattcattggtaaattttcagcgtaa

SEQ ID NO: 311797 - DNA, 567 bp, Proteus mirabilis
atgagtgccgaaactatttttaatctcggcacaataggtaaagcaggtcatgctgataacactgctattgtgaaattaaaacaaaccgccccattcacagcattattaaaaatggatggtgttaaatatcgtcaaaaacaattagccgagtggttagaagattggcacgattatttaatggcatttgatgctgacggtaatgttttagatatcaaacaagctatttctgctgttcgtcgtattacgattgaatcaacacgctctgctgaacatgaaaatgctgattttagtgctaaacgctcagtgttagaaaatgttgaagcaagaagcaaagacattatgcctgctacattccagtttacttgtactccttatgacgaattaaaagaacgtagcattaaattacgttatagcgtactcactggtgatgatattcccgttttagttcttcgaatcattcaacttgaaaaacttgaagaacaaatcgctcaagagtttcgcaatctactttgtgatgaatttgatgaaagcaaaatcgaaacattcattggtaaattttcagcgtaa

SEQ ID NO: 311798 - DNA, 612 bp, Proteus mirabilis
atgtattttcagtatggtgaaaaagagatctcttttttaaaacaaaaagataagcgtctagcctcggtaatggaaagaataggggaaattaaacgtccacttactcctgatttatttaccgcattaattaaaaatattattgaacagcaaatttctgttgcggctgccaccacggttcagcaacgtttacttaccctatgtgatggtatttatactcctgtacatattgctagtttatcagtgcaagatattcagcaatgtggaatgacaatgcgtaaagccggttatattaaaggtatcgcagactcagttataaatcatacgttagatttagaccaaatccccgctatgtctgataaagcggtgatcaataccctaataaaattaaaaggtattggcatttggaccgctgaaatgttattaatttcatcacttaatcgtcctgatattttaagttggggggatttagctattcagcgtggtatcatgcgtttatatcgccatcaaagcttagatagaacacgctttgaacgctatcgtaaacgttattctccttatggttcaacggcttcactctatttatgggcattatctaaagaaagcgcagactaa

SEQ ID NO: 311799 - DNA, 315 bp, Proteus mirabilis
atggctttacccaaccctaaaaatgcactacctaataattttatcggttttaataacagtgtgagcgcactaccgcctttaatgcctaaaattgacaagcttaatttcgcggcggctaatggccctaacattgccgcaatggataacgagagaatacccaacgtggtaataatgcccgctatcgctaaaccgatcatcgtcagcgtcttagccaattcagggttttctttcatccacacaccgactttagaaatcacacgggtaatgctttgtgatatctgccgtagcgggctatcaataccgtcaaaaatttga

SEQ ID NO: 311800 - DNA, 285 bp, Proteus mirabilis
ttgttaaaaccgaatagtgagtttgataaatgggatggtaagaactggattgttgacacagaagcccaaaaagcggcactcattacacagattaaacaggagaaatcacgacgcttagatgaagcagataatataatcacatatttgcaagaagctgttgatgttgacttagccacagaagaagaggctacagcactgcaaaaatggaaaaaataccgagttctgttaaatcgtgttgatatttcaacggcgccagatatcgaatggcctcaaaagccagtttag

SEQ ID NO: 311801 - DNA, 1242 bp, Proteus mirabilis
atgactaaaatatttaaaatcccctttgccacgcaaggggataaaacagttgtgcctgtagagatccaaacagatggctcagtatcttatactcaaggttacggttatgattatgagcgtgaccaagtcactgatccggcggcaaaagatattgaacgtgaaaaaatgaacagcctatttcacgatatcaccgagtctattggtgaaatgcaattacaaggttttgctaaatggtcagaagcgggcaagccctatgccattcgtagtgtggtttatcataacaataaggtatggcagtctaaaattgagaataataatattgagcctattgccggtaatgcatgggctgagttaaaagctgatatcaccgcgaatgaagtgggcgcttataacaaagccgaggctgataagcgttttcagccggtgggtaaatatcaagtggaaggttatagctatgcaaaagcggaatctgatactaaatatcaacccaaaggcaattatgctcctgcgggaaattatgcgaataaaggcgatagctataccaaagcagaatctgatgggaaatatcaacctaaaggcaattatcaagcttcaggagattatgccactaataccaatttaaaaaatgagcttaataaaaaatttgataagggtaatattgctcaagcgaccggaacctcaacggctcatgttattagccaaaaagccgctactgatgcttttcagccaaaagggaattatcaacccaaagggaattatgcattagtgggtgcatcctatacgaaaacggaatctgataataaatatcaacctaaaggcaattatttagcgacaggttatagttattctaaatcagagtcagatggtaaatatcagcctaaggggaattatcaacccaaagggaattatgcagttattgggagtagctatactaaagcggaaagtgatagtcgatactcgaaacaaaaagtaacaggttggaaagaactatataatggtaattggctaagtggtgagggtgttaatataaatgaagatattcgaggtaaaatagtatgggttgatcttggtggtaatcaatggagttcatttactatgcctcctatagatgatattccaatgtggtgtggtcactctgataataattggtgtgcattcaaaacatctaataatggtaaaaaaatacatcgcgcttttggtaaagggaatacgggaatagtaagagtttgtgttattagttaa

SEQ ID NO: 311802 - DNA, 282 bp, Proteus mirabilis
atggaagagcaaacagaagttactcagcccgttagagtgaaaaatgccactctacaacgcgggctaaccaatcgtcatatccaattaatcgctattggtggtgctatcggtactggtttatttatgggttctgggaaaaccatttcgctagctgggccatcgattatttttgtttacatgataatcggctttgtcctgttctttgttatgcgagcaatgggagagctattattatcaaatttagaatataaatcatttagcgattttgccggggatttatag

SEQ ID NO: 311803 - DNA, 990 bp, Proteus mirabilis
gtgctgacactacttattttgaatttagccacagtaaaattatttggggaaatggaattttggttttcgatgatcaaaattaccgctattgtctctttaattattgttggtatcgtattgattagcataaattttcaatctccagccggccacacggcaactattgaaaatatctggaatgatggcggtatgttccctaaagggatcagcggattttttgctggttttcaaattgctatctttgcttttgtggggattgagctggtaggtacagcagcggctgaaacacgtgatcctgagaaatcattacctaaggcgattaacgctattcctattcgtattattactttttatgttttggctttggcgattattatgtcagtaacgccgtggcgttcgattttggcagacaaaagcccgtttgtagaactctttgtcatgattggtattccagccgcagccagtttagttaactttgtggtattaacggcagccgcctcttcagcaaatagtggtatcttctcaaccagtcgtatgctatttggtttatcgaaagagggggaggcaccaaaacagtttagccagctatcaaaacgttcagtacctgccaatggtttactctttacgagtctctgtttatcttgcggtattgtgctaatttattttattccagatgtgatgcgggtatttacgttagtaacaacggtctctgcgttattatttatgtttatttggagtatgatcttatgctgctatttagcatatcgtaagaaacgtcctcaattacatcaacaatctatttataaaatgccattagggatagtgatgtcatggctatgcttagcattttttgtgtttatggtcgtgttattggcatttgaacatgatacccgtcaagcactgatggtaacgcccatttggtttattgctttaggaatagggtatcattttgtgaaaaagcgtaaacaaaaagcacaattaaaaaattaa

SEQ ID NO: 311804 - DNA, 246 bp, Proteus mirabilis
atgcttacattaggagtgttagaaaaaaaagatattattaaagctaaaaaaatgacaatggaagacgagagttttatcactaaacataatagaagaatgcaaaatatttttactaagaatgaaaatagtgatgaaatgaaatataccattgctaatattattagaaataattatgaggatattattgattacttaagggacgataaggattggaattttgattcattaataatccgttacacctag

SEQ ID NO: 311805 - DNA, 462 bp, Proteus mirabilis
atgaaatacgggaaactctatgccgttattacgatggtaggcatcattgtgggaggctattgggtggttaattggcaagctaataggattaattcactgacagatatcaacaaaaaactggccgtagctcttgaagaacagaagtctattaatactgattatcaagcacgcataatgcggttaaaccaactggatattcaatatacgcaggagttagcgaatgccaagaatgaaattagtcgcttgcgtgatattagcgagcgtcatcctgagcgggtgtatatcaaagccgagtgcccaaaaagcaaaaccacttccgccaccagcttggcttatgcaaccaccgcccgacctattgacaccgctatccgaaattattggttactcagagaacgaattgcagagtcagagcaaatgattaaagggttgcaggattatatcaaacaagaatgcatggaataa

SEQ ID NO: 311806 - DNA, 342 bp, Proteus mirabilis
  misc_feature (265)..(274): n is a, c, g, or t
atgtttagcacctataatattgatgttttaacagaacaaaatcatcaatatttaccaatagaaaacaccctatcattacagaatatattttccatctcttggcacccatcattatggaaatctttacccgccaagcaactccctgaatacccagatatacatgccttaaattattgcaaagaaaagcttaagcattatcccccgctaattttagcttccgaaatcagagcatttaaaaatttattaaaacttgttgcaaatggtnnnnnnnnnntcttctgcaaggaggagactgtgcagaatcttttgatgattgccaagccactattatccgtgatttaa

SEQ ID NO: 311807 - DNA, 792 bp, Proteus mirabilis; identical to SEQ ID NO: 298193

SEQ ID NO: 311808 - DNA, 369 bp, Proteus mirabilis
atgataagctataaaaaaacaatgcgttttttattgtatttaagctgcggtttattttcaaactcagtactatcatttacttgtaaagtcgcttcaacgggacaaattgtcggtgatggtgctgctaatatacgcgttaatttaacgcctcgagttgaagtaaaccagaatttggtagtggatttatctcaacaaattctttgtaaaaatgattcttatggtggacctagagatccaatagacgttgaccatgttaatttagttagtggaacgacttttggaggcgcgctgaataattttgacggctctttattatggtataacagttattatcctattcctctttattatgatcccactaaatcttag

SEQ ID NO: 311809 - DNA, 537 bp, Proteus mirabilis; identical to SEQ ID NO: 309171

SEQ ID NO: 311810 - DNA, 324 bp, Proteus mirabilis
atgctcttaactctatgtgtcattaaccaagcatatgctgctgtatcattaggggcaactagagtcatttattttgcaggtgaaaagcaagtaaaattaccagtaattaataatgatgaaaaacgttatttaatacagtcttggatagaaaatagcgaaggaaagaaagataactcttttgttattacgcctcctctattttctatgcagggtaaaaaagagaatactttaagaattatagatgcaactaacaataaattaccgaaagatagagaaactttattttggttgagtgtaaaatctatccccgctgtagaaaaataa

SEQ ID NO: 311811 - DNA, 165 bp, Proteus mirabilis; identical to SEQ ID NO: 305612

SEQ ID NO: 311812 - DNA, 822 bp, Proteus mirabilis
atggctacttatttaattggcgatgttcacggctgttatcgtgaattacgccaacttctcaatcaagttaatttcgacgccaatcaagatacactttggttaacgggggatctggttgctcgaggacctgattcacttgaagtattgcgttttgtcaaaagcttaggctcagcgttaaaactcgtattagggaatcacgatctgcatctactgggggtatttgcaaagattagtcgtaataaacccaaagataagcttaatgaattactcaatgcaccagatgctgatgaattaattaattggttacgacgtcaaccgctattacaagttgatgaagaaaagaaaatcgttatggcacacgcaggtattacccctcagtgggatttagcaacagctaaaaaatgtgcccgagaagtagaagccatattaagtagcgatagttacccccttttcattaattccatgtatggtgatatgcccaataattggtcacccgaattaactggcttaccgcgattacgctttagcaccaatgcttttactcgtatgcgctattgttttcctaacgggcagttggatatgatttgtaaagataagcctgaaaatgcgcctgcgccattaaaaccttggtttgatctacctaatcaactaccgaatgattacagtattatctttggccactgggcctctttagagggaaaaggcacccctgaaaatatctatgcgctagatactgggtgttgctggggcggtgttctaacctgtctacgttgggaagacaaacgttattttatccaacctagtctcacacacttaccataa

SEQ ID NO: 311813 - DNA, 378 bp, Proteus mirabilis; identical to SEQ ID NO: 295783

SEQ ID NO: 311814 - DNA, 819 bp, Proteus mirabilis
atgaataatagagtccatcaggggcactttgcccgcaaacgcttcgggcagaactttttaacagacagctatattattgaaagtattgttgaatctatttatccacaacccggtgaagccgttattgaaatcggtcctggtttaggcgcgcttactgagccggtgggggaaagaatggataaaatgacggtcgtcgaaattgaccgtgatttagctgcacgcttagaagttcaccctacattaaaagataagctaaccattattcagcaagatgcgatgacgattgattttgcccaattagcaaaagagcgtcagcaacctctgcgggtttttggtaacctaccttataatatttcaacgccattaatgttccatctatttagttttgctgatgccatttctgacatgacttttatgttgcaaaaagaggtggttaatcgcctagtggcaagtcatggtagtaaaacttatggccgcttaagtgtcatggcacaataccactgccaagtcattcctattattgaagtgccaccaagctcatttaagccagccccgaaagtagattctgccgttgtgcgtctgatcccttataaggaaaaaccctatccggtgacagatattgctatgttaagccgtatcacatcacaagcctttaatcagcgccgtaaaacgttacgtaatagcttaggtggactacttacagcagaagatatgctggcattagatattgatcccacagcacgcgcagaaaatatttctgttgagcaatactgtaaagtggcaaactggttatcatcacaacagcaacacgctgagtga

SEQ ID NO: 311815 - DNA, 1002 bp, Proteus mirabilis
atgcaaactaagctaaaaaaacccctcgttatcacccccggcgaacccgccggggttggtcctgacctgattatttcattagcacagtcacagtgggcacttccttgggtagtatgcgctgatcctcaattattacgagcaagagcacagcaactcaatctcccactcactttagttgaatattccccagataatccacctacagcacatatccctggccaaatttgtgtacttgccgttgaattaaccgacccttcggttgtcgcaggtacacttaatactgccaatggccactatgtggtacaaacgcttgctcgcgcttgtgatggatgtttaaacggagagttttctgctttagtcacagggccggtacataaaggggttattaatgatgccggtgtgccatttacagggcatacagagttctttgccgatcgtagccattgtcaacgagtggtgatgatgctggcaacggacactttaagagtcgctctcgccaccacacacctgcccttaagagaagttgctgatgcgattacgggtgagttgcttaatgagatcatcaccattttaaaccatgatctaaaaaccaaatttggcatctcatcaccacatatttacgtatgcggtctaaatcctcatgctggagaaggcggtcatatggggcgtgaggagatcgatattattgaacccgcattagagcaattacgccaacaaggtattcaacttcatgggccttaccctgcggataccttattccagcctaaatatttaacacatgcagatgctgtgcttgcgatgtatcacgatcaaggattacctgtgctaaaatatgaaggtttcggtcgtgctgtgaatatcacgctcggtctaccttttattcgtacatctgttgatcatgggaccgcccttgaacttgcaggtactaaaagcgcagatgctggcagttttcgcaccgcattaaatttagccattaatatgatacaaaattgtaatgaataa

SEQ ID NO: 311816 - DNA, 1311 bp, Proteus mirabilis
atgaaaaattggaaaacgctggttatcggcttaatgatcacggttggtgcagccaccagcacaaccacttttgcagcacaagaactcaaccgcgtatcggctatcgtcaataacggtgtcgttctggaaagcgacgtcaatagaatgttacaaacggtgcaaatgaatgccaaaaatgccgggcaagaaatgcctgatgagcaagttttgcgccaacaaatcttagagcgcttggtgatggataacatcatcttgcaaatggctcaacagatgcaaattgatattcctgaagctgccattgagtcaaccattcaagggattgccgcagaaaataacctgacactagagcagttaaaaaaacgtcttgctgccgatggcattgcttataacgattatcgtcaagatattcgtaaagagatgatgttagcagaagtgcgtaataacgaagttcgtcgtcgtattacgattttgccacaagaagtggactcattagctaaacaaattgaaagccaagcaagccaaagtattgatcttaatcttagccatatcttaattccattatcagaaaatccatcacctgcagaaattgaaaaagcacagcaagtggtgaaccgtattaagaaccagctaaaaaacggtgctgatttcggaaaattagctgccacttattctgccgatccacaagcacttaatggtggtaatatgggatgggcatcaattgatgagttaccgacaatctttgctaaacagcttgctaatgcacaaaaaggtgaaattgtcgggccactgcaatcaggtgttggtctacacattattaaagtcaatgatatacgtggtgcttcaaaaaccgtttctgtgacagaagtaaaagcacgccatatcttactaaaaagctcgcctatcatgaatgatgagcaagcttatgccaaactacagaaaatttccgccgatattcgtagcggtaaaatcagttttgcggatgcggctaaagagtattctgaagatcccggttcagcattacgtggcggtgagttaggatggtcaatgcctgatatttatgatccagctttccgtgacgcgttgatgcgtttaaacaaaaatgaattaagccaacctgtgcgctctaattttggctggcacttaattgaacttgaagatacgcgtagcgttgataaaacagatgcagcgaataaagaacaagcttaccgcttactgtttaaccgcaagtttaatgaagaagtgcaaaactggatgcaagagttgcgtgcaggcgcttatgtgaaaataatgaacgagaataatgcaaactaa

SEQ ID NO: 311817 - DNA, 2367 bp, Proteus mirabilis
atgaaaaaaagttatcccacactgctggccaccttagtttgggccacaatttatgctcagcctgcatatgctgatcttgcctctcaatgtttactgggagtccctgtttataataagccattagtcgaaggcgatcctaactcattacctgtcaccattacggctaaggatatgcaaggggaatacccacgcatgatccaatatagaggcaatgtggacattaaacagggaaatcaaacattaagcgcagataatgttgagttgacccaaacagaaggtgaaacaccattaagaatggtcaccgcgacaggtaatgtctcttatgatgatccacaaatcatcttaaaaggcccacgtgcttggtctaatctaaataataaagatactgatatcgaagaaggtaaataccaaatggtgggccgacaaggccgtggctacgcgaataaaatgcaaatgcgtggcgaaaaccgctataccattatggataaagggatgtttacctcttgtctacccggcgacgatagttggagtgttgtcggctctgaggttatcttagatcgtgaagagcaagtagcagaaatttggaatgcgcgttttcgtgttgctaacgtcccagtcttctatagtccttatctgcaattaccgattggcgataaacgtcgctctggtttcttaattcctaatggtaactattctcgtagttctgggtttgacttccaactgccttactattggaatattgcccctaattatgatgcgactattaccacgaattatattagtcgccgtggtttaaaattcgataatgaatttcgttatttaacaaaaccgggtcgcggtacgattgcggttgattggatccaccacgacagtcaatacaataaagataaagcagacgaaaaagcgggttatctggcgcgtgattctgctacacgctggttattctattggggtcacagtggggtgatgaacaatgtgtggcgctttaatgttgactacacaaaagtcagtgataacaaatatttcaccgactttacttcgcaatatggtaataccactgatggttatgcgacacaaaaattcagtaccggttatgctcagcaaaattggaatgccacattaaccactaaacagttccaaattttctcagataataaagatgcaagggcttatcgtgctgagccgcagcttgatcttaattattataaaaatgatattggcccatttgattttcgtacttatgcacaatttgtccgctttaccagtgtcggagaaaacacccctgaagcgaaccgttatcatatagagccaaccatttccttacctgcctccactggctgggcaagctttaataatgagtttaaattgatggcgactcattatgatcaagatattcctgatgcttataaaaataacgctaaaaatccaagacttgatgatagcgtcaaccgcgtactaccacaatttaagtcagatatgaaagtggtatttgaacgccaatatgacactaacgatattacgcaaacgttagagccacgagtacaatatctatatgtaccgtataaagatcagtctaatatcaataactttgactcagcgctattacaatccaactatagcggacttttccgtgacagaatgtacggtggtctagatcgcattgcttctgcaaaccaattaacggcaggtgttacttcacgtttttatgacagtgaactggttgaacgttttaatatttctgttggtcaaatctatttctttgagcgtcctaaaacaggttcatcgaatgaaattatcaataacaaagatgaaaccgggtctatggtatgggcaggcgatgcatattggcgcattactgatactttaggtatgcgtggtggtttacaatatgaccgtcgtttaggcagtgtctctatgggtgatgcgattatggagtatcgccgtgatagcgaccatctcttacaattgagctatcgttatgtagaccgtgattatattcaagcaacacgggttcgcccttatgatggcagtataagacaactacctgaataccaaaaaggcatttctcaaattggtgttgtcggcagttggcctttagcagaacgttggggactggtcggcgcttattactttgataccaaagattcagagccagtaagccaaatggttggcttacaatataacacctgttgctgggcggtaaacgttggttatgaacgtaaaattgttggctggaaagaagaccacagcgatattgacaacaaatggtcaatcaatttggaactcagaggcctaagtaacaatcatagtttaggtagtcaaaaaatgcttgagcgcggtatcttaccttatcaaagagcgttttga

SEQ ID NO: 311818 - DNA, 801 bp, Proteus mirabilis; identical to SEQ ID NO: 296989

SEQ ID NO: 311819 - DNA, 654 bp, Proteus mirabilis
atgatggaagtttataacccccccactgatccttggttacacgttttatatcaagatgagcatattattgttgttaataaacccagtggattgctatctgtacccggcaaagcgctagaacatcacgacagcattatgtcgcgtataaaagccgattttcctgatgcggaatctgttcatcgccttgatatggccacgagtggtgtgatggttgttgcgcttaataaagccgccgagcgtgaattaaaacgccaatttcgtgaacgagagccgaaaaaaacctatattgcccgtgtctggggaaagcttgaaaaaccacaagggttagtagatctgccgttgatctgcgattggcctaatcgacctaagcaaaaagtatgttatgaaacaggaaagtctgcacaaactttttatgaagtgttggaatatgaagaaaatgcaacgcgggtaaaactatcaccaataaccggacgctcccatcagctacgggttcatatgctagcattaggtcatcctattttaggggatcgtttttatgctcatccgcaggcaagagcactcgcacctcgcctgcagttacatgctcaggaattatttattacgcatccggcctttcattcaccgatacattttgaatgcctggcagatttttaa

SEQ ID NO: 311820 - DNA, 2904 bp, Proteus mirabilis
atgccttttactcttggtcaacgttggattagcgatacagaaagcgaacttggactaggtactgttgtggcaattgatgcccgtatggtgaccttactttttcctgcatgtggcgaaaatcgtctttattcccgccatgatgccccaataacgcgggtgatgtttaatgtgggggatactgtcaccagccatgaaggctggaagctcgccatcgacaacgttgtggaagataatggcttacttatttatcacggcgtacgtttagataccgaagagccagcacaactgcgtgaagtattcttagataacaaactcacttttaataagccacaagatcgtctttttgccggtcaaatagaccgtatggatcgttttgctttacgctatcgtgcgcgtaaatttatgagcgaacagtttaagcaagcacaaagtggtctacgtggtattcgcgcaagtcttattcctcatcagctctatattgctaatgaagtgggtaaacgtcataatccacgcattttattagcggatgaagttgggctgggtaaaactatcgaagcgggtatgataatccaccagcaaatcatggatggacgcgctgagcgtgttttaattatcgttcctgaaagcttacaacatcagtggttagttgagatgttacgtcgtttcaacctacgtttttcactgtttgatgatagccgttatagcgaatctttattagatagcgataatcctttcgaaacagagcagatgatcatttgctcattagactttgtgcgtaaaaacaaacaacgctttgaacaccttgttgaagcgacttgggatatgttagttgtcgatgaagcccaccatctggtatggagtgaaaaggcaccaagccgagaataccaagttatcgaaacgctggctgaagcgatcccttctgtattgttattaaccgcaacaccggagcaacttggtcaagaaagccattttgcccgcttacgtttgctcgatcctaatcgtttccacgattacaacgaatttattaatgaacaacaaaaatatcgccccgtggccgatgcggtaaccattttgctttcagaagatgatttaaataacgaacagcaaaatagcatcagtgagatgatcagcgagcaagatatagagccgttgctaaaagcctctaatacccaaggtgaagagcgtacaaaatctcgccaagcgcttattcatatgttgatggatagacacggtacgggtcgtctgttatttcgcaatactcgctccggcgtcaaaggctttcctaaccgactgttgcacgcaataaaaatgccactaccaactcagtatcaaaccgccattaaggtggctgagattatggcagcgaaaaagagcctcgaagtacgagcaaaagagatgctctatcctgaacgtatctaccaagagtttgaaggtgaaaatgccacatggtggaactttgatccacgcgttgaatggctactaggctttttaaccgccaatcgtcatgaaaaagtattagtcatttgtgctcaagccgccacagcattgcaattagaacaagttttacgtgaacgtgaaggtattcgtgccgcagtattccatgaagggatgtctttacttgaacgagatcgtgcagccgcttatttcgcctcagaagaggaaggtgcacaagtgttactatgttctgaaatcggttcagaagggcgtaacttccaatttgctaatcaactagtgatgtttgatctcccctttaatcctgatttattagaacaacgtattggtcgtcttgatcgtatcggtcaaaaccgcgacattgatatcagtgtgccttatcttgaaggaaccgctcaatctgttctattacgttggtatcacgaagggttagatgcatttgaacatacctgcccgacgggtcgtacaatttatgacaacgaatatgatgcgctagtcaattatcttgctcaacctaatgaactaggtgattttgataagtttatcgtttcttgtcgtaagcaacatgatgagatgaaactcaaactagagcaaggtcgtgaccgtctattagaaatgcactctaacggcggtgaaattggcgttgagttagcgaataagattgcagagcaagataacgatcccgatttggttaacttcgccttaaacttatttgatattgtgggcattaaccaagaagatcgtaatgatagcttaattgtattaacgccatcagatcatatgttagttcctgacttcccaggattaccacaagatggttgcacaattacctttgatagagagcatgcactctctcgtgaagatacgcaatttatcagttgggaacatcctattatccgcaatggtttagatttagtcttatctggtgatacaggtagttgtgcggtttctttattgaaaaacaaagcattacctgtaggtacgctattagttgaactgatttatgtcgtagaagcgcaagcccctaaacaccttcatttaactcgcttcttaccggcaactccagtacgcttattacttgatttaaaaggtaataatcttgcatcacaagttgaatttgaaagttttaaccgccaattaaatgcggtgaatcgccacacatccagcaaattggtcaatgcggtacaaaatgaagttcatcatgtactaaaagcatcagaatccttaatggaagcggaagcgaaaacgctaattgaacaagcgaagcaagaagcagacaacgcattaacacatgagttatcacgcttagaggcattacgtgccgttaacccaaatatacgtgatgacgaagttgaagcaattgaaaatgagcgtacgcatattcttaaccacttagatgaagcgacatggcgcttagatgcgatccgtttaattgttgttacccaccaataa

SEQ ID NO: 311821 - DNA, 702 bp, Proteus mirabilis
atgattaagttagagcagctttcttatacctatgagcaccaacatctgacctttaatttaacggtaaaagcgggggagcgtattgctattttaggtcccagtggtgcaggtaaaagctcattactcagcttaatagcgggttttctgccctcagagtcaggctcgttatttttaaaagggaaagatcataccaaaacagcccctgcccaacgccctatctcgatgttatttcaagataacaatctttttcctcatctcacggtaagacaaaatattggtttagggctagatccagggttaaagctcactgtggcacagaaagcactattagaaagtcgagccaaacaggtttctttaagtgattatctagagcgtttaccttcacagctatcaggaggtcaacgtcaacgagtggcaattgcccgttgtctggtacgtgaacagcctattttattgttagacgaacctttttccgcccttgatcccgcattacgtatcgaaatgctgacattattagaacaaatttgtgatgaaaaaaatctcactttactcatggtgtctcacagcttagaagatgctcataaaatcgcaccaagagcgcttgttattgataatggcaccattgtctatgatggaaatacagcgtcattaatcaaaggcgaagtggatcaatcactgcttttagggataccttttaattaa

SEQ ID NO: 311822 - DNA, 1581 bp, Proteus mirabilis
atgggtaaatggcttatcccggggctatgcgcctcgggattattacttaccgtcgcccttctctccttcggtgctttatggtttaacgcgccaagtggtgatttatcgactatttttgctgatagttacctatggcatgtggtgcgctttactttttggcaagcatttttatccgcgctattttccattttaccggcaatttggttagcaaaagcgctctatcgacgccagtttgttggcagaacgctctttttacgcttatgtgcaatgagtttagttctaccggtgttagtggcgctatttggcattttaactgtgtatggtcgcatggggtggctggctcaaatatgccaatggttagggattgattaccattttacgccttatggtttacaaggcattttactcgcacatatttttttcaatatgccactggctaccagaatgttgttacaagccttggaaagtatttctaccgagcaacgccaattagcatcacaattgggaatgaatggctggcaacgttttcgttttctcgagtggccctatttatggcgacaaatcctgcctactgcatcactgatttttatgctctgctttgcaagtttcgcgactgtattagcgctgggaggtgggcctgcggcaacaactgttgaattggcaatttatcaagcattaagttatgactacgatttacatcgtgcagcgctattagcattaattcagctattttgctgcttaggattagtacttgttagccaaaaattaaagggaacactctttgtcggtagtcatcaaaaactaagctggcgtgatcctagcgactcattaatcaataaaataacggatagtttaattatcgtacttgctatgctctttttacttcctccgttattagcggtgataagtgatggcttaaacagtcaattattaggtgttctacaacagccggtactttggcaagcctttacaacatcattaattattgcacttggcgctgggggactttgtgttattttaacgatgatgttgctctggagtagtcgagaattacgcttacgccattttaaaaaggccggacaagcgctggaaatgagtggactcattattctggctatgccgggcattgtattagcgacgggcttttttctattattaaacagcacaaccggattacctgaatccccctatcttttagtgatcctcactaatgcgcttatggctattccatatgctttaaaagtacttgaaaacccaatgaatgatattgcagcccgctataatctattatgtgcttcccttaatttgcgaggtattaatcgtctacgttggatagagctacgcgctttgaaaaaaccactatcacaagcactggcttttgcttgtgtcatttccattggtgattttggtattgttgccttatttggaaatgaaacttttagaacattacctttttacctctatcagcaaatcggtgcttatcacacacaagatggcgctgtcaccgcgatgctccttttgctgttatgtttcacgctttttagccttatcgaacgcgtttcaggaaaatcctatgattaa

SEQ ID NO: 311823 - DNA, 1014 bp, Proteus mirabilis
gtgttaataaattctcttcgttcaactcttttattcagtgcactaggtttgttcagtgcttttgccgcaaatgcacaacaaaccaaacccacacttaccgtctatacctatgactcttttaccgcggattgggggcctggtccggcaattaaaaaagcatttgaacaacaatgtgattgtgagctaaaactggttgccctttcggatggggtttctctccttaatcgtttacgtatggaagggagtaaaagtaaggcagatattattttagggctagataacaatcttattcatgcggcaaaacagaccggactttttgcaccaagcaatattgatacatcaaaactggcattacctgaaaaatggactgatgacacttttgtgccttatgactacggttatttcgcttttatttacgataaaaatcgtattactcatccccctaaaagcatggatgagttgttaaatagccaacagccgtggaaaatcctttatcaagatccacgtaccagtacccccggcttaggcttaatgttatggatgcaatcactgtatccaaacaataccgctgagcagtggcaaaaattggcgaataaaacactgacagtaaccaaaggctggagtgagtcctatggcttattcttgaaaggagaaggggattttgtgctcagttacacctcatctccgggctaccatattttggctgataaaaaagacaattatgcggctgctatttttgatgaaggacactatttacaggtagaagttgcagccaagctaaaatccagcaaacagccagaattagctcagcaatttatgcaatttatgctaacccccgctttccaagaaaccatcccaaccactaattggatgtatcctgttattgatatgccactacctgaggtctactccgttatgcctaaaccgcaaaagtcattacaatttgatgctgatgtggtagccaaagagcgccaaacatggacacgtaactggcaatctgcggttagccgctaa

SEQ ID NO: 311824 - DNA, 531 bp, Proteus mirabilis
gtgatcgatgatgatggctaccgcccgaatgtggggattgtaatttgtaatcggcaagggcaagtgctttgggcccgtcgctatggacaacattcatggcaatttcctcaagggggaattaatcctggagaatcaccagaacaagccatgtatcgtgagttgttcgaagaagttggattaagtcgtaaggatgttaaaatccttgcctccacgcgtaactggttacgttacaagttacctaagcgtttggtgcgttgggacacaaaacctgtttgtattggacaaaaacagcgttggttccttttgcagttaacaagtaacgacaaggacattaatgttcagcagagcaaaacgccagagtttgatggttggcgttgggttagctattggtatcctgttcgtcaagtcgtctcttttaaacgagatgtatatcgtcgcgtgatgaaagagttcgcaccagtagttatgccattacaagaacaagtgtctatgtctcgtccttcctatggatatcgccgtaaaaggtattag

SEQ ID NO: 311825 - DNA, 2247 bp, Proteus mirabilis
atgctgacacgtttgcgggaaattgtagaaaaagtggctatggcagcgagtctgccagaagcacttgaactattagtgaaagaaacgtgtcaagccatgcacacggatgtgtgttctatttatcttgccgatattcctcatcgctgtttctatttaatggccacaaagggattgaaaaagccgaaaggacgtgccgtcagcctctcatttgatgaaggggtggtgggtgaagtaggacgtctttctgagctgattaatctggctgatattcgtgaacatcctaattttacctatctgccacaagtaaaagaggatgatctgcgcgcttttctcggcgtgcccattgtctatcgtcgtcagttacttggggtgctggtggttcagcaaaaagagcgacgcttatttaatgaaagcgaagagtcttttatggtgacactagccacccaattaggggcgatattgtcgcaagtgcaaacgaaaggattatttggacaatatcgtcaaagccgtattaaagccctatccgtttctacgggggtagtgatggcatatggttggcaagagatgtctcagccaaccttagatcatgtttttaaagcaagtgcactggatataaaaagtgaattaaaccgattaacggtcgccttagaagatgcgacatcggagtgtcgccgttttagtaagcgctttatggcaaattcacaaaaagagagtgcggctattttcgatctctattcgcatttacttaacgatccccaattaagacaaaaaatgactggggttatacaacaaggctatgttgctgagtgggcagtaaaagtggtgatagagaagttttctgcacagttctcaagtcttaaagatagttatatgcgagaacgagcttcagatttaaaagcattaggtcagcgcttactatttcatttagatgatgatctcagtacgacaaatacatggccagatcgctttattcttgtggcggatgagcttagtgccaatctattggctgagttgccagaacaacaactggcaggggtgatagttcgtgatggtgcgactcattcacactcagcgattttagtgcgagcaatggggatccctgccattatgggggcagatattcaaccggagctgcttcacaaccgaatgctgattcttgatggttatcgtggtgagatttttattgaaccagaaccctttatcatgcaggaatatcggcaaattattgatgaagaaagagtattgagtcaacttgctgaagagcagcttgaacagcaagcggtattaaaaaatggtgaatccatcagtgtgcaattaaatgcagggctaagcattaaatatgaacaacgtattagcgttggtatagatggtgtcggtctttatcgcacagaaatcccttttatgttacaaagcggttttccttccgaagatgaacaaaaaaaccgttatcgtgaaatcttatcattttttcccaataaacccgtcgtactacgtgctttagatataggtgcagataaacagcttccttatatgccgataaatgaggagaacccttgtttagggtggcgggggatcagaatattacttgatcagccagaaatatttctgatccaactacgagcgatgttaaaagctaatcttgaatttaaaaatttgaaaatattgttgccgatggtgacaagtattgatgaaattgaagaagcgaaagcattgttactaagagcatgtgctgaagttagccgagaaatgaaatgcgaatgcattctaccacctgtggggatcatgcttgaagtcccctcattggtctttatgttaccgcaattagcacatcgagtagattttatctcgattggtactaatgatttaacgcaatatttacttgcagtcgatcgtaataatacccatgtagcactgctctatgataatttgcatcctgcattactgcgttcgcttaatattattgctttagaatgccaacgttatcagttaccagtcagtgtttgtggcgaaatggcgggtacgccgatgggggcattgctactaatagggctaggttttcgtcagttaagcatgagtggccgtagtttacctagggtaaaatacttattgcgccatctagatcctgctatcttacagccttttatgcaacaggtgttgaaagctgaaacggcaatagagataaaaaaattgtctgctgattttatggaaagacaaggattaggtggattaattcgcggaggtatctga

SEQ ID NO: 311826 - DNA, 885 bp, Proteus mirabilis
atgagtataaactaccttaaatttccagaaatcgatccagttatgttttctatcgggccagtatctttgcactggtacggcatgatgtatttgattggatttgtgtttgcattatggctagcaaaccgcagagcggcaaaacctaacagtggttggcaaaaaagtgaagtcgaaacattactttatgtagggtttgtgggcgtgtttattggtgggcgtctaggatatgttttattctataacttaccggtatttttagataatccactttacctatttaaagtctgggatggcggaatgtccttccacggtggcttaattggggtgatctgcgccatgatttggtttgctcgtcgcactaaacgtcacttttttcaagtcgcagactttgttgctccattaatcccatttggtttaggtttaggacgtattggtaactttattaatggagagctttgggggagagtcaccttagataccccgtgggcgattttattcccaggctcccgtgcagaagatctacagcttgtcgcgcaagatcccactacactattacctatcattcagcaatacggcgtattgcctcgccacccatcgcaactctatgaaatgttcctagaaggcgtggtattatttattattctgaatatctttgtacgcaaaaatcgtcctatgggcagtgtatcggggttattcttaattggttatggtgctttccgtattattgttgaattcttccgccaacctgatgcgcaattaggtttatttagcggtatcagcatggggcaaattctttccattccaatgataatattaggcattatctttatggtgtgggcgtatcgtcgcgataaagccactccacagacgccaacaacacactaa

SEQ ID NO: 311827 - DNA, 852 bp, Proteus mirabilis
atgaagcagtatctggcattgtgtcaacgcattatcgatgaaggtgaatggattgataataaacggacaggaacccgttgtttaacggtgataaatgccgatctggaatatgatgttgccaataaccaatttccactcataacaacgcgtaaaagtttttacaaagccgcgattgcggaactattagggtacttacgtggttatgataatgcagcacaatttcgtgctattggctgtaatacgtggaacgcgaatgctaatgaaaatagcgcatggttaaataatccgcatcgtaagggtgaagatgatatgggccgagtctatggtgttcaaggacgccaatggcaacgccctgatggctcgcactttgatcaattacgtaaagtggtagataacttaactaacggtattgacgatcgtggtgagatagtcactttttataatcccggagaaacagcgttagggtgtttacgtccatgcatgcatacacatactttttcattgctcggtgacaggctttatttaacctcatatcaacgtagctgtgatgtcccattagggttgaattttaatcaaattcaatgctttgtattattagcgctggtggctcaaatcacaggacataaaccaggtaaagcattccataagatagttaatgctcacatttatgagaaccaattacctctgatgcgtgatgttcaactaaaaagagagccattgccattacctaagctacatattaatccaaacattaagacattagatgatatagaaacttgggtcacgacagatgactttagtgttgaaggttatcagtgtcacgaggcgataaaatacccgtttacggtgtag

SEQ ID NO: 311828 - DNA, 534 bp, Proteus mirabilis
atggagttaataagagcaattaatgtttttaacaaattcagtaagcaaggtagaaatatcttcctcaccaaagatttaaaaatgctttttcctgatgagtctccgaaaacattacaaaaatcagttgaccggctgatcgcgcatgatgtgctacgccgagcatcaaaaggtgtatatatctatactcaaggttcattggggccttaccctttagaacgtctggccgaaaatattcgacgaggccactacaactacattagtttggaatccgctctatctcagtacggtgtaatttcacagatccccatcgacagacttacgattatgtccacaggccggtctggagagtttgtaacgccttggggcgttattgaggttacccatactgccaagaagcctcttgaaatactcaatactacggtggaaggaagggggccattaagaattgcaacaaaggagactgccattaaggatctaatgaaggttggcaggaatacacacctcatccaacgtgaggaattaaactatgtctga

SEQ ID NO: 311829 - DNA, 480 bp, Proteus mirabilis
atgacaggcaatcattattcccactctaaacatttagggagtagcttattcgaggtgcttattgttatggctatagtagcaatattgagcgctttatccttgagctcatatcatcagttgttacgccaacgccagttagttcaaagtgtaagagaagtgatggcgtttttagcttatcaacaacaacgctcactgctctttaattgcaaagtgcaaattgtattgtggctatcacctatcaataaattagaggcaaaatcgttaataacacccacaaccaaagaaagtattcaattagggttaagcaatcagcttattcgctctacagcaacacgctttacattttgtggcttacgccaaacattacgaccgatgcattttgtgctgtcaaatggtgatgaagaggtcaaaattattatctcttcattagggcgtattcgagcgtgcagtcagacaataaaggcattttcagtatgctaa

SEQ ID NO: 311830 - DNA, 285 bp, Proteus mirabilis; identical to SEQ ID NO: 294760

SEQ ID NO: 311831 - DNA, 3378 bp, Proteus mirabilis
atgttccatatttaccattcaaatcaattatcactacttaaatcactgatggtacattttatgcaaaatcggccactatcatcgccttttgagcaagaagtgattttagtgcaaagtcccggaatgtcgcagtggttacaaatccaattagcagaaagtttgggtattgctgctaatatccgttatccattacccgctacttttatttgggaaatgtttactcgggtattatcaggtatacctaaagaaagtgcgttttctaaagatgccatgacatggaaactaatggcattattgcctaattaccttgatgatccggcatttaaacccttgctacattatcttaaagatgatgaagacaaacgtaaattacatcaactagcggggcgtgtggcggatctctttgaccaatatctggtttatcgtcccgattggttgtcggcatgggaaaatgatcaactaattgatggcttgagtgacaatcaatactggcaaaaaacactgtggttggcactgcaacgctatacagaagatcttgcgcaacctaaatggcatcgtgctaatctttatcaacaatttatttctactttgaatgatgtgcctatgggggcgcttgcgcactgttttccatcgcgtatttttatttgtggtatttcagcattgccacaagtctatttgcaagcactgcaagcaattggtagacataccgaaatctatttattgtttactaatccttgccgctattactggggagatattcaagatccaaaattcctcgctcgtctaaatagtagaaagcctcgacattatcagcaacttcatgaactaccttggtttaaagatgaacaaaatgcatcgacactatttaatgaagaaggggagcaaaatgtcggcaatccactattagcgtcttggggaaagttaggtaaagataatctctattttctttctgagcttgaatatagcgatgtgttagatgcttttgttgatataccaagagataatttactgcatcaacttcaggccgatatactcgatttagaggatttttcacaaataggtcagacgcttgaggattaccaaagtagtgaaaaaaaacggatcatcgccaatgatgatcgctctttgacctttcatgctagccatagcccacaacgggaagtcgaggtattacaagaccaattactgcatctcctcgagcaagatgctgatttattaccgcgagatattattgttatggtggcggatattgatagctatacgccctatattcaagccgtatttggtaatgcgcccgcagagcgttatattccttttgccatttcagaccgaaaagctcgccaagtacatcctgtcttacaagcttttatcactttattagaattacctcaaagccgttttaccgcagagcaagtgcttgcattacttgaagtacccgccttagctgcgcattttgccatttttgaaaatgagttgaagctactacggcgctgggttgaagagtcaggtatacgttggggattagatgatgaaaatgtggcctcctttttattacctgtgacaggaaaaaatacgtgggagtttgggttattaaggatgcttcttggttatgcgatggacagtgaggcagggccgtggcaaggggtactgccttacgatgaatcaagtggcctagtcgctgagttagcagggcatctagcagattttttatataccttaagtgaatggcgaactcgattaagcgaaactcgaaacttagaagagtggcttgatatcggtcaacagcttgttgatgccttttttgacactgatgaagagacagagctggtattggcgcttatcacacaacagtggcaaaaggtgataaaaaatggtctagaggcgcactatcaacatgaaattccattagtgctgatccgcgatgaacttacagtgcgttttgatgatgagaaaattagccaacgctttttagccggaagccttaatttttgcaccttaatgccaatgcgttcaattccatttaaagcagtctgtttattgggaatgaatgatggggtctacccacgtaatattcagccattaggatttgatttaatggcagaaaaacgtcgtcgaggtgatagaaaacgtcgtgatgatgatcgctacctgtttttagaagcattaagctcagcagaaaaatacctttatatcagttatattggtaaatctattcgtgacgatcgcgaatgtaatccttcggtattgattaaagagttacaagattatattgggcaaaatttccgtttaagggaagatgcatcattaaatgttgatgacagtgcgcagcgtatcatcagccacttattaacccaacatagtcgagtgccttttgcgccagaaaactttaaaacggatgcgctatatcgctcttatgccgctgaatggttaccggcagcaagtgggaaagggactgctcaccaagcatttccaacgccattaaataaaaaaattgagaaagtctctttagatgaactatcacgcttttatcgccatcccgtacgcgcttttttccagcaaagtctaaaaacgaattttgttattgaagagaccgagctaccggaagaagagccttttgtcattaatgcattacaacgttatctattaaaccaatggttattaaaagccttaatcgaagggacatcaacagaagcactttatgaacgcattaaagcagctggaaaattaccagctagtgcgtttggtcaaatttattgggagcaacaaatagaaacgttgcaacctttagccgaaaaagtcagaagtgaacgtttagcaacccattctgtcacaatagaataccaatttaatgcgatcccattaattggtcgtttaaatgaagtacaagccgatggcttactccgttggcgacccgccacattaacagctaatgatctactgcaattatggatagaacatctcgtgtactgcttaagtggtggaactggcgaaagccgtttttatggtagaaaagagtcgcaatggtgtctatcaccggtgtctgcggatattgcgtattcaacccttgaaagattgatccaagattatcaaacagggatgaatacacctttagccttattcgccaatagtggttgggcttggttacaagcttgcttcgataaaaaaacacagacgtttttatttgatgatgaagagatacaaaacaaggcagaattggtattaacgcaatatttaaccgatagctataaccgagaaggtgaaatgaatgatatctatattcaacgtgtatttcatcagcttgatgcaccttttcttgaggcagtaaaacagaccacgttagccatatttaagccaatcattccatttataaaaaaataa

SEQ ID NO: 311832 - DNA, 2889 bp, Proteus mirabilis
atgagaaaatacttatcgcaactttggattatgttgctattgatgctagtcagtatcaacagcttcgcaacagatccactttggcaagtattgccggatagcattgaaaaaagtgaaagtgatccacgtgattatcaggctattaaattagctaatgatatgaccgtattactggtttcagataaaaaagcggtcaaatcattaaccgccgttgctctgcctgtcggtgcattagaagatccagatagccaacaaggtcttgcccactatttagaacatatggtgttaatgggctcgaccaaatacccaaaatcaggggatctgacagagtttttaaataaaaatggtggctctcataacgccagcacaaccacttaccgcaccgcattttatttagaagttgaaaatagcgccattaatgaagctgttgatcgcttggcagatgtactagcggagccattacttgatcctaaatatgccgatcgtgaacgtaatgcggttaatgcggaattaaccatggctcgctcccgcgatggaatgcgtttttggcaagtgagagccgaaactttgaatccggctcatccaagctctcgttttatgggaggaaacttagaaacattaagtgataagccagagagtaaattacaagatgaattagtgaaattctatcaaacatactattctggtaacttaatgaatggggtgatttatagtaataaatcactggacgaactcgctaaattagcggctgatactttttcccgtattcctaataaaaacacccaagcaccagtaacgacggtgcctgcgatgacagaaaaagaaaaagggataatgatccacttagtcccagctcagccacaaaaaaccttacaaatcgaatttggtattgataataatcttgccgattttcgcagtaaatcagatgaatatattggctaccttattagcaatcgtagcacgggaacactagcaacttggttacaagagcaaggattagcagagaatattagtgcttcatctgaatcctatatcgatcgcaaccaaggttcatttaccatttatgtttctttaacagacaaaggccttgctgagaaagataaagttatttcagcgattttttcttatattcaactgatccaaaataaaggggtcagtgagcgctattttaaagaaatagccaatgtgcttgacctctcatttcgctatggctctattgtcagagatatgaactatattgaagatatctccgatatgatgctgcgttatccgattaaaaatattcttaatgcagattttattgccgatgattatcaaccttcagcgatcctttctcgcctaggatcgcttacaccagaaaatgcgcgtatttgggtgattagccctaatgagccttcaaataagcaagcttattttgttcatgcaccttatcaagtggataaaattactgcgaagcaattagcttcatggcaggaattagccagcgacatctcattgtcattaccgacactaaacccttatattcctgataatctgtcacttattgatgctgatagtaacatcactaagcctcaattattatggcaagacagtcatgctcggttattctatatgccatcgcactatttttctgatgagccgaaagccagtgtgacgttaagtttagtgaacaaaaatgcagatcgcacagttaaacagcaagttatacaaacattgaccaattaccttgctgatctaacctctagtgaactggcttatcaagcttctgttgccggcatgaatatctcctcttcttctgggcgtggagtcgatttctcagtcaatggttatactcaacatttaccagagctagtaaatgccacactaaaaagctatataacgtttgaagccactcagcaagagcttgatcaagctaaatcttggtatcgtgaacaactggaagtgacgcataaccttaaagcgtatgatgctgcaatgttacctgcccgtcgcttaaatacgatcccttattatgaagaagccgataaacttaaggcgttagagtcgataacgttacaagatattaaagataatcgtcgtgatgtcattgaaaatgcagcgcttcaagcattaattatcggtaatttaacgccagagcagagccgtgagatagttaaatcggcacaagcattattaggcaataaaggaacagaatattggattggcgacacattagtttttgataaattaaatcaagttacattccaaaataaatctaaaagtaccgataatgcgctaggggaattgtttatccctgttggctatgagcgtctacaaggaaaagcgattacatcagtattatcctctatcgtgcatccttggttctttgaacaactcagaacagaagagcaattaggttatgcggtctttgctttccaagcttcaatgggcgagcagtccggtttaggctttttactgcaaagtaatgctaaaccaccagtttatctcaatgagcgttatcatgcattttatcaacaagcttatgatcgtttgaaaaagctaagtgaagctgaatttaatcaatataaaaaagccattattgatgaagtaaaacaaccaccgcaaacattttatgaagaggtttctctttatcgtaatgatttttatcgtaataacttaaaatatgatggtcgtgagaagtttttagcccaactgaataaggtaacgctaaaacaagcaatcgaattttatgaaaaagcgataattaaaccgacaggactcgtgtttgtttcacaaataatcgggaaagagggtaacaacgctgattatgcgcaaaataaacagtggaaaatctattcaaccgtgagtgaattacaaaaaacattacctgttgaggaaattaaagagtga

SEQ ID NO: 311833 - DNA, 3639 bp, Proteus mirabilis
gtgagtgaagtgatacaggcacaggtattagatccctatacacttcctttgtatcaaagacgcctcattgaggcgtctgcgggaacagggaaaacgtacactatagggttattgtatttacgattactgcttggattagggggcgagtcagcatttcatcgccccttaagtgttgaagagatcttagtcgttacttttaccgaagcggcaacggatgaattacgcgcccgtattcgtcaaaatattcatcagttaaggctagcctgtatccgtcatcaagtagaaaatgacaataacgcttaccaaatattattagatcaaatcccgaataaaatggtggcggcgcaatggctattagaagctgagcgtcaaatggatgaagccgccatttatactattcatggtttttgtcagcgcatgttagccactaacgcctttgaatctggtgtattgtttgaacaggtgttgatccaagatgaatatgagttaaaaaaacgtgtttgcgctgatttttggcgcaggcactgttatcccctttcttatgatgttgcctatgcggtaagcgaaatttggtctggccctgagcaactgctgtatgaaattcaaccctatttacaaggtgaatgccccgaaattcaaggtattgatttcgacgctaaaaaagagactgttgaacagcgccatcaagcagtcattgaggccattgataaagttaaagcactatggcgtcatcattgcaatgagattgcagattggataacttcatctggtgttgataaacgcagttacagtagtcgtttcttacctaaatggatcgatgaaatcaccgcatgggccactccactcgaaaccaaaagttatcagttacctgactgtttaagtcgtttttcgcaagcaaccctacatgaaaaaactacaaagggtgctgcgcctgagcacgctttatttgcggaaatcgaactactttgccaacaaagtttaacgttacgtgatgtgatcattgctaatgccattcctgaaatacgccaagggatagaaaatgaaaaaatgcgtcgtggtgagttgggatttgatgatctgttgacgcgtctcgataaggcattgcaacgagaaggcggcgaagcattagcagatgctattcgccaacgttatcccgtcgcgatgattgacgaatttcaggataccgatcctcagcagtatcgtatttttgatactatctatggtgagcatacagagagtggtttgctatttattggtgatcccaaacaagccatttacgcatttcgtggtgcagatatctttacctatattcgggcaaggcaacaaaccgatcaccactatacattgaatactaactggcgctcggctccgggtatggtaagtgcagttaataaactgtttttacgttctaaaaccccttttttgtttgatcatattccttttattgaggtcaattcggctgaaaaaaatcagcatatgaagtttatttaccagcaaaaaacggttgccccattaaatttttggttagctgaaggtgaaagcctttcaactggtaattatgaacaattaatggcctcgcaatgtgcgatgcaaattcgtgactggttatcagccggtgacaatcaacaagcttggttaatcgaacaagataataaaagcgctgttacatctgccgatattgtggtgctagtgcgtagtcgccgagaagcattattgatccgagatgcattagatctgttatctatccaatcagtatttttatccaatagagaaagtgtgtttgaaaccaatgaagccaaagatctactttggttactacaagcagtggtaacccctgaaaaagaacgggtgttaagagcttctcttgccagtgcactgtttggatttaacgcacaacaaattgacgaacttaatcaagatgaacagcgttggaaccgctatgtggagcaattcgctgattattttgtcttgtggcaaaaacgtggtgtgttacctatgctacgtaaagtcatgatagaaaaccaaatcgctgagaacttactcgcaagccaagcaggagaacgacgtttaaccgatatcatgcatattggcgagttgctacaagaaacatcattacagcttgatagcgagcacgcccttattcgttggttagcccagcaaatttctcgaccagatgcacaagcggaaagtcagcaaatgcgtttggaaagtgataaaaatctagtgcaaatttgtaccattcacaaatctaaaggattggaatatcccattgtttgtctaccttttgcctgtaattatcaagaacaaaagggcgcgctttatcatgatagagatgaattttacgcaaaactagatatttttaatcaacctgatagcgtgcgtcttgctgatgaagagcgattggcagaggatttacgcttgttgtatgttgcattaactcgggcgaaattttgttgttatgttggtgttgcgcctttggttaaaggaaataaacgtaagtcaggattaactgatttgcataaaaatgcgctgggatatctgttgcagcatggggaagagggtaatagtgagctattacatcaatccattaatcaattgcttgatgacaatataaaagtgatcacgttaggtgatacctcaacgcatcgatatcaatctccacacacaacgaatattgctttagatgccgccatatttaagcgaaaaattaatgataattggcgtatcaccagttattcgggattaacggcacaacactctgctcgtggatatctatttgatagtgctgatttggatgccttggtgcaatctatcgctccgggcttagataccgatgctaaaggtgagaaaacggcgcaacacagcgatgaactctctattcatcacttccctcgtggtgcagtcgcggggacatttttacatagtttgcttgaacagcttgatttttcacagcctattgatgaaagttggatgcaagagcaacttattgtccaaggttttgaggagaaatggacgccattgttggtggcttggatggaaaccctttttcataccccattaaatgcgcaaggcttatgtttagctgatattcctaaggagcatcaactcgatgagctacaattctatctgcctattgaaaaggagatgtcggcggcacagttaacagcattaacccgtcaatacgatcctttatctgcgcaatgtccagccctcaattttcagcaagtgcaaggcatgctaaaaggttttattgacttagtattttgttgggagggtaagtattatgtggttgactataaatctaactggcttggtgaatcgagtgaggattacacgcaagaggcgatgagcaatgcaatgcgcgatcatcgttatgatttacagtatcaactctatactttagcgctacatcgatttttacaacaacgcttacctgattatgattatcaacgtaattttggtgggatctgctatctcttcttacgtggtattgatgctgactacccgggcaatggcgtctatacctatctccctgaagaaaagtttgtagaggcattagatgcgctatttaaaggggaagcgcttgaggttaacggcagtaaagtgaacgtgctgggtgagaacaattcaaatgattaa

SEQ ID NO: 311834 - DNA, 1917 bp, Proteus mirabilis
atgattaaattattagaacaagcaattgcacaaaacctattgcgcccgttagatttacgttttgctcaaatgctggtggcagatgaaaatcctatcctactgtttatttttgcctatctcagtgctcaaacaggggcgggccatgtttgcttaccgttaaatatcatacaacaagataaattgtttgatggacgacacaccgagctttcacaagccatttggcaggaaatggcgcaaccatcagcgaaagaaatactggcagagcttaatcagagcgagtgtgttaatcaaggccatagtgatctaccttcacctattattctcgataacggattactttatctacaaagaatgtggcgttatgaagagcaagttgcgcaattttttcgccaagagcaacgggtggttgatatcgatgaaaatcaattaacaaacgtattaaatcaacttttcccaagcgttaaaacccatgctgaaactaactggcaaaaagtcgccgcagcggttgctattacaagccctatttcgattatttcgggtggcccaggaacagggaaaaccacgacagtagcaaagattttagctgcttttgtcatgctaacggcgaatgaaaaacccattattcaactagccgcacccacgggaaaagcggcagctagattgaccgaatcattaggtaaagcattagcgcaattggcactaagtgaagaagagttaaaatggatgcccgatcaagcgcaaaccattcatcgcttattaggtgctcagccggaaagtcagcaagttcgttatcatcgcgataatccgctacaacttgatatcttggtcatagatgaagcttctatggtggatttaccgatgatggcgcgtttaattgaggctttaccggaacattgccatgttatttttctgggagataaagatcagctcgcttcggtagaggcaggagccgttttaggggatatttgtcgttttgcggatcaggggtttagccaacgccgttttgagcagattgatcgcttaacacaaggtgaattacagaaagatcccgcttctatgacgacttctactacgccagtttcggtggtcagtgattcactatgtttactgcgtaaaagttatcgttttggctcacattcaggtattggtcaattagcttttgcggttaatcaaggacaagtgaagagtgctatgacgttactgaaaaaagcgacagtaacacaagagagcactgagcgagaaaaacataccgatccgcaggacatcgaatttatctcattagacaccgatgagagctatatgaagatgcttcaagatgttgctaaggcttatcatcactatctatcgttagtcgcacaaaaagcagcaccagagactattcttcatagctttaatcaatatcgtttattgtgcgctttgcgagaagggccttttggtgtcacaggactaaatgaacgtattgagatgctgttacatcgccaacgcttgatacgacgacctataaatagttatcagcgggagtatattgggcgaccaattatgatccagcgtaatgacagcacattggggctatttaatggtgatatcggcattatgcttaatagcgatgaaggagaaatgaaagctttctttcagttgcctgatggcacattgaaagctatccaacctagtcgtttaccgcaacatgagactgcctatgtgatgacagtgcataaatcacaaggttcggaatttacccatacggcattggtattaccgacacaattttctcctattgttagcagagaattactctatacggcgataacgcgagccaagcagaagctatcactttattcttctgaatatatggtgaaaatggcgatccagacacgtattcaacgccgcagtggattagttgaaaaactgcgttactga

SEQ ID NO: 311835 - DNA, 1335 bp, Proteus mirabilis
atgaaagagcgtagcaccgaattggtcgatggttttcgacactcggttccgtatatcaatgcacatagaggtaaaacatttgtcattatgctagggggagaagcaatagcccatgagaactttccctctatcattaacgatattggtttattgcatagtttaggaatacggttagtggtggtttacggcgctagaccacaaatcgacatggctcttgaagagcaaaaaatttctccgctctatcataaacacacacgaattactgatagtaaaacccttgaagtagttaaacaatctgccggtaccttacaactcgatattactgctcgtttatcaatgagtttaagtaatacgcccttgcaaggagcgcatattaatgtggttagcggtaattttgtcattgcccaacctttaggtgtcgatgatggggtcgattattgccatagcggtaaaattcgccgtattgatgaagaggccattcatcgtcagttagataacaatgccattgtgttaattggccctgttgccgtctctgttacaggggaaagttttaatttaacctctgaagaggtcgcaacccagctagctatcaaacttaaagcacaaaagcttattggcttttgctcttcgcaaggggttgtagatgcaagtggccagattgtgtctgaacttttacctaatcaagcagaagaacgaattcaagcattacaaactacaggcgattatcactcaggtactgtacgttttttacgaggtgcggtaacagcctgccgtcgtggtgttgagcgtagccatttattaagctatcaagcggatggtgccattgttcaagagttattttctcgtgacggtattggtacgcagattgtgatggaaagtgccgagaaagtccgccgcgccaatattaatgatattggtggcatattagagcttattcgtccattagagcaacaaggcattttagtacgccgctcaagagagcaacttgagatggaaattgatcaattcactattattgagcgcgataatctcaccattgcttgtgccgccctctatccttatcagtctgaaaaaataggagaaatggcatgtgtcgccgttcatcctgactatcgtagctcttgtcgaggtgaagtgttgttacaacgcatatcaacccaagctaaacagatggggttagataaattatttgtgctcacgactcgtagtattcattggttccaagaaaaaggctttacgcctgctgaaatcgataaattacctattgaaaaacaggctctgtataactatcagcgccgctctaagatcttaattttagatctacataaagagtag

SEQ ID NO: 311836 - DNA, 1263 bp, Proteus mirabilis
atgagtcattcagaacataatcaaacacgtcgtcgtcttattaaaggaattggcgcgttattgttattaagtgttagtcctgttggcttagcggcaacatcatcagtggttgccgtcagggtatggcctgcatcgacttatacacgtgtgactatcgaatcaagtagacccttgaaatatcgccagtttgcgttatcagcaccagatagaattgtggttgatcttgaaggtatccaactgaatagcgttctgaaaggtatggctagtcaagtgcaaacaaacgatccttacttaaaacttattcgtgtcggtcaaaataccccaactacggttcgtttagtgtttgaaattaaaacccccgttcagccacaaatgtttactttaaaaccagttgctgaatttaaaaatcgcttagtgctcgatttctatccaagtcatgcggcgacaagtgaagatgatccgctattagcgctattgcgtgaatataacgaaggggatttacaacaagctgtgcctgaacaaacggatacgcgtaagcccggaagagcaggacgagataggccgattattatcatgattgaccccggccatggtggtgaagatccgggagcgatggggaaatataaaactcgtgagaaagacgttgtactacaaattgcccgtcgcttaagagctttgattgataaagatgccaaaatgaaagcgtatatgacgcgtaatgaggatgtgtttatccccttaaaagtgcgagtagcgaaagcgcggaaaatgcaggctgatctctttgtctctattcatgcagatgcatttaccaatcgctcggctagaggctcttctgttttcgcgttatccaaaacaggcgcaacaagtaataccgcacgttacctagctcaaacccaaaatgaagcggatttaattggtggggtgagtcgaagtggtgatcgctatgttgatcacgcaatgcttgatttagtacagaccgcgacaattaatgacagcctaaaatttggtagtgaggtattaaaattattaggtggcgtgaataagctacataaaaataaggtcgatcaagccggatttgcggttttaaaagcccctgagatcccttctattttagtagagacggcttttattagtaatattgaagaagagcgaaagctcaaaacagccaaattccagcaacaagttgctgaatctattttcaaaggtattaaagcctattttgctaatggtggtgaactgacattagctgatcgaggctga

SEQ ID NO: 311837 - DNA, 531 bp, Proteus mirabilis
atgtcttatattgcaacagcaacaaataaacatttctattatctcgatgtacggatcgaagatatagatattcaagatattgcgacaggtttagctaatgaatgtcgctttaatggacagattgataatttctattctgttgctcagcattctgtgtataccagttatttagttgcacctgaatttgctttagaggccctacttcatgatgccagtgaagcttatgtcaaagacctaccgtcaccacttaaaaagttattgcctgaatataaattaattgaattgcgtgtggaaaagataatccgcaaaaagtttggattacctgaaaatatgtctgatgaagtccattttgctgacttaatgatgttagccacagaaaagcgtgatttagacattgatgcaggtagtaactggttaatgcttgaaggtattccagctagcgattttgctgtcaacccgctaaccccaagacaagcaaaatccctattcttacgccgttttaatgagctttataaagagaaaaatggctaa

SEQ ID NO: 311838 - DNA, 483 bp, Proteus mirabilis
atgagaattggacacggttatgatgtacataaatttggcggagaaggcccaattattattggtggtgtgagaattccttatgaacaaggtctactagcccattcagatggcgatgttgtactacatgcggtgacagatgccattttaggtgctgttgcgatgggcgatattggtacattatttcctgatacagatccggcttataaaggtgcggatagccgagtattattgcgcgaagccttttcaagagtgatggctaaaggttaccgtattggtaatcttgatgtcactattattgctcaggcacctaaaatgctacctcatactccacaaatgcgtgtcaatattgctgaagatctccattgtcatgtcgatgatatcaacgttaaagcgaccactactgagaaattaggttttgtaggacgcaaagaaggtatcgcttgtgaagcggtggtgttattaatcaaagagtctttatcttaa

SEQ ID NO: 311839 - DNA, 1815 bp, Proteus mirabilis
atgagcaatcaacccccattattatcaatgcttccattaacacaggagcaattgaataaattacaggatgtgacgaaagacttaactccagcccaatttgcttggctttctggctatttttgggggcaattcaatcagcattcatccactaaagatgaactggtaagtgtacaaagtcaggttccccaacaagaaaccatcaccgtgatatcagcatcacaaactggcaatgcacgtcgtttagctgaacaattacgcgataaattggttggtaatcaacttaatgttgagctctatagtgcgagtgaatataaatttaagcagatccacaaaacgacaaccttaattattattacctcaacacagggggaaggtgaacctcctgaagaagccatcacattttataaatatttgcactctaaaaaagccgcgccaatgaagcaaacggcttatgctgtactgagtctcggcgatagtagctatgaacatttttgccaagcaggtaaagattttgatcatcaattggcgcaacttggcgcgaccagtctattagaaagattagatgcagatgttgattatcaagctgacgctgataaatggataactcagctgactgatattttaaaaatacgtatacctgagcaaaatactcaagtattacaacaaacacaatcaggaacaaccgacagtgtcgataccgcacgctaccatcgtgatgcaccttttagtgccactttattaactaatcagaagatcaccggtcgacattcagataaagatatccgtcatattgaaatcagtctagcaggctctgaattgcaatatcttcccggagatgcactaggagtatggtttaagaattcggaagaaaaagtggatgagcttattaccctattatggttaacgggggatgagcaggtaaatgttaaatcacaaacattaacgttaaaagaagcattattgcatcatgttgaattaactcaaaatagtgcaccaattattaaagcgtatgcccaattatcccgccacgaagagttattatcgctggtggctgataaaagcaaacttcagcaatatgcgcaaacctacccaattaatgaaatggtacgtcaatatagtgcgcaacctaatgctcaagagtttattgatatattgcgcccattaactccacgtctttactccatcgcttcatcacaacaagaagttgatgatgaagttcatcttaccttaggtgttgttcgttataacgtcgatcagcgtgcttatacaggaggtgcctcagggttcttagctgatcaacttcaagaaggcgatacagtaaacgtttttattgaacgtaatgatcattttcgtttacctgaagataatcaagtccctgtgattatgattggcccggggacggggattgcgccttttagagggtttatgcaacaacgtgaaagtgaaggtgcgacggggaaaaactggctcttttttggcaatcctcactttgtagaagatttcctttatcaagtggaatggcaacgttatgtcaaaagcgggttgttaacacgtattgatttagcatggtcgcgtgatcaagccgataaaatttatgtgcaagataaattacgggaacaaggtcaggaaatttggcaatggttacagcaaggtgcttatctctacgtttgtggtgatgcatcaagaatggctaaagatgttgaacaaacattgttagaaatagtaatgacccatggcaataaaaatattgagcaagcagatgattatttaagtgagctacgtttagcacgtcgttatcagagggatgtttattaa

SEQ ID NO: 311840 - DNA, 642 bp, Proteus mirabilis
atgcaaactatttttgaaattatcagttttgttgcatcaattgcatctctaatacttgccattggagcgatttggttatcaattgtttttttcagaatgtctgatcaagcagctaaagaaacaaccaagtcctccgataaaattcaatctagtgtagataaattagaaaaattatttgataaattatattcagatactttttctatgatgaaagaaacagttggagacatgaggcaacatatttatcactcccctgaaaaagaaaaaacactagaagataaactaaatgaaatgaaagaaagtataaaaagagaagttaaaataactcttgatgaaaatattggtgaactaaaagaaaatgacataaaaatcaataaaatagaggaacgacttgaaagcgtaataaatcaacaagttaatgttgttatagaagaaagatataataatatagctgatgaagtacttatgcttttaaataaaaagcgacaatatatggtatttgaaatacatgaatcattatctaagaaaatcaaactagatatgcgtgaactaataacaactcttgaaaaaatggctgaactaaagctaattacctctaattctatcagaatagatatattctctatcataaagagaatataa

SEQ ID NO: 311841 - DNA, 231 bp, Proteus mirabilis; identical to SEQ ID NO: 304658

SEQ ID NO: 311842 - DNA, 1200 bp, Proteus mirabilis
atgggtattttaatcatgaaaagcttaaagcctttagcagcgctggtaggtttattggttctgtcgggatctgcaaacgcagtaaatgtgtacaacgataaaggtacacgttttgatgttaacggtcagttccgtttaaaaacgcaagtgactagccaaaatcatgaaatgaaaatgaatgatgatggtagccgtatcggtttctttggttcccatgaactgactaacgatatcaaagtgtttggtaaattagagtggggttcagatactcaaaaaaccaatagtgataaccctaaatctaattttgagatgtataaccgtgtaggctatgttggtttttctcatcgcgattatggacaaatccaatttggccgtacttatatcccgattgactgggtaaaaaaatcaagctacggctatggtaatacaggggtattttactttagtgatgtattaggccgcgctgtgggttatagcaatggttatgctgatggtaaaggggttggtaaaaacaactttatgactcgtttaccacaaactatctttattgaaacaaaccgttatgaagggtttaagcttgcaggtacgataacgggtaaaactggggatgataatactcgtactaccggtgatattactcgtgcttactccattgttggtttttataaatcaaccttcggtttagagtttgatgcgggttattctgcagctaaaggtgaagcaacccatagcagtaaaagtacggttcgaggtaaaacaccagaaaatagtatcttagcattcggtgcagaatacttcttccctggtcgcgaattctctatcggtatcgactatggtcaatctcgtgggaaaaactcaggcttaactttagcgagcaatgcctcagaaaaagattacagatggaactcagttaaaggcgattggaaagcgaatttatatggtgttggtgtgaaatggcactgggatcgtatcgaaagtggtatgtatgcgggttattacctgcgtgatggcgatgctaacactttcaactacaaaaaagaaacctatactgtgggtgtagataaacgttttgcggtatctaaatacaacaacttacgtttattcgctgaaatggcatatgatgatgctcgtagcgaaaacccagcctatgaagataaaaaacaatatatctttgaaactggtatgcgtctgtacttctag

SEQ ID NO: 311843 - DNA, 1284 bp, Proteus mirabilis
atggctcttactgatgctaaagtcagggctgctaaacctttggataaatcgtataaattgaccgatggtgatggtatgcacttgatggtacataccaacggctcaaaatattggcgtttacagtatcgttttggcggtaagcaaaaaatgttagctctgggtgtttaccctgatatttcactcgcagaagccagagagaaaagagatgccgccagaaagttaattgctaatggttttgatccaagtgaaaaacgcaaagaagtgaaagaagagcagcaaaaagaatttaatacattcgagaaggttgcacgtgattggcatgcaaccaataagaaatggtcggaagggcatagccatagagtcctcaaaagccttgaggacaatatctttgcggctattggtaaacgcaatattaccgaactaaaaactcgtgatctactcgaacctattaaagcggtagagatgtctggacgtcttgaggtcgctgcacgtttacaacaacgtgtgacagctattatgcgttatgccgtacaaagcggtttaatcgactataaccctgcacaagatatggctggcgcagttgcgacaggcaaacgagttcatagagcggcattagagcttaaacgcctacctgagttcttacaacgcatcgatgattataagggaagacctttaactaaacttgcagtcaaacttaccttgttagtcttcattcgttccagtgagctgcgctttgctcgttgggatgaaatcgattttgaaaatgccatgtggacgatccctgcggaacgcgaagcgatagaaggggttaaacactcacatcgcggatcaaaaatgcgtactactcacttagtccctttaagtcgacaagctattgagatcttaaaacagatctatcaattcagtggtaaccatgagttgatctttattggcgatcataatccaagaaaaccaatgagtgagaacacggtaaacaacgcattacgtgtgatgggttatgatactaagacagaagtgtgtggtcatggtttcagaacgatggcgtgtagttcgttgattgagtcgggtctatggtcgaaggatgcagtagaaaggcaaatgagccaccaagagcgcaactcagtgagggctgcttatattcataaggctgaacatattgaggaaaggcgactgatggtgcaatggtgggctgattatctggatgcgaataggacgaaggagatttcaccttttagttttgctaaatcgggtaatcttgtccactccccattaaagataatttaa

SEQ ID NO: 311844 - DNA, 948 bp, Proteus mirabilis; identical to SEQ ID NO: 305456

SEQ ID NO: 311845 - DNA, 243 bp, Proteus mirabilis
atgcgcccaatttttttgttaataccatttatgtttttaattggctgtaccgagcaaatgagtgtcggaattggcacttctagaacgcataatataggatatccggtttgttcaacattagtttgtggaaaaaatacgcgaacagttgaagaacaaaaggcaattaatgaagcggtgcatgaacagcaaagagctattatgcgaggagaaaaaccagatttaaaaattattgcctcatattaa

SEQ ID NO: 311846 - DNA, 894 bp, Proteus mirabilis
atggatattcgtgttttacgctattttattgaagttgttcaattaaatggatttagccgagccgctgatgctttatttattacacaaccagccattagtcgcagcattaaaaaattagaggatgaattaggcactgttttattaataagagaagtggatggggtaaaattaactgatgacggtgctattttatatgagcatgcaaagcagatcctcgctcaatttaatagtatgaataaagcattaaatgataaagatgaacctttaacaggcgccttaaatgtcggattacctcctgttatagcctcaacctattttgctgatattatcatggcgtttagctctcgccatcccaatgttgaacttaaaatttttgagctgggcaccaaacagatggaagatgcgatgttagaaggcagggtagaaactgctgcagtgatgttaccttttaatgataaagattttgaattaaccattttttcagaagatcacttgatgttattagtagcacaatcccatcctttggctaaagataagaaggttaattttaaacagcttattacagagcggtttatctttttttcagaagattttcgtattaatgatttggtacgtagtgcttgtgggatttataacactgaaccacaaattgtggggagaagtaatcatttagatttaattattgcaatggttaaagccggtgtcgggatcacactgttgcctaatagcatgtgtaataaatatcctatcgatgatttagtggttattcccattacttcccctacgttatcttatcaattagctttagccaccaatcaaaatagttatcaaagccgtagttgccaagcatggaataaattagcaatagagaaattaatgaaagagaatatttaa

SEQ ID NO: 311847 - DNA, 390 bp, Proteus mirabilis; identical to SEQ ID NO: 302855

SEQ ID NO: 311848 - DNA, 1392 bp, Proteus mirabilis
atggcactttctcaacacccagaaaaaatgaaaaaaggggtgagcgaaaattggcatcctgaagataaagctttttgggaaaaaactggtcaaaaaatcgcatcgcgtaatttatggatttctgttccttgtctactgctatccttctgcgtctggatgctatttagtgcagtcgctgtcaatttaaataaggttggctttaattttaccactgatcagctctttatgctgactgctctaccttctgtttcaggtgcgctactacgtgtcccttactcttttgttattcctatttttggtggtcgtcgttggacggctattagtacggtatttctgattattccttgtctctggctagggtttgccgtgcaagatctcacgacatcttattccacttttatcgttatctctctgctgtgtggttttgctggtgcaaacttcgcatcgagtatggcaaatatcagcttcttttttcctaaagcacaccaaggcggtgcattaggattaaatggcggattgggtaacttaggtgtcagcgtgatgcaattaatcgcgcctttggttgtcagtgtgggcgtttttgctatgtttagtggccccggtgtcgttcaacctgatggctcacgtttatggctagagaatgcggcgtggatttgggtacctttcttgcttatctttacctttgcagcttggtttggcatgaatgatctggctgctaataaagcttctttaagtcaacagctacctgttttaaaacgcggtcatctttggttactcagtatcctctatctgtgctcttttggttcttttatcggcttttctgccgggtttgcaatgttatcgaaaacccagttccccgatattgtcattttacattatgccttctttggtcctttacttggagcattagctcgccctgtgggaggtgcgctatctgataaatttggtggcattaaagtgacgcttatcaactttatcattatggctattttctcagtactcctgttcttaaccctaccggaaaatggtgctggtggatcgtttattgctttctatggcgtgtttatggtgctgtttttaactgcagggctaggcagtggttcaacattccaaatgattgccgtggtatttagaaaaatcaccattgatcgcatgaaggcacaaggggcttcagatgaagctgcgcaaaaagaagccgtaacagaaagtgcagctgcattgggttttatctctgcaatcggtgcgattggtggcttctttattcctaaagcctttggtacatcccttgcgatgacgggttcacctgctggggcaatgaaaatcttcgttctgttctatatcgcctgcgttctgatcacttggttggtctatggacgtaaacacaataaataa

SEQ ID NO: 311849 - DNA, 663 bp, Proteus mirabilis
atgaataatatgggagcagtcgcagacaaagcgactattttattaattgatgatcacccgatgttacgcaatggtgtgaaacaacttttaagtcttgatacaacattaaccgtcgttggtgaagctggcgatggtattcaaggggtaaaattagctgaagagttagatcctgatttaatcctactcgatctcaatatgccgggtatgaatggttttgaaacactcgatcaattgcgattacgatcgctctctgggcggatcgttgtgtttagtgtatcaaactacagtgatgatctgatcaccgccttaaaacggggagcggatggctatctcttaaaagacatggagccagaagagctattagccgctttaaagcaagccgccgcagggaaaatggtggttagcccaacattaacccccattttagcgcagtcactgcgagaagatcgttctgaaggtgagcgggatatagaccaactcaccccacgagagcgtgatattttaaagctgatagcacaagggctatccaataagatgatcgcacgtaaactcgatattactgaaagtacggttaaagtacatgtcaaacatctactcaaaaagatgaaattaaaatctcgtgttgaagtcgcggtttgggttcatcaacaacgtgtggattaa

SEQ ID NO: 311850 - DNA, 798 bp, Proteus mirabilis
atgctgctggtcactcaactccttattggttctgctataggtttagttatcaccacaacgggagttgggggtggtgttatcttattacctgtgcttatctatttatttggaatgaatgcattagcagcagtggcgaccgctaatttattatcgatgttaatgaaaatttcctcttcttatattcattttcgtttaggaaatattccattaaaaccagcattattgattttagggatcatgtttccggccacatttttagccagctatggggtaacctggttgggctcacaacctcaatattatgagcaggttgaattaggcattaatatcctgatgattgtggcgattatcttttcaatgttcctttttttacaacgaatattcaaaaaatccacatcatcacatccgttatcatcattggcacctagctcatcaattcctctgaattctctttttgttcccggtatgagtgccggatttgtcttaggggcaacgggggttggtggaggattggttgtcttacccgtgcttatgcgttttgcacaaatgaatattaaggaagcgatcggtagttctatatttattactacaattttgtcaggtggctctgctattgcttatagtgctggtggctataccgatgtgcatacggccatcattctttgtttaggatcacttatttcgattcctttagcgcgctatttactggtgtatttatctgagcgcttttttcaatatttaactctgttatttattctgatcagcatcattatgatgagttggaaactaataaattaa

SEQ ID NO: 311851 - DNA, 1746 bp, Proteus mirabilis
atgataacaactaaccaaaagcaacgagtgaagcatcgagtgttgattgctaacagaggtgaaatcgcagttcgtattattcgtgcttgtcaggattatggtgcaacgtccattgctatttatgcagatgatgatatagatgcattacatgtgcgccttgcagatgaagcctatggtttaaagggtaactcaccgaaagaaagttatttagcgattgataaaatcattgaaattgcccataaaagtaaagccaccatgatccacccaggttatggcttcctttctgagcgagctgatttcgctaaagcggtacagcaagcgggactcctttggattggcccagatccgcagactatcgaagtattaggggataaagttcaagcgcgtaaaattgcacaatccgtaggtgcaccattggtgaatggtaccgctgatccggttagtgatgctaaagaggttctggattttgcgaaacagtatggcttgcctatcgccattaaagcggcatttggtggtggtggacgaggcctaaaaattgcccatcatatggcagaaattgaagagctttaccattcagcggtaagagaagcagtaaccgcatttggtcgtggtgaatgctatgttgagcaatttcttgataagcctcgccatattgaggcacaaattattgctgataaattaggccatgtcgtggtagttggtacacgagattgttcattacagcgccgtaatcaaaaacttattgaagaggcccctgccccttatttaactgatgaacaacggcaacgtattcatcaatcagcaaaagatatttgcgctaaagcaggttatatcggtgcggggacggtagaatttttattgagtgcgaacgggacaatctctttccttgaagtgaatacacgtctacaagtagagcatccggtgactgaagaaacagccggtattgatttagtgatcgaacaattgcgtattgctgagggattaccgttaagtattaatgaaacccctgagcctcgtggtcatagttttgagtttaggatcaatgcagaagatccggcaaaaggttttttacccacccccggtttaattagccaatttagtcaaccggctgggccgggcgttcgtgttgatagtggtgtggcggaaaatgaccaagtatcacgtcaatttgattcaatgatggcaaaacttattgtaacaggggcaagccgtgaacaagccattgcgagagcgcgacgagctttagctgaatttaacatcgcaggtgtagccagtgtattaccttttcatcgcgaaatgatggaacatcctgattttattgataacttcagtgttcacactcgttggattgaaagcgattttcaagcaaaaaacagtcattttcctcgtagtataccagcagaaaatgaaccactagtacgtacctttattgaaatagatggtcgccgtcatcaattagcgctacccgcacaattactttcactctcggccgttatacccacggctattagcgagcacaaagagtgtcaggtgcgggaaaatgcggtcactgcaccgatttcagggatattacatagttggttattatccgatggtgataaagtcaatcaaggggatgttattgccattatggaggcgatgaaaatggaagtacaggtagttgctacctgtcatggtgtattgcagcaaaaggcgaaagccggtgactatttttcagcagacagtctattagctgagattaactag

SEQ ID NO: 311852 - DNA, 1251 bp, Proteus mirabilis
atggctacacaagatcctgtgaatacaacatcaccatcatttataaaaaataggcgttcatcattaattgcagcgatttttttaatggctacatctgcaattggtccaggttttattacgcaaacagctacctttacagcgacgatgggagcagcctttgcatttgggatattagcttctatcgtcattgactttgttgtgcaacaaagtatttggcgagtcattaccgtgactaacatgcgcgcttctgatattgcgaataaggcaattcccggtagtggatacttattagctgtattggttatttttggtggtttggtattcaatgtcggtaatattgctggggctggtttagggcttaatgccatggtaggactggatcctaaatggggtggggttttaagtgctttactggcgatttatatcttctcttcacgcaaagcgagtcattttattgatcgcatgatcattgttcttggcatcgtgatgattttattaacactttttgtaatgtttgcgtccaatcctcctataggtgaagcattaaaacaaacagtactgcctaatacgattaattttgccactataacaaccatcgtcggaggtacggttggtggttatatttgttatgcaggagcacatcgtctgctcgataaaggtacaacaggtattgaaaatatcgatgcggtatctagcgcggcaactaaagggatattagtggttggattaatgcgttatatcctatttttagcaattttaggtgttgtcgcaagtggagtgacactagatatttccagccatgcggctaatcctgcttctcaagcattccaacatgcagcgggcttaactggactacgaatttttggtcttattttatgggcagctgcgttgactagtgtgattggtgctgcttatacgtctatgtcgtttataaccgtgtttaaaaagggtattacagagcgtcaacgcaatattgctactattatttttatcgctatttcattggcaatttatatggttatgggaacagctcctgctgccttattagtctttgctggtggcttcaacggattgattttacctattggtatgacgttatttatttttgttgcatggcgtcgtcaagatcttatgaatggctataaatatccaatgtggttgcaatggtcggcaattttagtctgcgctttgacttggtatatggggatcatgtctgttggcgctattttcaattacctcaatattgcttaa

SEQ ID NO: 311853 - DNA, 570 bp, Proteus mirabilis
atggcaaagcagccagaagagtggcactacctcaatcctgaatttgacaatacaccgttagaagaggaagaagaggaagaagaggaagagatcatttgggtcagcaaaagtgaaattaaacgtgatgctgaagcgttaaagaaattaggcaccgaacttgttgagttaagtgctcaagagcttgaacgtgttcctcttgatgaaaaactactcgcttcaattaaattggcgcaaaaggtacaacgcgaagcgcgtcgtcgccaaattcaatatatcggtaagttactccgtaatgttgatgaagagccgatccgccaagcactagataaactaaaaaatcgccataatcagcaaattttagtgttacataaactagaagatctgcgtacacgtctgattgacggcggtaatgaagtgattgaggaagtggtagcgctttatcctatggccgatcgccagcaattacgcacacttattcgtaatgctaaaaaagagaaagaagccaataaaccgccaaaatcattccgcttattgtttcaatatctaaaagatctctcagagtcagcttaa

SEQ ID NO: 311854 - DNA, 219 bp, Proteus mirabilis
atgaagagctttaatgatgaaatttattggattcttagtgctgcggagcctgttggtattaacacctccgatacggtggagaagattttaaatgtggcgaaaaatcattaccaaaatggcaatgaatcagaaaagaaagccgttatagataaaatagaaagtcttaaaaaagagccgctaataactttcccagaaaactacttacagataataagttaa

SEQ ID NO: 311855 - DNA, 183 bp, Proteus mirabilis
gtggccttttttattgggtggaatatgaaaacaggaacactgcattacaaaatgacactgcgccgttatatgtatccattgtttattatcggcgctttaattaacagcatttggttagtgaagctctgctacaagaaagagattgtgtttgaaggccaagaagtggagttgagtggtgaataa

SEQ ID NO: 311856 - DNA, 678 bp, Proteus mirabilis
atggcccgtcaatttggacttggatctgtatctgatatttggttattttttacaggtataatgtcaaatgtttcttattctggcttaatgatggatgcttttgagttagataaaataaatgaactaatgcattcaaataaagaattattgagttttaccaaaagatttgtatcaaagtttgatccatctattaaagatatttttataaaagaaagtgaaacaacagttcttttgacaggaagtaataaaaagacatttgacccttggttcgtttatgatgtagatggagaggtggagtttctttcatttcataaccagtcgagtgggacaaaatctttatataagcaatcattgctttattattttgttatagagcatggttccgtacttgtgatggatgaatttgatataaatttacatccacatatattaccacatcttatagatttctttttagacgaagacataaataagaacaacgcacagttgttgtttacaactcataatactgaaatattagatattttaggaagatatagaacgtatttagtaaataaagatggtactgaaagtttttgctaccgattagatgaaataaagggagatatcatcaggaacgatcgctcaatagctaaagtttataaccagggaaaaataggaggagttcctaggttatga

SEQ ID NO: 311857 - DNA, 381 bp, Proteus mirabilis
atgagtgagatcactttaacaaatagttttaacactgtcacgaacaaaactatcgatactcagaagttattatcaatgattaacatgtctcgcaagtcatgtggtgaaaatcaaattcgtaataacgtattgattgatagagtaaaggatgaattagatggggagttttacaagatttttgtaaaaccatctggtgaatcaggtggtagaccaacagaagttattgaaatggatatcaagcaagcgcttcgtgtcacagcaagggaatcaaaagctgttcgtcgtgttttggttgataaactggaatcaatgcatgtagcttctcaaaaaagcggtaaaagccaatcaggtttactgaataccgccaagcaagaacgctga

SEQ ID NO: 311858 - DNA, 279 bp, Proteus mirabilis; identical to SEQ ID NO: 308085

SEQ ID NO: 311859 - DNA, 954 bp, Proteus mirabilis
atgcctcgtgcattacaagggattgaattttccgatctgaatttaaaaacagaatttttaggtattaaattagatacgcctattattcaggcaccgatggcagcccaagggcttgctcatcaacaaggcgaagttgccacagcaaaaggtatggcgaaagcgggctctattttctcattaagtacttatggtaataaaaccattaaagaagtcgcgcaagcacaaccgggttatccgttcttttttcagctatatatgagtaaaaacgacgcgtttaatcagtatattttatcgcaagcaaaacagtatggcgcgaaaggtattattttaacggttgattctcctgtggggggatatcgtgaagatgatattaaaaatagttttcaattcccattaggttttgccaatttggaagcattcgccaaaatcagtgatgataaatcaaaaacaggtaaaggttcgggtattagtgagatctatgctcaagctaaacaagcatttactcctgctgatattcaatatgtgaaaaagatgtcaggtttaccagtcattgtgaaaggtattgaatcacctgaagatgccgatactgcaattaaagcgggggctgatgcgatttgggtgtctaatcatggtggtcgtcagttggatagtgcaccagcaaccattgatgtattgccagccattgccaaagtcgtgaacaaacgtgttcctatcgttttcgatagtggtgttcgtcgtggctcacatgtctttaaagcgctagcgagtggtgcagatgttgttgctgtggggcgtccaattctttatggattaaatttaggcggtgctgaaggtgtgaattcagttatcgagcaattaaataaagagttaagaattaatatgatgttaggtggtgcaagaaacgtcaaagaaattcaagcaacacacctgtatacagatgctgactttaaataa

SEQ ID NO: 311860 - DNA, 1692 bp, Proteus mirabilis
atgcaaaaattaaagtttttacgattttcaaaagaaaaagtttctctttttttagctgtctatattggtttatttcttaatctttccgtttacattggccgttatggcacacagaattctcacaactccctcattgaaagtttatatatactgggtgaagttgcagtaaacattgcctttactttcttcttattacgacttatttctttttgtggcacactattttttaaaatagtcgcttcttttattctgctcattagtgtttgtgctagttactatatctctttctttgatgtagttattggctatggcattattatttctacgctcaccacagatatcgatttatcaaaagagctgattagccctaatgtgattatttggattatagggttatctattttacccctagcgctaacttggttatgtaagaaaccagaaaaaaatataactaaacagcaaaagaaaaaaatctggatcaaaaatacggtcaaaatgctcgtaattgctcttgcggtatttgcctatctaaaaaccttagattcgaaacaaaaagcctatgaaatcaagaataacttagatttgccaagctacagtggtggtttaagttacgcctatttaccgaccaactggattattcctttatttcaatatgcgataacacagtacgacgaccactttaatagccagaatatctttgatcccgcggataactttacctatataccgtcaaaagccaatgaagatgtctatgtggtctttattatcggcgagacagcaaggtgggatcatatggggctattcggttatgaaagacaaaccaatcccttattaagccaagaaaaaaatctgattgctctgaaaggtatctcttgcgatacagcaacaaaactttcgctaaaatgtatgtttgtgcgtgaaaatggtacagaaaataacgatcaacgaacgttaaaagagaacaatattttctcagtattacatcagctaggaatgacatcagaactcttttcaatgcaaagtgagctttggttttacaataagcttgatttagataactatgccatgaaagagatgatgaccgccaaaaatagtaattttggcaaagaattagatgatactttgcttattaacgaagtcgcagattccgttgctcactattctaaaggtaaccacttagtgattttacacactaaaggttcacactttatgtactcacaacgttacccgaacgcatttaaaaaataccaacctgaatgcttaaacgttgacgatgagtgcaccaaagagcagctcgtcaatgcttatgataactctattctttatactgattactttattgatggtgtacttaataccctgcgtgataaaaaagccattgtgttttatacctcagatcacggcgagtcaatttcagaaaaaggtggcttacacggcacaccaaaagaaattgcaccaccagaacaatttaaagtgcctttcttagtgtggatgtcagatagctatttagctgagcctgaaaataaacagttatttgataatctcaaacgaaatcaagataataaccggactttctatcatcataatatttttgactcgatattaggctgtctaggttactcatcacccgatggggggattaataatcaaaataatctctgttttggtgacatagctagcgaagcacattaa

SEQ ID NO: 311861 - DNA, 261 bp, Proteus mirabilis; identical to SEQ ID NO: 299898

SEQ ID NO: 311862 - DNA, 453 bp, Proteus mirabilis; identical to SEQ ID NO: 299897

SEQ ID NO: 311863 - DNA, 183 bp, Proteus mirabilis; identical to SEQ ID NO: 301406

SEQ ID NO: 311864 - DNA, 162 bp, Proteus mirabilis; identical to SEQ ID NO: 301407

SEQ ID NO: 311865 - DNA, 807 bp, Proteus mirabilis; identical to SEQ ID NO: 301408

SEQ ID NO: 311866 - DNA, 819 bp, Proteus mirabilis; identical to SEQ ID NO: 301409

SEQ ID NO: 311867 - DNA, 255 bp, Proteus mirabilis; identical to SEQ ID NO: 301410

SEQ ID NO: 311868 - DNA, 264 bp, Proteus mirabilis
atgcaaatttcatacagctactcgaacggaactcgggtagtagacggcaaaacagtcatggaatttgacgaaagtagcaaactcagtattgagacaggaagtttcactgagttggctaaattgacggaaatagactcagctgaggcaatggaatatgtactcgattgtgacgatgaatcgcttgaaaggattatcaatgcgataggcaaggaaatctttattaacaggatattgcgagtttctaagctaaggagggttgcgtga

SEQ ID NO: 311869 - DNA, 156 bp, Proteus mirabilis; identical to SEQ ID NO: 301425

SEQ ID NO: 311870 - DNA, 195 bp, Proteus mirabilis
atgaacttatgtaatgtgaatgtgacagatggtattatatctattattccttatgatcacttacgattggatcattggattggtaaaagtatgcctaacaatgcaattattacattaaaaaccaattgtagtgacgaggttttaggtgcttcaataaaaaaagcttttacacgttgtattagctgtaaagtttaa

SEQ ID NO: 311871 - DNA, 555 bp, Proteus mirabilis; identical to SEQ ID NO: 307423

SEQ ID NO: 311872 - DNA, 321 bp, Proteus mirabilis
gtgatcaccttatcgggggcgctttatccctcattaactggcggtaaagtgtcgttgctggcattagagttaatggcggatagcggtaaagcgtggtcgtttattgatggtacgggtaccattcatggcatgtttgtgatcaccgatttacaacgtacccacaccgaatttttccaagatggtgcagccagaaaaattgatttctcgctgacattaaaacgggtggatgactctatcagtcagatgttaggagatttaagcgaccaattaggcatgatggccaatagtgccggtgaagcgatgaaaggagttttatcataa

SEQ ID NO: 311873 - DNA, 177 bp, Proteus mirabilis; identical to SEQ ID NO: 302541

SEQ ID NO: 311874 - DNA, 198 bp, Proteus mirabilis; identical to SEQ ID NO: 299913

SEQ ID NO: 311875 - DNA, 519 bp, Proteus mirabilis; identical to SEQ ID NO: 299914

SEQ ID NO: 311876 - DNA, 123 bp, Proteus mirabilis; identical to SEQ ID NO: 299922

SEQ ID NO: 311877 - DNA, 432 bp, Proteus mirabilis; identical to SEQ ID NO: 300086

SEQ ID NO: 311878 - DNA, 471 bp, Proteus mirabilis
atgaaaaggaacgtactgcttattattgtggcgggtgtgatgggcttactactgatatttaagtttgatgctttgctcactgagaatagccagcttaagggtgataatctcgcccttaagaaaagtgttatcagtcatcaagacgccattgaacattatcaggaagaacttgcccgcttatcagaattggataaacaacacacaaaggcgttaaccgatgcaaaaaatgatattagccggcttaatgatgagttgcgcaataatactaaacgggtgtacatcaaagccgattgccccaactccgataatcgcaccaccgtcaccgccggcctgggtaatgcaacccccgcgcgacttaccgaaacagctcaacaagattatttacgtctcctcgaaatgatggcggagaataaggcgcaaacggaatatttgattatacaaatcaattattacaatacatcaataagttaa

SEQ ID NO: 311879 - DNA, 339 bp, Proteus mirabilis
atgaactatctcggcatgaatgcacaaaccggtgaacgtattaccgatattgagcacgttcgccagtctattaaagatatttttaatacccccattggtagccgattgatgcgccgtgaatatggtagtttgcttgccgatttaattgatggcccagttaacgccaagatgcgattgcaattaatgtcagcgtgttacaccgcagtttatcgttgggagccacgtattgtgatgacggccattgatattcatagccaacaggaacaggtgattgtcgatatcaccggctattacgcccataaccaacaaccgattaatttctctctaccggtgacataa

SEQ ID NO: 311880 - DNA, 276 bp, Proteus mirabilis
atgcatgagttaacagatccatcaattgagcaactgaaaaaattagtttctcaaatgaatggatatgcgaatgcatacgaaaaacatcttttatcttccgatgatgaaaatgcaatttcagctagaatgctcctacaaaatgtaaaacaaggtttgttatacgctgaatccttgctgattggtgttgagaaattcaatatcgatgcttgcaataaagcgcatgatgatatcagaaaaaatacattgataaccccaatgtggaacaatcctgaataa

SEQ ID NO: 311881 - DNA, 417 bp, Proteus mirabilis
gtgccattcggaacatatgcccgtgtttattttccagaggaggaaatcagacaatttgctgagaaagccactaatgccattatcgcctgtttagaatggcaagatactttgtcactcgttgatttcggtgatggtgtttattgtgatcctccatatatgggagatgaaggtagttttactaaatatcatcacacggattttactcacgctcagcaaattgagttagctcaagcattaaaggcattaaatcaatcacaaggtaacccgattactgtctctaattccattcacgccaaagagctgtatgccgatctcggttttattattcacgagattgatgcacctcgttctatttctgcaaatggaaatcgccaatcagcaaaagaaattatcgccgttttgccggaggtgtgctga

SEQ ID NO: 311882 - DNA, 240 bp, Proteus mirabilis
atgtttaagcgtttagccactgcccgttatttgcgaatgtcagcaaatgataaaggtgtcacgctttcttttgctccgcaagtggcgggtattgctgctgttcatcattacggtttaaaagagcgtgtgcgaggtaagttattagaaattcaataccctgaacgaaagttgttaggcttttcaccggcagatattaaacatattgaaaatcaattactgacatttctcacaaatcactaa

SEQ ID NO: 311883 - DNA, 345 bp, Proteus mirabilis
atgaatatcgcagaacttatccgaaaaatacaaaacttgatccgcactggcgttgttattgatgtcagtgcggaaaaaggctgtcgagttaaaacgggcgacaatgaaaccgactggcgcccgtggctgactgcacgtgctggtaactcgcgctcatggtgggcgcccaatgttggcgaacaagtgttattgctatcaatcggtggcgatttaactacctcgtttgtgttgccggcgatatttagtgatgatttttcagagccgtcaacctcattaaccgcgcatcgtcatgagtataaagacggggcagtaattgaatatgagccggcaacacaaacgaggtag

SEQ ID NO: 311884 - DNA, 348 bp, Proteus mirabilis
atgaaagagccaatcgaagaacaaagcaaagagcaagttgagtgggttgttattaatggcgaccaagccacggtgaccttagaacaaccgattatgcgtggtgaaaccaaaatcgacaaagtgaccgtgcttaaacccaattcaggtgcattacgcggtgtgcgattacaaccgttaatggatatggatgttgatagcatgatgcaagtcttaccgcgcatcaccatgccaacactgacaaagcaagatgtgctgtctttagccgcgggcgacttggtaaatctaagtgtgcaggtggtcaattttttattaccgaagtcggttatgcccgattccccagcgaattaa

SEQ ID NO: 311885 - DNA, 516 bp, Proteus mirabilis
atggcgttaccacgcaagctaaagaattttaatttatttatgaatggcgccaattatgtgggcgttgcggaagaactcacattacccaaaatcacccgcaagttagaagcctatcgcgggggcggtatgaatggttcggtgcaaattgatatgggccttgatgatggtgcgcttgatagtgagtttaccctcggtggcgctgatattgatgtttaccgtcaatggggtgcctcaaccattgatgccgtacaactgcgtttttgtggtgcttatcagcgtgatgatacgggggaagtgcttgctgtagaggtggttctgcgtggccgttatagcgaaatcgatccgggtaactggaaatcgggtgataacacgcaaactaaagtcaccgtaaaacccacttactacaagttagtgatggacggtcaagaaatcattgagattgatatcgtcaatatggtggaaaaagtggacggtaaagacctgttacaagcacagcgtgacgcgctggggctttaa

SEQ ID NO: 311886 - DNA, 246 bp, Proteus mirabilis
atggcggtgatcattggttggattgaacaacatcagcctgatattttccttaatcccgataaacgccaaagtcattttacctttgatgcctttattgatagcaaccagaccgccagtattagcattgatttaaagttgactgagcgtgtcctcgttaatgtgcaagcggataaattggttgttggtgccattgaagagccggctgatccgtttgaaagttgggagagtgtggctcatgaacgctga

SEQ ID NO: 311887 - DNA, 636 bp, Proteus mirabilis
atgaacgctgatgatttcagcccgttaacccaagcattagccgctatgttggcaaaagcgtcacccaatgaacgtaaaaaattagcccgtgaaattgcccgtgatttacgcaaaagcaatttacaacgtattcgagcgcaaaaaaatcccgatggaacggcattcactaagcgtaaagcctcaacggttaccgtattgcgaggaatgaaatttgtctggaaagggcaaccgcgcagtttaaaaaattggcgactacgcaaaacgaaaaagggcgaggtgatcaccggctatgatttggaaaagaaagccgaacgtagtttttataagcgcgatattttacgttttattgaagtaaaaaaagacaaaatcagcacttcaaaacccaataaacagactcgcatgtttaagcgtttagccactgcccgttatttgcgaatgtcggctaatgataaaggtgtcaccctctcttttgcccctcaagtggcgggcattgcggcggtgcatcattacggtttaaaagaacgtgtgaggggcaagtcattagaaattcaataccctgaacgaaagctattaggcttttcaccggcagatattaagcatatcgaaaatcaattactggaattcctgtctcgttaa

SEQ ID NO: 311888 - DNA, 423 bp, Proteus mirabilis; identical to SEQ ID NO: 309890

SEQ ID NO: 311889 - DNA, 246 bp, Proteus mirabilis
atggcggtgatcattggttggattgaacaacatcagcctgatattttcctgaatcccgataaacgccaaagtcattttacctttgatgcctttattgatagcaaccagaccgccagtattagcattgatttaaagttgactgagcgtgtcctcgttaatgtgcaagcggctaaattggttgttggtgccattgaagagccggctgatccgtttgagagttgggagagtgtggctcatgaacgctga

SEQ ID NO: 311890 - DNA, 618 bp, Proteus mirabilis
gtgcgccggcgctcatgcttcctgctcggtcttgccgatgttcgccagctcgcgcttgatggccgtctggtcaagcattttgagaggcagattcacgaacaggcggacgcggttcatcatgtgccggaaggtttgttcgaaggcccggcgcttctcggcgtcagtgccttcgacggcggccgggtcttcaaatccccaatgcgccgagatcggctgaccaggccacaccggacacatttcgccggcggcgttgtcgcagacggtgatgatgaagtccatcttcggtgcgtcgggcgtggcgtactcgtcccagctcttgctgcgcagattctcggtcgggtaattcaccgactccaccttttcgacggcgaagggattgaccttgccggttgggtgactgccggcgctgtaggcgcggaagcgcccttgccccatcgtgttgatgagagcttcggccatgatgctgcgcgccgaattgccggtgcagaggatgaggacgttatagattctttcggtcatgatgtttcgctttctggtagtggctggggagcaatggcgatggatgaaagatcggtggcctcgtcgatgacgtggccggccgctttccgttcggaatag

SEQ ID NO: 311891 - DNA, 462 bp, Proteus mirabilis
ttggcaggggggataaacttatatgcttatgcgccaaatcctttaagttatattgaccccctcggattaaaaccatgcgcgcctactagtgaatttgaccgtataactactgggaaagtttatagagtcattaggcccgatgaagatcctttatccgggttattttcccttaatccaaataatataaaatctgttgctgggcatgtaacatcaggcagtcgctctccatctcagtttatatcagcaacaaaagatttaagcattgctgaaagatgggctgcgaaatcagggaatcgtattgttgaaatagacttgcgtaaaatttctggtggcgcaattgacatatcatcccctaaaggactagatctcttaggtaatcaatttgcaaggcggctggcgaaaggttcttcagaagtgttgtttgacggtcccattccagcgggtgcgattaatcctctttaa

SEQ ID NO: 311892 - DNA, 246 bp, Proteus mirabilis; identical to SEQ ID NO: 311886

SEQ ID NO: 311893 - DNA, 255 bp, Proteus mirabilis
ttgatacctgaatttaaagtttttgccgaaaaaataggattggatttaccgcctgactcaatgtggtcaatggtgatgaatggtatgcgccttagttatggcgatgaagtgatttggtttgaaaacgggaaaattcaaatttcatcaacgaaaagcgaaaacgttaattttgaagaagtgaagcaaaagaatatctcaaatacacgagatagggtaatggctaaggttaatcggttgaaaaagttaactatgtga

SEQ ID NO: 311894 - DNA, 306 bp, Proteus mirabilis
atgacacgaatggacgagaaagataaattcagtgccaccgcatggggtgtcatattcgctatctccctatacggcggattggctagatacattattgataataaacgtaacggttatcggtggagctgggtaggagcaattatgcaaatgttcgtatctggctttgctggaatgatgggtggccttatatcaatagagcttaacgcctcattctactacacgttatttacggctggcttatgtggttccgctggctctttagcattggacttcttctgggataagtttacagggggtaagaagtga

SEQ ID NO: 311895 - DNA, 948 bp, Proteus mirabilis
gtgaagaataacgcattgatttatgaaaattttggcgaccctagatcaacaatcaaattagttcatacgcatatagcaccagtgcctcctaatttattaagagttagggtgctgttatcctcaattaatccatctgatctaataccaataacaggttcttattctcacagaataaaattaccatcagtcgctggatatgaaggagttggagaagttataagtgcaccagaacagtatcgaaatttagttggcacaagagttttaccactcagatctggtggcacttggcaaaattatatagattgctctccatcatgggtgatatcagtacctgatttcattactaatgaagttgcttgtaaagcatacataaacccactaactgcatattcaatgctaaaaaaatgggaccctcaggggaaaataatattgcttacaggaggtggaactgaatgtgctcagataatagggcaatgggcattagaaatgggtgctcgaaaggtaatttcggtatatcgatccattgtacactgcgatattttagaacgcttaggctttattcctatttctgaaaattcaatcttagatataattaggttattaaaaaaaactgatattgtttttgactcgataggtgggaatatcggctctattattattaataatatgagattagatagtatttttgtaacatatggattgctttctggtatgccgctaactattaatagagagcgatatagaatggtgaagaactttcatctaaaagatgttataaaaaccttagaccaatatcaatggaaagatattttttataacttatggcctcggttagttgaaacagaactacatactttaaaacattttagattaaatgattgggaaaatgcgttagaatattattcatcctcaggaaggcaaacaaaactagcctttgatttaacctaa

SEQ ID NO: 311896 - DNA, 261 bp, Proteus mirabilis
atgattaattttgatgaatataacgtaggaagtacccaaccattgattaggcagtctgatattaaagaaatatacattgattttcctaatgatttggtgttgttagatctttttgaacgcgatgttgatattatctttactaagataaataaaaatattcaaaaaataaaaactctagaaaaacttcgcgacactttgcttcctaaattaatgagtggggaagtacgcgttaattatacaccagaagaaataaaacaataa

SEQ ID NO: 311897 - DNA, 441 bp, Proteus mirabilis
atgaaaccaagaaaatgtatttactatacacctgaacagaaagcgattatttgggacagatataagcaaggtgattctttacatgagatcgccagaatgtttgatagataccattcttctattatgcccactatttatcaaacgggtggcttccgtcctcccgtccgtaaacgccacagattatcgctttcgcttgatgaacgagaagaaatatcgagaggattagcagaaaagtacagtattagggagatagctaaaaagatatcaagagccccttcaactgttagtcgtgagatccgcaggcatggtggattaaccaactaccgtgcagcaaaagcggataaaaaagcatgggataatgccttgagacctaaagcttgtaagttaagtcaaaaccctacatttagtagaacgccattcacgttatgttatgctagctaa

SEQ ID NO: 311898 - DNA, 1152 bp, Proteus mirabilis
gtgaatctacagcctaaatacacacaaaaaccaattggtagtatcgaagctttagctaatttattgaatttaacattatatgatcttgaaaaactagttctatcatcaaacgatgactatatcgttgctaatataattgagaaagatgatggcagcctgagagttacatacaaagcgaaaccaaaacttcgcaccgctttagattctataaaatcaagaatttttgataaagttgaacatcctgactatataacagcaggacaaataggaaagagttatgtcgataatgcaaaagttcacattaattcacgcatgctaatgtctgaagatataagaaatttttttccatcaattagcatcaaagaagtaaaccgtatttttcaacactttttttgtttcccccctaaagtatcgaatatacttagtgagttaagtacaaaagaaggctttttagtccaaggaagtcccttaagtggtgaaatagccaatcttgtattctatcaaaatgaaccaaaacttgttaaatattgccaagagcaaggtctacgatatacacgttactacgatgatattcatattagctctgatgtaaaagacttctatgaattaattcctcacctaaaatcagagatctatcgaattttcgggaaatctggagtgaaacctcatagatcaaagaaaaaaagccattttagtacatgctcatctcggctttctgtgcacgatgttactgttaattcccaaaagactaatccatctcaaaaaagaatatctcaagtaaggcaattattattcacatatgagcatatggtagatagtaatttagatataaccgatattattcaaaaataccgttctattctcgggcacataaatactcttcaacagcaaggttactcgcaagcaggaaaattaaaagaacaactattattcataacttgtaaaataaatgagtccgaagcaaagaaatacgctagaaaatatcgtaaaataaaatccaaaaaagaattaactcaatttagttcaaaagtatcaattctaaaaagaattagtggcagagtagctatggttataaactcagaaaaaaaatctgccaatgatagaatcaagaaaaaacaagctcgtagttcaaatataatcaatattaactag

SEQ ID NO: 311899 - DNA, 288 bp, Proteus mirabilis
atgttatctatcggtaaaaccatcaaagaattcagacaattacgtggattgtcattaaatcaggtagctgaagaagctaatatggataagtcttatctatccaaaatagaaaatgaaaagagagatccttccttatcatcactatctcgaataagcaaagcacttaacgttcctttaaatatactgattttgatgtgtgaagagccatcagataatccgttctctgagttcacagaaagcctgaaatcaatagcgagagaaatagtaaaaagtgaatctacagcctaa

SEQ ID NO: 311900 - DNA, 219 bp, Proteus mirabilis
atgaacttgaaagaatcgatcgagcgtcttaaagaggctcgtgaaaaatgcgttaatacagtagacaaaagcacacttgagaaaatcgataattctatcgaagagcttgagaatatgagtaaagaggcaagtaagcccaacaaaatgaagtggttgtcagtaattgttcaggtgttgagcttgataaaattggcggctggtttcattgacttggagtaa

SEQ ID NO: 311901 - DNA, 1044 bp, Proteus mirabilis
atgattgaaacagaagaaaaagcgcaatataggcttggtgaattttatatccctatttggaaatattccgatatgtctgtatccaacgctgttagcctatttcgagaaaattggcactcatattccttggagtccaaaagtcataatataattacactgattgaaaaaataattgatcccgctatagctgagtatttaattactcttccaaaaacatacttacgctacagcccaatatcaaaagaaaacttaacctatagtgagctaatcaaactaaaaggtttccattttgttatcgaccaaattcatatttatctgcgtgattttattaatcattgcacatacacagaacaagatcttttatttatttcgactcaggatatgcttaaagagctattttctctttgtgaagaaaaacgacctaaaagaactaaattagctcctgacattcatttaaataccgaaaggaaaatgaggctttgcgcctgttgtgggaacctaacagaattttccatgtttattagtacatgggaaaaatatggtactgttgaagatgatgaatacgacgactatgagaaagagggaaaaaaaaagcgcccagacttgagccatacatactgcttaaatcatcgaccaaaattacatgatggctcatggaacgccatgtataagcaagccatacgctctaaagaacaatttgagcaagaacttctaagactccgatgccaaatcgctcatcctgatcgctataatgcaaaatctggtgataccctaattgatgagtatttttatcattatatgtttgattcaccactcgcccccaccaatgtagctgaacttcgcgatttggcacgaagaatggttgactcccgactgactgataacaaaaaacgtatgcttgttctccgtaagcaaggtttgtcaaataaacagattggaataatgctaggtgaaataaaaggtaagccattgtcaaatcaggcaatatccaaggctttgagaacgattcgagaagagtttcagctagaaatatcaaaaaattaa

SEQ ID NO: 311902 - DNA, 786 bp, Proteus mirabilis
atgacgataactggtaatgtggttgttccaacaagcacagttttacaggcgagagtggttatttatcagccgagtaaaaagcctttagagcgtaaaggtcagtggattgagacttcatttggcaagtgcagagtgacaggaagactcggtcaacgtcacgctgacattgttgaaagtatgctttttgtggcagaacgtaggcgagacataaacgatggcggtatagagttactggtcgatccagcaaaacttagaaaaatgctatcagaccatcaatatagcgggggaagattaaataaattacttcttgagcttaaggctgcaacaatcgaaattgtgacgcctgagttggagcaaataggagaaagtattattggtggtttaattgaccatgttatttcatcaccaatgactagatacaacccgcttacaagaggaactcgtagattatggaaagttagattaggcatcgcactggttatgttactggagcgtgatttgtctttatattatcgacctgaattaattgcacgactgaaacatggtattagccaagcggtggctcgtcatgtgctgacacataaaaataatccccctggaggttggtatcttgatacgctgctagttgcagttagtggtaatgatgtgaatgcgaaaacaatgagtaattatcgaaccagaattaaagatgatattgagagattacgtgagataggtgttgatattagctcggtaaatcgagttaaacgcctcacaggggcccagttgaaactcactgaggcctga

SEQ ID NO: 311903 - DNA, 1269 bp, Proteus mirabilis
atggtgaaaaataaaactctgtttaaatcactcctcacaatccccgttaaccaccataaacgtacaacgttaaaatggttaggcggtagtttactgcttgccagtatgggcgcaaatgccatcgaaaaaaacaagtgttcaccaacacttcgttatcaacgtgctattaactacttaggaaaacatcaagctggagttatcacgccagaacaaaagcatgcttcatttattgcacttgatttaacagtaacaacccctgaggaagtagaaaaaattttccgaacgttaacacagcggattgcttttttaacacaatctcgtgaacttaaagaaagtcataatcctcaccttccccccgcaggatccggtattctaggtagccaattatttcctgatgaattaaccatcacagtggcgttaggggatagtttttttgataatcggtttggttttcaagctcataaacccaaacgccttgaagcaatgaaacccttccccaacgatcgcttagatcctaaatggtgtggcggtgatctgttacttcagctttgtgccaatagtcaagaaagtatcatttatgcattaagagatattttaaaatatctttctgggcaagtgcatgcacgatggaaaatagatggttttctacctgctcgtgatattgataatcaacaaacgccaattaatttatttggttttaaagatggcacaggtaatgcccctgccactgacactcatttaatggatgatttagtgtggatcaccgataaacaaaatgaaccgcagtggtgcttaggaggtagctatcaagcggtgagacttattcgttttgccttggaattttgggatagaacacctcttgaagatcaggagaataactttggtcgtcatcgtgcaacaggcgcgccgataggaatgaagcaagaaatggactcacctgaatttgcacaagatcctcatggcgacaggatactctttgattcccatatgagacgagctgaacccagaacccccgaacgttatagcgccaaactgcgtcgtcgcagttatagctactcattagggctaacaccgtcagggcaattagatatggggcttgtctttgtctcatttcagaataaccttaaaaaaggctttattgatacgcaaaagcgtttaaatggtgaaccgttagagcgctatataaaaccttttggtgggggttattacttcgtattacccggcgtcacacaagcaagcgatatattagctaaaggactatttacttaa

SEQ ID NO: 311904 - DNA, 210 bp, Proteus mirabilis
gtggatgtcggattcccctgtgcggtattaatcacaacaatagggcatattggtatgatggattcgatgggaggaaaaacaattagggtaactctttgtggacggggtaaccgtattatccctcattccatgatagtgtccggacagatgtccacaacctcattaggtaaacagtatttttatattgatgtgagggagtatggtgggtga

SEQ ID NO: 311905 - DNA, 3120 bp, Proteus mirabilis
atgtctggcatattcttgacacgcctttcagctaaagtcagagccactctcaaacggaatcttaaaggtaattcggtgtataaaaaacatcactggagcttacttgaaagcgcgcaggcttactgctccactcattatctgaaggctatgttattgctctgggtaacagcagttagttctgtcattgttgcggaatattttcgcccagaatttcattcttttgccacttcctatctgaaaggcgtcacggagctaccgacatggatgtcgaacctactaggtggccagctgacgatgatcgggatcgtgtttccactggtggtgggccttatcagcgtgctttttcagaaaaaatcgtcccgcatacatatccaatctgcctatcaattgcattcgggttatatgtttgccggactcagtgggctgtcactggctgcatttatagtgattggtggactgttttcatcagatggcgataaataccggacaactgcttttgccattacagccttaatttggatgctgttcaatattgtactatctatatggttttttatttcaagtttgaatattcttgacgataaaaaacgcgaccgtcttatgataaaatattttcaggcagagattgtcgaaaatttcattcttcattcacagataaactcatggcttcagtacccaggaaattatatcgataaaaataacattaatggtattgagatcctccgctggtatgatccagatgaagataatatgaagttgttaccctatcatttaggtgagggagaagacgttattgatatccggatatggctacttaattttctgttacgatttctgcgaccagctaacaacagtgaaagcaaaatgattttactcccatccctaggacgtaagcaagatacaataactctgctcgcatctacggatgtgatttttccctgttggtggacgtttttgttcaaaaggtgctttatcagcggttttaaaaaaaactggaaagaataccgtcacatcactcgtgatttttatggcgaagcctacgatgctctggaagacaggaatattagtaccttcatcagtgccacagaccgattggtagatacctacacaacattgaaaaaaagtttccagtatgccaacggtaactatattgatgaatgtagtgatacaggatttatggtgacattcagccagtcattccatcgagacttctactcattcagtcatgttactgtaaaatcactggaaaccacagaggaatattttcgtaatgtattaaccattcccttctcggtatatcgtaacgctgacagccgccagttgggcgattttcagcaatatattcagtctcttttctatgtctggcatgcactgatagactggaaaacagggtatggagaatatctaaccgtcggccaggagttacgtcacagggaacttgttataaattttatcggtgaatgggaaagctggtacatgtggcgacatattcataaccgtaacagagaacgatctgatagtgactcggcctgcctgctatctcatcttttttacactgctcagacagtcataacagcagtcatgaaagacgaccgttttgcctcagaacacagctcagatatgctgttactctggtttggccggaataaccttgacaagcatattgacgaatatcgatggcacagttttttcatcacgccagatttaacgcagacacctgaagggccggactggcaggctgtactgcgaggtaatgagtattcagaaaataaaatgttgtatacagcattttataatgcactgactgacgtgcgtttattgactgctagctatattatttctcatatcaggcagaaaaagaatgtcccccttaaaaacgttgttaagcgactcctgaattcaaaacttgtctatcctactggcgcacacgatcgcatgacgccgccatttaagtcggccactgatattattgatagcatcatcaggctggaatatcggaacaatgatcatgagaacggttggtacgaagcactgtccggtctcataaaaaacttttctgcctttaatgaaaccgaaactataactggccgcatttatatgggaacttatgaagatgtagggaatttgtacagcagttacgctgatattgctttttatctttccgctcagccacagtctgttagtcgacgcgtacaggatgcgctgaatgacaatctcttcacgtattacagaaaggaacaaattataaaacagcttcaggggatgaaacgccgtgaagacaatacttcagatggatatttaatgtctgagatagattttaaagcaaaaattatttctttcaataaaaccctcgatgcctatattctggctttcagccagagtcagcatgatgaacttcttaacgcagagattgatacagaactgctgaaaaatactgatcttactcttaccaacaagctgcccgaaatgctcgctcaggatgctctgctttctcttttttcttacaacaactctgagagcaaggaactgccatggacaacccggtcggttcacggaaccatgcctaaagatatcattgcccaggggatcaacagcaatatttacggagatctgatatcggtttcagacgtcaaatattctctgcttcataacgttcaccatggtctgaatcaattgttaactctccggaccgaaatcgttcacaacgcggaggaactgctgaagcatttacgagagatgaccgtcgataatgacgactttacactcatattcttcggaacccgtctgagtaaggagctgcatgaactaacttaccaaacggacaggcataaggaactgggaattacactggacagttcgtcgcatctagatggcctgatgccaatcaggatcaattgctgtggcatttatcaggaatggaactctgagaaatgttattccctactcatccggaacagtatcttcggtaaccttcacctgctaggcgattctaatggcttgatttttagctcttcatggcaggtagacagtcaaaatcccctgactgtctcagtgactacgagctggaaccaggtgctggaaattaaaggtgcagtggtagctaggttcgaacacctctga

SEQ ID NO: 311906 - DNA, 159 bp, Proteus mirabilis
atgagcattcaagaactgttagaagcggctaaaaacacgcaagtcacggatgagcagataagtagtctccgtgcacgcctacaggaaaaagctgataataaatctcatcagtcgtcgtctgcttctaaagagtttcttgcgcggacatatagcctttaa

SEQ ID NO: 311907 - DNA, 522 bp, Proteus mirabilis
atgcttatttttttacctgttgcaaatgcggctacaacaatgaattttgatggtactttgattgatacgccatgtaggattgatcagccaagtttaaatcaaaatgtggtttttttaaatagcacaccaagggattattggaaatatcctgcggttagacctgcagaaaaatttaccattaaactgatccaatgtgatgcaaaatcgttatggaaatcagtgaaaattaaatttaatgggcagccagagccagagatgggggctgaacaacaaaagtaccttacactttcttctggcgttaataaaagtaagttagccattggattaattgatatagatggaaaccaacgtattactttaggtgaaaaccataacggtggaaatggaactcaacttaacgatggcacgatgttgctgacctttaatgcatttgttgaagcgacaccaaaagcaatacaggaaaaaagtgttgtacctggagtttataatgccacggtagaatttgaggtttcttatgaataa

SEQ ID NO: 311908 - DNA, 1407 bp, Proteus mirabilis
atgagcaaacaacaacgtatcgctttatttgttttattattagctggattcgttactatctttgatctatttgtcgttaatgtcgctatagttaatattgaacaaacacttaacgccacactcaccgaactcacattgattattgtcggatacgaattagcatttggcttgctattaatcacaggtggacgattaggtgatatttatggacgtcgaacactctatcgctttggaatgtttggctttacgttatcatctgtattatgtgcaatttctccaagtgctgttttacttgttattgcccgttgttttcaaggactaactgcagccttgttattccctcaagtatattcaagtattcgccttaattttgatagctcacaagccaaaaaagtattcggcttacttggtatgacgttaggtgctgccgctatagcagggcaagccttaggtggattattaatatcattaaatatatttgggttagcgtggcgtactatttttttgataaatctttttattggtgtgatcgcattatttttttcgcgctatcttacccaaaatgaattatccgatcataccaaattggatataggaggagtcattttatctacacttagtatatcatttacgttattaccattgttgatgcttcctatctggcactggcaatggtttagttcattattttttcttgttggaataagtctattaatactatttttttgttatgaaaaaaaattaaaataccaagggaagcaacctctatttgatctgatactctttactaatcatcaatatgttattgggctcattattgttgtttttgtttattcaacatcatctgcttttcctatgataatgtcgatattattacaaagtgggtttaatcgtacggtttttgattctggcttaatgtttgttcctgcaagtatcggttttatactttcctctttattcacaccgaagtggatcaaaaatattggcgaacatgttatctattggggcgcagtctgttatgccttcagctatattttgcttattttaggcgtctattatttgattacccctaagaacactacattaattattcctttcttattgttagttggctttacacaaggcatgattatgactcctatgctgaatttagtgttagaaaaagtgaagcctgaacttgtagggattgcttccggattaacggcaacattacaacaaattggggctgctataggggtaacatctgtttccatcattttgcaatttagcctcacacaggttatatcaaggaatataattgaacattataagatagcgtttagttttagtatgttgtttaattttataatggctatatgtgcggcttttttcttgaaaaaaataacaaaccataagaatacgttataa

SEQ ID NO: 311909 - DNA, 363 bp, Proteus mirabilis
atggaaaaactgaatattcaaattcgtgatgtaaaacatatcaaaacaaatcatatcgagctttatatcaaaagccgtcaggaagaaggcatttcaaaaagaacacttcaaaacgaaatggcaggcattaggaatattttagcggttgctggcagaacaaagcttgcctcgcctcaacatgaaaaactcagtaattatgcgcttggtttatcaaatgcgagccgcgatggtacgaaagtggctattagcgaagaacggtatttaactgctttttatcatgcagaaaagcaagatatgggggttacaatgaccatgcaactagcacgttatttcggattacgtactgaagaggcaagtcattaa

SEQ ID NO: 311910 - DNA, 498 bp, Proteus mirabilis
atgggattaggcttcgctttattacctgaaggtgcacaatttcataaccaaacactatggggctctattggttgggcaacaccggctgcattaggcgctgcattagcggcaccagaaaaacgtattattttaattaccggcgaaggctctcatcagttaacagtacaagaaattagtcaatttgttcgtttcggtttaaaacctattattctagtattaaataacgatggttatttaatagagagattattatgtgattaccccgaagcttattataatgatttagctcagtggaactatcatcagttaccgcaagcctttggtgcaacagattggtatagtgaaaaagtaactacagcaagtggactagataatgcgttaaataaagccgcactaacaaatagcgcatcttatattgaggtagtcacagagcgatatgaggcctctgaattagcgcaaaaattaaaagaatcaaaaagttcattatattcattctaa

SEQ ID NO: 311911 - DNA, 1365 bp, Proteus mirabilis
atgaatattttagctttaaaagaattgcttcgctctgaagtaggaaacttgaaaggttattgtactcaccagaagctacctgacttttgtcgccaattaggattaccgatacctgaggatagtggagataagcgtgaacgattacattctgctttcgactcacttgatgatgctgctctaccgagatttgcagaaaatttattaacacaacaaattttaaattcaggagttcgtaaccaaatccaagatttgttgtgggaggatgaactaaatattgaaatctctaagagacatcgtcgagaattggcgctagctttacaaccattaaaactctttcacaactgggaaaattttaagcaactaattaacgatatctttattattcctgctgatttaagttcaatgttcttaatacctgaaacaggtattttggctgaaattgaacgacgttttgttaaatatccagaacattctgatgtagaatggttatttgataaattgggtgtcgttgaactatcccatccacgttttcgccgatggctagaagggttagtatctgcgaatgtgcaaattgatcttgaaacacaattagctactgttactgctattaacagtgttttgagaacatgtggagctgaactaagtcatacctcaaatgcagagggttatcctgtttttagcttgatatccttgcgggtatcatgtgtacgtcccaagaatattatttttgcctcccttactaagcctgatattcgtttgagtaattctctcgataatgaaattgaaatcctttcagacccagatgaggtattaatctatgatagaccattaggttctgagggattaagttggcgagatctgcaaatatggtgggctgatttaactaatgaaaagaacggcgaacaggcaaaaaaaacgctttaccgtcgattactacaaagtttacctgaaacatcaccaccacaaaaaatattttttagagaatttttccaccaatttggccaatcagtttatgacctaccagtgttactacctgaggtttggttacattgggatcccaaaactgtttacgaacgaggagctcaagcattgcttaatcatcgtatggattttcttatgctatttcctaatggtggtagggttgtgatagaaatcgatgggattcagcattatgcggatgatatgcatatagcaagtagaagtagatatgctgatttggtcgcaggtgatcgtagtttaaaattagctggttatgatgtgtatcgtttcgcgggcattgagcttcagaggaaagatgcttcctataaagtaaaaaatttcttcgatgctttatttaaacgctatggaatcaaaatcaattgttaa

SEQ ID NO: 311912 - DNA, 816 bp, Proteus mirabilis
atgttgaaagggttgattcgggcacgggccggttttgggccgacgatggtgtttcttttctcatctccgttgctgaatcctgtcgtcgtcggcctgctggttgccacgtttggatggacacttactgctatctatgtgctcgccgctttggtggtcgcggtaggtgccggatggctgcttcacacgcttggcttcgagcgttatgtgcgccggacggcgacacaagagagcagtggatgtagttcatcagcaagcccgtgcagtgctacatcgaccgcatcgagttgcggcaccaacagctgcgacaccactccgaagacggcttcttgcggggctgataggaagacaacagtctctacgtctagcgaatgctgtgacagtcaacccactgtcacggttaagaaagaagggaagtacagtggtgtgtggcgggaagcttggtcggactttatcgatgtgttgccttacctgctcatcggtattgcgattggcagcgtgatctatggtttcatgcccactgacttattggcgcagtatgcaggccaagataatccctttgccattccagttgccgctgtcatcggcgtgccgttgtatattcgcgctgaagccgtcatacctctggcagcggctctgatgtccaaaggcgtgggtgccgggacggtgctagcgttgatcatcggcagtgccggagccagcctgcctgagctcattctgttgcgctctttgttcacgctgaagcttttagcggcgtttttagcagtcatttttgctatggcgatgattgccggttacgccacctacctgtttttctga

SEQ ID NO: 311913 - DNA, 360 bp, Proteus mirabilis
gtgtataagagacaggattataccatcagcaaacatttttattgtcaaatactggggcttaccctattaaatgaaaaataccgtgaagaaatacaatcttggaaagctgagcttgcgttaggtacagtctaccaaattgaattatttagcttcccagatgcgccagcacgtttaagttacccagaagcacgtggtctacgccatgtggcatttgcagtggacgatcttgatgcttcagttgcttatttacaacaaaataatattcaatgtgagccaatacgtatagatcctagtagccaaaaacgttttaccttttttcaagatcccgatggcttacctttagagctttattcaatatag

SEQ ID NO: 311914 - DNA, 303 bp, Proteus mirabilis
atgataaaggttattgcagaagattttattaaatcagcatcaatagaaacggttttaccactttaccaagaattggtgaaagctagccaacaagaagcgctttgtattagctatgatttgtttgttgatgagaaagatcccggtcactttatttttattgaatcatggccaaataaagaagcactagatattcattgtaatagtgaacattttcgtcgcatcattccgatgattaaacaatatacaaaagcagagtcaaaaatcactttagtcaatagtgtatttgataaaaatatagattaa

SEQ ID NO: 311915 - DNA, 645 bp, Proteus mirabilis
atgtttgacgctacaaatattcctcaaggaaatgctatttctttcttatttattcaaaataaagaattgacagatttagttttggaacggcataagcaaatagttaaaaatgataggaacatactagatgttgatactgagagcttttatggccaatttcttaagtatctgaaaccagagcaagatgggttatctgaataccttgataaaacttttggggagttacgagctccaaaatatataaaggaaacagaaattggccaaggtgatattattaattctgaagttgacaaatattacgcttcagttgaagagacacttgaagaaaaatactcagatattcagattgataaccctgattcctttttaatttggacaatttcaagtgaaggtgttttattgattggacgggaacaagatggaagagggcatcctacactcaccggctttaagccatcaagaattgctggtgagttgaaaagaactatgagtggatggattattaattcaaagtctggtcgttatagtaccgattactctaacaccaatgagttgttgaaaaatgctgtagaaaaatttaaagatatctttcgcaattcaagaaaatctataaaagctgatacttttaattcggataagagctga

SEQ ID NO: 311916 - DNA, 387 bp, Proteus mirabilis
atgacgattacacaacaagctggattaccactattacaggggttaaaaattattacagagcaattaacgcattcactgtatcaacgagcactcactgatatgatagcgcatattactcaaggaaaatcacttagctcatttatgcgacataatcctctattcccgccaatctgttatcaatttatctcttcagcagaaaattctggacaactacagtttttttgccagcaacttacccactggttttatcatcaattagaagaacgccttgatagtgtaaaaacatggcttgagcctattttaatgacactgatcgcattgattactggcacgcttattattgcgatgtatcttccggtgttacaactaggtgataccatacattga

SEQ ID NO: 311917 - DNA, 450 bp, Proteus mirabilis
atgaatatcaccaaattactcactggtagttgtgtagtattggcgttctggctctggtgggtaatagatgactatggaacgttaaaagcgaatcacaaattacttactagttcgttcaatgagcaagtcaatatcaatcaagattaccaagcacacataaaatcccttcatgatctcgatgtaaaacatacgcaggaactcgataatgctaaaactgaaattagccggttacgtgattttagcgagcgtcatcctgagcgggtgtacatcaaagccgaatgtcaaaaatccgaaggtgttaccacctccggcatggatgatgcaaccaccgcccgacctactgacaccgctatccgaaattattggttactcagagagcgaattgcacagtcagagcaagtgatattggggctacaagattacattaggcgagagtgtacaagtaattaa

SEQ ID NO: 311918 - DNA, 228 bp, Proteus mirabilis
atggatatcattgctgaaattgcttttcgcatcattggatttatgactgaaattatttatagcattcttagtttctttggatttagaatcgccgttctaggaagtagctttttccttcttcatatgttcagttatcatcctcttttcatcataatctttatagttgtagtgatcgtgttatatgcaccagtgatatataagttagtgaggaaaagaaaaagtaattaa

SEQ ID NO: 311919 - DNA, 708 bp, Proteus mirabilis
atgagagttggcgtaataggtgcaatggaacaagaagtcaaacttctgcgtgaacaaattgaaaactgcgaaatagtctctcgtggtggttgtgaaatttatactggcaaaatcaatggtgtagatgttgcattactaaaatcaggtattggtaaagtggctgccgccatcggtaccacactattacttgaacattttcgccctgatgttgtgatcaacaccggctctgcaggtgggttagatgcaaaattaaatgttggcgatattgtcgtatcaacagaagtacgttatcacgatgccgacgttactgctttcggttatgaaccaggacaaatggcacaatgcccaccggcatttattgccgatcccaaactggtcaatattgctcaagagtgtattggatcactaaaattaaatgccgtgcgtggattaatctgtagtggcgatgcttttattaatggtgccgagccattagcacgtattcgtcgtacttttccagaagtcgtcgctgttgagatggaatcaaccgctattggacatgtttgccatcaatttgatacaccttttgttgttgttcgtgccatttcagatgtggcagataaagaatcgcatttaagttttgatgagtttttatctgttgccgcacaacaatcaagcttaatggtcactactatgcttgataaattaaaaacagagactcagttttaa

SEQ ID NO: 311920 - DNA, 456 bp, Proteus mirabilis
atgagtaaattaacaccttggattcctgcgattttatggggcgcaatgttgttcttttcagtgctagccatgaaagaagttgttgacctgagtaaagaaaataaatcactcactgaacaactctcacaacaagtagaaatcaacaaagactaccaatctcgtatcactcgattaaatcaactcgatattcgttactcacaggagttagccagtgcaaagaatgaaatcaacactcttcgtgatgctgttagctctggcgacaagcgggtgtatgtcaaagccgagtgtccagcagccaccaagaattccaccgaaagcggaagcaatgaagcctccgcacgacttaacaaagcagttgaacaagattatctacgtctcagagaaatgatagtcgagaacgaaaagcaaactttgtatttgcagaactacattaacactgaatgcctcgctcaatag

SEQ ID NO: 311921 - DNA, 345 bp, Proteus mirabilis
atgacgattaatgatttaaaggcaatcaatgatcggtatatagccgatgaacgtagaaaagcgattattgaaagagctgaagtaaaagcgaatgtttatgagtccgctaaaagattatttcaacttgcggaagataacgattatgtaaaacgtagtgatggttatattgatgtaattctaacaggttgcaacattaatgtttttctcaacctaactaaggatagcgggttgtttaaaaattgtggcaataaaatataccaacacatgttctgcaataaactccttatgcatgaaaaactaaatcatatgggcggagttaatttcgccagaattatcctttcctaa

SEQ ID NO: 311922 - DNA, 186 bp, Proteus mirabilis
atggtggaattacaccaaattagaaagccccaagtgtatcgcaaaccagatttctccgttctgcgtagggactatgaggggcactattgtgagattgcggaggcatacgctgagagtgtatgcgttcaggttccccatggcgtgtgtgcttctatcctgataagtgcagtagcccatgcgagttag

SEQ ID NO: 311923 - DNA, 1491 bp, Proteus mirabilis
atgatacccgttattgccttagtagggcgccctaatgtgggaaaatccacattatttaaccgactaacacgcacaagagacgcattagttgcggattttcctggacttacccgtgaccgtaaatatggtcgtgcagaattagacggtgaagagtttattatcattgatactggtggtattgatggtgcagaagagggtgtagaaacccatatggcatcacaatcactgcaagccattcaagaagccgatattgtgctatttttagtcgatgcgcgagcaggattaatgccagccgaccaaggtattgctaaacacttgcgtggtgttgagaaaaaaacctatttagtggcgaataaaacagatggtatcgatattgataccgctttggctgatttctactctttaggattaggggaaatattccctattgctgcctcacatggtcgtggtgtttctcaactgattgagcaagcgttgttacctattgtgggtaaagtcgtcgaagaagagaaagaattaacagaagaagaagagaatgccgcttattgggctgctttagaagcagagcagaaagagcaagaagaagaggaagaagaggatgatttcgatccgacaacacttcctgttaaattagctattgtaggccgccctaatgtaggtaaatcaactctgactaaccgtatgttaggtgaagagcgtgttgtagtttacgatatgccaggcactactcgtgatagtatttacataccgatggagcgtgatggtaaggagtatatccttattgataccgctggcgttcgtaaacgcggaaaagtaaaagaaacggtagaaaaattctcagtgatcaaaacattacaagcgattgaagattgtaatgttgcactacttgttattgatgctcgtgagggtatttcagatcaagatctctctttattaggttatattcttaattctggacgctctttagttattgctgtcaataaatgggatggtatgacccaagaagatcgcgaacaagttaaagatatgcttgatctcaaattaggttttgttgattttgcccgcgttcattttatctcggcattacatggtagtggtgttggtaatctgtttgagtcgattcaagaagcctatacttgcgcgacacgtcgtgttggtacatcaatgttgacgcgtataatgaagatggcagaggatgatcaccaaccccctcttattcgtggacgccgtgtaaaaatgaaatatgcccatgctgggggatataatccacctgtcgtggttattcatggtaaccaagtgtctgatctacctgatagctataaacgctatttaatgaattatttccgtcgcacactacaagtgatgggaactcctatccgtattcaatttaaagaaggggaaaacccttatgcggataagaaaaataaattaacagcttcgcaaatacgtaaacgtaagcgtttaatggctcatttaaagaaatcaaaataa

SEQ ID NO: 311924 - DNA, 564 bp, Proteus mirabilis; identical to SEQ ID NO: 296541

SEQ ID NO: 311925 - DNA, 1050 bp, Proteus mirabilis
gtgactaaacctctttatgagagctacctgcaagcaaaaaatgaaaaaaaagcatcttatgcgcgtgatttagcaacttaccttaatgtaagtgaagctgagcttactcacgcgcgtgttgggcacgatgctaaacgcttacatggtgatgttcgtgatattttaaccgctctcgcaaccgtaggcgaagtgaaagccattactcgtaatgaaattgcggttcatgaacatcttggtgaatataccaatgctcgttttaacgatcatgcaggattgatcttaaaccctcgagccctcgatttacgctttttcttctctcattgggcaagtatctttgcattaaccgaagagacggctcgtggcattcgtcatagtattcaattctttgatcttcatggtgattctctccataaagtgtataccactgataatactaatatggatgcatggaataccttaatcgatacttatttatcaccagaaaatcccgtattagagattacccccgctaaatcttttactgatgcaccggtaacaacggcattagcacaacagttagaacagcaatggcgctcgatgactgacgttcatcaattctttaaaatcctgcaagaaaataatctcagtcgccagcaagcgttcaaagcggtcagtgatgatttagcttatcaagtagataatagtgccttaaaaacattattagcactggcgaaagaagtacaaaatgaaattatgattttcgtgggtaatcgaggctgtgtacagatctttaccggtaaaattgatcgtttagtacctcatcaatttgaaaatagtgaacaagcatggattaacatttttaatcctgcatttacactgcatttaattgagagcgaaattgtggaaagctggatcactcgtaagccaacccaagatggttttgtcacaagtcttgaactatttgatagcaaaggtcaacagattgctcagctctatggacaacgcactgagggaacaaaagaacaacaacaatggcgtgagcaactcaacgctcttgctaaaatagcttaa

SEQ ID NO: 311926 - DNA, 897 bp, Proteus mirabilis
atgtcacgcccttcgttaaaaaatgtaattgtgtataaagcacaactaccaagtgcagaagcgatgtccgatcatctaactaaaatgccatttactgaagtgttagaatctcacttttgtagttatggctacattccaaacccagttacaaatgaattagtgaccccaatcacaggcggatatttgctgacttttcgttttgaccaaaaaatattacctaatgctgttataaaaaaagaagttgatgagcgtatcagtaaattaattgatggtgatgctgaattcagtgctgttgatattaaaaatactgttacagccgaattcctcagaaaagcgttcatcaaatcaaccgttgttttagttttatatcatccagaaaaagaatatctacttgtaacaacgcctaataagaatatggctaattcggctattagtacattaattaaagcatgtggctcagttaaaacagaaaccatccatattgatgatgtatcaaagggtttaacaaccaggttattaaacacactgaataatgaagaggtagatgattgttttggcaaagatttctatctaggtcaattctatttgcttgaacgcaaaattgataacaaaaaagaaattgtgaaatatgatgctgattttcaatcaataagaacagagctattaaactctctaaataaccaatttaaagttaatttaattcaattatatacaaatgacattcaatttaaattaactagtgactttcactttaaaggaattaagccagtaaataaaattgagtttgatgataaagataaagtttatcgttatcgacatgaatgctcacttatcatgttttatatgacacttaccatcgatattttaattgatttattaaaatataaagaaaaataa

SEQ ID NO: 311927 - DNA, 681 bp, Proteus mirabilis
atgaatactctattagttaaccagttacaaaaaaaactgggttatacttttaaacaaaacgaattacttttacaggcacttactcaccgtagtgcaagtagtaaacataatgaacgcttagaatttttaggtgattcaattctaagttatgtcattgctaatgcgctttaccatcgtttccctcgtgtcgatgaaggggatatgagccggatgcgtgcaaccttagtgcgaggtaataccctcgctgaactagcacgtgaatttgaactcggtgaatgtttacggttagggccgggagaattaaaaagcggtggttttcgtcgcgaatctattttggccgacacagtagaagcgttaattggtgctatttttcttgatagtgatattcaaaatatcgaaaatatcatcttaaaatggtatgagaatcgcttggctgaaatcagtccgggtgataagcaaaaagatcctaaaactcgcttgcaagaatatttgcaaggacgtcatttaccactaccttcttatgttgttgtacaagtacgtggtgaagctcatgaccaagagtttacgatccattgtcagataagcggtatcgaccaacctgttaaagggatgggtacaagccgtcgtaaagccgaacaagccgctgctgaacaggcattaatacaattggagcttgaatga

SEQ ID NO: 311928 - DNA, 909 bp, Proteus mirabilis
atgagcgaagaacaaacctattgcggatttattgcgatagtcggtcgccctaatgtagggaaatcaacattactgaaccaattattggggcagaaagtttctattacttcacgtaagccacaaaccacccgtcaccgtatcatgggtattgatactgatggtgcatatcaggctatttacgtggataccccaggcttgcatattgaagaaaagcgagccattaaccgtttaatgaaccgtgcagcaagtagctctattggtgatgttgaactggttattttcgttgtcgaaggaaccaattggacgcctgatgacgaaatggtattaaacaaattaaaatcactacgttgtcctgtgctattagcgattaataaagttgataacgttacagataaaaccaagttactgccacatattggttttttaagtcaacaaatggattttctagatgtagtgccgattagtgctgaaaaaggcatgaatgtcgatactattgctaaaatagtgcgtaactgtttacctgaagccattcatcatttcccagaagattatattactgatcgctctcaacgttttatggcgtcagaaattattcgtgaaaaattgatgcgctttttaggtgaagaattaccttattctgtgacggttgaaattgaacaatttgttactaacgatcgcggtggatatgatattcacggtttgattctggttgaacgtgaaggccagaagaaaatggtgattggtaataaaggcgctaaaatcaaaaaaatcggtacggaagcccgcatggatatggaagatttatttgaaaacaaagttcatcttgaactttgggtgaaagtaaaagcgggttgggcggatgatgaacgtgctttacgtagccttggctatgtggacgatttaaaatag

SEQ ID NO: 311929 - DNA, 420 bp, Proteus mirabilis
  misc_feature (399)..(408): n is a, c, g, or t
ttgcgtattgattttagtaaggcgggtaaggttaccatatacgcggaatatcctaaacacatggatataaaaggccagaaattaggggaatggccagaactatcattaccgatagcaagagagaaagcgaaagcattagctgaagaagggctaagagctgaatctgttcatcaactattagatctttatgaaaaagatttagcagggaaagtcgaacgctcaaagttaagtgaaaatagtttttatacttatcgttgcagagtaaaacaactgaagctgacgttcggatcgcgtgaagtttttagtgatgtaaaatactcacgattaatagaaatattggataattggatacaaacaaaatcaaataatcatgcattagagttatttgctgagatgcgnnnnnnnnnncatttattctaa

SEQ ID NO: 311930 - DNA, 717 bp, Proteus mirabilis
atgccaacgaaacgatatactgatattgagtctattgccactttatggatgaacgttgcttcaagcacctctgtgcatcaaaaaaatgcagttagatatatgatcctcaccggagttagaccaatcaatgttgtcaatttaaaatgggaatatgttgatttagataacttagaaataacttatccagctggtttaattggtatgcgtggtgcaatgaaaacgcaaaaagagtttagagtgccaattacaaaggcaatgaaaagcttactcgaggaacaattagcttggaaaaattccactgttaattgcaataaagaatatgttttcctacaacctagagatccacaattagcgttttctaaacgttcattggataaactagttaaaacatatagccctgaaggggcggtgaagggtgtagtgcatgagggaacggtgaagggaaagtccggagcatttaatactatgtgccgtaagttttttaaaagtaatataattgcacaaatgcgtcaaaaaggcttttcacgttctgatactaaagaaattagcatgctatgtttacatcactctgataaaagtgaagatccaatggctgaacattatgacttttctgatgagatactgcaggaagagatagcgctaaagcgtcaagcatttgaggctcatgaaaatagtatcttgactcaagtagcgctattacgtcgtaaacttagttaa

SEQ ID NO: 311931 - DNA, 588 bp, Proteus mirabilis
gtggtagataataatggaaattcggcctttttgcgcctttattgggaaggcgaaacgcaaaataatttagaagaattacgttttctcactaaacgagaattagaaatcgttgcgatcaccgtgcaacctgttcgacgtgatttcaatatcgatttattacccaccaccatttggatcaaaacagagcaaggcattgaaatgttttatctcgattttgaccaatttccacgtaagaaaaaacagtctggttttattagtcatattcaagaatatatggctaaacgtaagcgacaaacggcaatgcatcacagtgaacctacccttgcacaaaaattttgtcgccccattttatccgtattggaagcccaagcatgtacagggcgagaacaactttctgcaatgcaaaaagagcaattagagagaagcaaacaaattgctgacgatttaggtatgacattaatagctaaccaattaactcgttatctcgctttaactgctcgtgactctcaagctttattacagttaatttggctatgtgataatctgcaacaattacaaagcccgctacccattcaacttaatgaataa

SEQ ID NO: 311932 - DNA, 1212 bp, Proteus mirabilis
atgactggagaagtgaatgagaaatatttaacaccgcaagagcgcaaagcgcgtcagatggtgaaggcggtaaacgaagcgagcccacgaaacttaccggccgacgcggtggtatgcccatgtgaaaatgaacatcgccctgtttatccggtgcgttatgcatataccaacttttattgtgatttacatttttctacaattgaacaagcaccaaataaaacgttagaagcgagtattcctccttctattaatcaattattgaatgcgaaagatgttactgctagtaaaggattttctgcaagattattaagacaaggttgggtttatgtttttgaagaaggcaattaccctactagaagtaattctagtaataaaagttatcaagaacaaaatgttgatgcgacaaaaggacgcctattagtttttcaacatcaagttacaaccagtgatggcaatgaaaatttcattccatatatatttaagcaattaaaaaatgggggtgtcactttaaagaaaaacggaaatagtaatccttatttagctataccgaaagatgtgaaggaagcgactatcttattcagcgaaagtaaattatctgattacacacttaaaaaaatcatttcatcttctaagtttagatcgaaattaatgcaaaaaatcaattttattgattacaacaataacgattattgtattgagctaaataaagataatttaaatcgacttgttgaggattataaagaagaagttgataaatttaagctatttgttaaagaattcacgcattcaaatataccctcttcttttttttctgataccacaaaaatacccgacttaccacaagatgcaactgttttgattaatcaaataaatagtgttctagattataatgaaaaagcgacattgcttattttaaaagatcccgtaggataccaaaaagatgttttatcttattataatattgtaacaaaattacatttattatatcagaactattatagccatccggataaaattggccaatttattacgagtatacaagaagctagtcatcacattaaagatactgatgaaaaagaaaaaatgcaaacaatactaaaagagagtattaatcagaatgcattagataatgagtggaaaaatattcataaaacatttatttttttgagaaacatcaacgtattgtattatcattgtatgaaagctttatga

SEQ ID NO: 311933 - DNA, 4935 bp, Proteus mirabilis
atgtctgatattcatgatacgaatcgcgaacaggaaatacttgatagcgctgttgcacaaggtggcgcatatgaaatattgcgtaaacgccttaccgagcaaggtcagcagttacatgtaaaagccactgaactcaatcagcatcgattagctgaatttggtcaaagccaaatggatatcattggccgtattcgtattcgaacagagaataattgccaagcaagagatattgttcgcgttggtgaatggttactatttggttataacgttttcctcggtttaaaacgagaaacgcatcttgaagatgttttttcactttatcgcttaattgataatgatggcgagtttgatgttgaagcggttgcttatgaaggcacttttttaaatgataatcgctttatccaagattttaccgagctatacacttactataaaaatacgcaactactacagctagttgagcgtgatggtaaattactcgctagttttcaaattggcgatcgtattaccgatgtacgcgtcttccgttggtcgatatccagtgacaaacaacgtattgaatatattgataatcgtggcgaacgcgatatagcactcccccctgcttacgattttgattggataaaaacacaacgtgaagatacggtaaatgggcgttttcctcatatcaacattttagatacagtctttgtagaaaccaccggtggcgatttgactgtcaaatgtgaaaacaataccgaagatggtttaggaatttatcgtgaagcggtcttagataaaaaccagtcccttgatgatgcacaaattgaatatgcacaaactggcagtttaattttattaaaagtgcttccttaccgcgaagagaattggcgttatttagtctataacacactaacacaaagtgttcagcgtattgatgccattgggcaagcttgtgtgcaacttccggaagatcacggtatcatttttcccggcggctactatctacaaaatggcgattacaaaacctttgatcaaccaatggaaggtatgtattttcgtcgtttgcgtcgttcacctaacggtgaagatgtgctgtatgtcttctattcaccgacacaaggtcgtctcgcgctatttaattacaatatgattgagcgtaaattggcgacaccattggtcggtcatggctatgccatgctagaagatggcaaaatggtgctatttgaaggggaaggcgaagaagctacccgtgttcacccgatgcaagtttggcaaacgcccttctattctgaagaatttgccgataaacaaccgccacgaaacggcttttatgggcgtattggtaatgccgatttagttcgcgggatctcagaaattttacatgtcgctaaagaaattgaaggtagccaagtttccatcgctcgttatgagcaacttagccaacaaccaaaaagcttattagatctctattactggtttaatgatgaacactgtctaggtattggccccttactaaaagagatcgctcaaacaagtgaattagtgcttgatgaatatgaaaaagtcgaaagtattcgtcaacaatcagcgaaatcaatgcaagaagcgatcaaccgtcagaaatctctgttatcactgacactgcctgatagttggaccgatattcaacaatttgttgatagtttaaattcgctcaatacacaccatggacaccttatttctttgcgtgaattccgttatatggatttaacgcaattaaataaaatggaaacggaaataaccgaggcacagcaacgtgtttcgcaagccacagcccaatttcttgccagcgacaaagcgctacagccttttaaaacacagcttactacttttgaacaacagatagaaaaagcacaaaacagtgctcagcttgatgtaccaatgaatgagatggcgcagatgtcagaagatttagacatgctgtcaaatctgatggcatcactcacctttgaggatgtgacgcaacaaacacagattattgatgccatctcccaaatttatgcacaactcaatcaatcacgagctcgcttacagcaaaaaagaaaatcacaaagtagcgtagaaaccgtcgctcaatttggtgcgcaattccgcctatttagtcaggggatcaccaatgctttatcactggcaacagatccggaacgttgtgaagagcagctttcacgattgctagtacagctagaagaattagaaagccaatttagtcagcatgatgaatttcttgatgatatcttgtcaaaacgagaagagttattagagacttttgaggcgcataaacaatcgttacttgatgatcgtcaacgtcgttcacaaagcttattaactgctgctaatcgtctcttagaaaatctgcaacgtagaacaactcggttgcaatcacaagatgaattaaatgctttttttgcctctgatcctttagcattaaaaacacgtgaaatcattgaaaaactaagagaaatcaatgacaacgttaaagcagatgatattgatgcccgtcttaaatcgtctcgtgatcaagccatccgtatcttacgtgataaaacggatatctttgaagagggtggcaatgttattaaattgggccctcgtcaccgttttagtgttaatacacaagagctagatcttactattttaccgaaagaagataagctttggttatatctaaccggtaccgatttccaagagccaatcgaccatccagagcttgaaacactgcgcccttactggaatgcgacattaagttcagaatctgaaacggtgtatcgtgcggaatatctcgcctattcaattatctatgctgcatcaaaacgtcaagatggattaaccctagaaatcttaaaagaagcactgagtgtacctgaaaaattagaaaagttagtacgtgatttcgcaacacctcgctataacgaaggctatgaaaaagggatccacgatcatgatgctatcgccattctaaagaaacttctacctgtaggtgaaagtgctgatctgcttcgttataacccaacagcacgggcaattgctgctattttctgggaaaaagtacaaactaatgaatacccagcattatggccagagcgcgcacgaacggcagtgaatattcaacaactgtttcataatgatgatgcattaattgatttacaggcagaaatagaagcggatatccgcctattccttactgataatccgattaaatgtggatcttatgttccgatccaagccgctgaatatttaagttttgcactagcaagaacaccaatagaattggtttacagtaaatatgccaaagagctcgttgttgccttacaaaaccgattagaagccgctcatatgtggattgattttaatcgttcacaacaaaatttagcctcacgttatgcacaacgttgggcattgattcaaaattggctacaaggattgtgctctcaagccgattatgctcatctaaccccttatattccgggggcaattgccattattatgttagataaaatcgcctctgcacgttatagcgaggttgatttatactttaaggtaaacggattattaggtgagcatcctactattgaaaatcaaacactttcattgagtttagatgattatttcagtcgtatgcgcggacagcgtaaaacctttattcccgcctttaatcattatctgactttacgacaaaaaattgttcttgaagagcgccagcgtttaaaactggatgagtttaaagcaaaacctctcagttcatttgtgcgtaataaactgattaacgatgtctatttaccaattattggtgacaatatggcaaaacagatcggtgcattaggtgaagggaaacgcactgacttgatgggattattattaatgatctccccaccaggttacggtaaaacgaccttaatggaatatgtagccgatcgtttgggactgatctttatgaaaataaatggccctgctttaggtcataatgttttgtcattagatcccgaacaagcgccaaacgcaacagcaaaacaagagctagaaaaactcaatcttgcccttgagatgggcaataatgtgatgttgtatgttgatgatattcagcatacacaccctgaattcctacaaaaatttatctcgctatgtgatggcacacgccgtattgaaggggtttggaaagggaaaacccgaacctatgatatgcgtggtaaaaaattctgtgtggtgatggccggtaacccttataccgagtctggtgaactatttaagatccctgatatgttagctaaccgtgctgatatctataatcttggtgaggtattaggaggaatggatgacgcctttgcactcagttatattgaaaatagcttaacctctaactcagttcttgctccccttgctttacgtgatctaaacgatctctatcttttggttgataaagccatgggtaaatcagtttcaaccaattccctcagttatccttattcggatgcggaaattaatgaaattgtgatggtattaaaacatctaattactttgcgtgatgtgattttaaaagtaaatcaacaatatatagcaagtgccgcacaatccgataaatatcgtactgagcctgcattccgcttacaaggcagttatcgcaatatgaacaaattaagcgaaaaagtctctgcggttatgaatgagaaagaaattgaacgcttactcgacgatcactatcttggcgaagcccaattactcacaacgggtgctgaagagaacttattaaaactggcggaaatacgtggcacattaaccgaacaagatgctattcgttggcagcaaatcaaaaaagattttatgcgtaacaaagcattaggtggcgataatgctgatattggcgatcgcgtagtgtcacagttggcgaatttagtagaaagtgtgcagagtttgcgctaa

SEQ ID NO: 311934 - DNA, 483 bp, Proteus mirabilis; identical to SEQ ID NO: 301927

SEQ ID NO: 311935 - DNA, 669 bp, Proteus mirabilis
atgaatgtatcaaaccctcttcgcctgcaattcaccgatgctttcgggaatgtttgctttactgcgttctgctacaacctgaaccagctttcgggcgcggttcaagaagccgcacagcgcgacgcgcagaagttggtttctatcgacgtgatggagccagaaggctctaacactctcagcacctacagttgttcgctaatcgtagggccgaccggcgcagagcagagcaatctgtacaaacaagttctgcaagcggccaaaagcaatctgaactggccgcaaaactacatgcccgcgtctgcgaccgataaggaacttgagaacttaggaattcagattgcagctggcgtggcagcccaagttatcgtccagattggcggtaaggctgttaaaatgatcctgcgcaaactgaccggcgttccagccccagcagtagttgacggaaacgacccgaccccgcctgaaagcgctggcgatgtgatcggcaccgtttccgacccagaccccgaaggcttattgccagaaggtggtgatgacggcggctacccggaaaacagcggcgaagatggtggcgacggcgaagatggtggcgacggcgacggtggtgatgacggcggctttgaccccgatatccccgatatccccgatgtcttcgaaaagaaagactaa

SEQ ID NO: 311936 - DNA, 267 bp, Proteus mirabilis; identical to SEQ ID NO: 305331

SEQ ID NO: 311937 - DNA, 375 bp, Proteus mirabilis
atgaaactgggtataacgttgttattattggtgatatcacaaatgagcgataattatggaatggtaatcaaatctaaaaaatatggaattaatttattaaatacatctgatagagtcggccgaattgttggttggcatgatattactcctataccacttatgactaaaaaaacctttagttatgaccattctgatctaaataaatatggagaagtattttcttggtttgggacttcctttatgagagggttagccggagatgttactttaaatattaataacggggtaattattcttgaactcgataatgtttatagaaatggcctaatcgatatatatgatgacatcattaggttatattatggagtatattga

SEQ ID NO: 311938 - DNA, 246 bp, Proteus mirabilis
atggcgacagaattacgtaaagttggtgcgatggttgacgaaggtcgcgactacttaactgtgataccgcctaaacagttaacgacggctgaaataaaaacctataatgatcaccggatagctatgtgtttttcactggtggcattgtctaacacgccgattactattcttgatcctggctgtacggcaaaaacattccctgactattttgaaaaactagcaagtatttctcatgcaaaagtttaa

SEQ ID NO: 311939 - DNA, 1590 bp, Proteus mirabilis
atgtctaatcctatttttcagcaagaagttgctcgtcgtagaacttttgccattatttcccaccccgatgcgggtaaaacaaccatcactgaaaaagtgttgttattcggacaagctatccaacgtgcaggaacagtaaaagggcgtggttcaaatcagcatgctaaatcagactggatggaaatggaaaaacaacgtggtatctccattaccacttctgttatgcagtttccttacgcagattgtctagttaacttacttgataccccagggcatgaagacttctctgaagatacttatcgtactttaactgccgttgactgttgtttaatggtcattgactcttcaaaaggggtcgaagatcgtacccgtaaattaatggaagtgactcgattacgtgatacgccaattttgacctttatgaataaattggatcgtgatattcgtgatccgatggaattaatggacgaagttgaaactgagctaaaaattgcctgtagtcctgttacttggccgattggctgtggaaaactgtttaaaggggtttaccatatcttaagagatgaaacctatctttatcaaacaggccaaggtcatactatccaaaactcacgagtaatcaaagggttggataatcctgagttagatgaagcgattggtgatgatttagccgttcaattacgtgatgagctagagttggtgttaggtgcatcacatgagtttgatcatgaagctttcttagcgggtgaattgactccggttttctttggtaccgcattaggtaactttggtgttaatcacatgcttgatggtttggtgaagtgggcgccagcgccaatgcctcgtcaaactgatatgcgagaagtgacagcggctgaagagacattcacgggttttgtctttaaaattcaagctaatatggatcccaaacaccgcgaccgtgttgcttttttacgggtggtgtcaggcatgtatgataaagggatgaaactgcaccaagtacgcacgaaaaaagatgtggtgatttcagatgcattgacctttatggcaggggatcgttctcatgttgagcatgcttatcctggtgatattattggcctgcataatcacggtaccattcaaattggagatacttttactcaaggtgaaatgttaaaattcaccggtattcctaacttcgctccggaattattccgccgtattcgtctacgtgatccgctaaaacaaaaacaattgttaaaaggtctggtgcaattatctgaagaaggtgcggtacaggtgtttagacccctagctaataatgatttaattgttggcgcagttggggtgctacagtttgatgtcgtggttgcacgcttaaaaggtgagtataacgttgaagccatttatgaatctgtgaatgtatcgacggctcgttgggttgaatgtagtaacgaaaagaaactcgaagaatttaagcgtaaaaatgagcaacatctggcattagatggtggtgataacttaacttatattgcaccaacgatggttaacttaaatttaacccgtgaacgctatcctgatattgagttccatcaaacgcgtgaacactaa

SEQ ID NO: 311940 - DNA, 537 bp, Proteus mirabilis; identical to SEQ ID NO: 303829

SEQ ID NO: 311941 - DNA, 585 bp, Proteus mirabilis
atgatagaattaatggatggtgatgatattgttgttaatcataatcaaagtagttcagtgattgatggggggaaaggtgatgatcatattgttgtcaataaagggcaccatattttaattgctggggaaggtaatgataatcttaatggcggaagtggacatgatctgtttatttcaacctcagggaatgattatctaagtggaggaagtggtaataatgtttatatagtacaaaaacgtcatagtgaagtgacggtgtatgatgaaggtgaaatgagccatatttttgtattagggttatctgagcatgaaaagttaatatcttcccaagtaggtgaagattggcagtaccgaactaccgataatcagtttattttaacggttaaaacaacaagggtagggaaagctgaaaataatacggtgaaggttgtggaaaagcagcaaatattgtcaccacgagcgcttgcgacaattattcaacaaatggctcaatttaatcagcaacaactatcgacgatgcaaggcagtgatgttattccctcatcaaactggtcgcctttagctgtggtcgttaagcatttataa

SEQ ID NO: 311942 - DNA, 2295 bp, Proteus mirabilis
ttgggtttaacagcagcgtttgaagggctcgccattaaagcgggtcaatcggcaaatggcccgttaagaacaggcattcaatccgcatcagatgccataaatacgttatcaaataatttatccacattggttaacgtaggcacatatgcagttctccctgttattggtgctcgaatgacaagagggcttcaagagcaaaccaaagaatgggtgaaaaatgaagctgcagtgagaaataatgcgaaacaaatgagggagaatgctcaaaaaaccattaataatgccaaggcatctaaagatctagcgcaacaagagtcaagacggctagcaactcaatctgtgctgaataggcagtatggaattaacgcaaattaccaaagtagatatttaacattaagccgacaaataaaagaagcggatcgccaagaagagataggaaaacagagacttatcgcagcaaataaccagctttcatatagccaaagggcgttgcgagcatcgagcatggtattgaagagcgtttattctgctttaggggggccagtgggtgcagctatgcttgctggttctgcaatctattattttcacaataaggctttagaggccagagatagcgctcttaatttaaaaagagctgtcgccgaaacaacagatgagttaatgaggctatctcaagccaaactggccgtaaagatagatgatgtgagggatagcctaaagaatatagaagagcaagaaaaaatagttaaaaatcaattggagagttatagcgataccaaaatacaactattggaaaaaagggggaaaggtttttttgggtgggctcatacatggtatgaatcggctgatgaagcaaaagcgactcaaaataaattaaaaagtgaactagaagatattataaaaaataaggaaattgaatcacaaacacttgaagctgcaatagaagctcaaaaaagattacttaatggagaaaagcctcctgaactgaaagaggacaaaccagcaggtgacagcggaggtggtggaaatgatggggggaataatctagtttcaggctctaaacaaaaagttagtcaataccatcaattacgtatgcaaatagagcaagagcacgcaaccagcttagagcgcatctcattaagtgaatctgagacgatgcgtaagcttcaggaaagcttaaaagctggtggtatgaagcaagaggaatatgagcgattaaaaacactcaacgctgaaaaccacatgaaacagcgtgcagagttagcagaaaaatattcaccgatgcgtacctcattgcgtaatgaacaagaaatgacaaaagagttgaagtctctgtttgaacagagattgttaacagaaaaagaataccaatacgcgcggatgcagatggacaaagatatgtctaagtaccgcctgtcagagcaagcaaaaggtatttctctcccgaatatcagcatccttggcgaaattgaccccgttattcagcttcagaatcagcttgaagaacaaaaggcactgtatcaagcctactatgaagatggcttggtgagtaaggagcgatacgaacaattaatgatagctgctacaaataagtcaaaagaagcacagtatcaatcaagtaaagagttttacgcatctcaaggcatgtggcaacgcatgcagatgaatttagttgatgcagttgaacaacgaaccgccaatgcaatgactggtatgctaatgggaacaaaatctttttcagaaggcattaaagaattttcttcatcattagccagttcaattatttctgatcttattcgtatcgctattcaagctcaaattaccaacgcattgactggattgatggggggttttgcggggagtggtggtgcaacaagtggtgctaaagcgggtaaggtgggtgtaaaagcgaacgccaaaggggatgtttacagctcgccaagcctcagccaatatagtaatcaagttgtgagctctccaacgttatttgcctttgcaaaaggtggtacgcctaatcttggtctgatgggggaagctggaagcgaggcgatcatgcctttaaaacgtggacctgatggctctttaggcgttagagcaaccggaagtaactctaccgcttcaggtgatactattattcatcaaacatttcatgtaacaggtaatggcgatgaagcgctttatcaagctatgcaggaagcagcaagaatgggggctgagcaaggcgcttcaaaagctaaatctgacattatgcgagactttcaaaccaatggaacgttaagaaggaatctacgataa

SEQ ID NO: 311943 - DNA, 1704 bp, Proteus mirabilis
atgtacgaatttgatttaattttgctgttattacagcaaatgtgcgtttatctcattattgcgtggtttctcagcaaaacgccgctatttacgcctcttttacaagtgactatcaaacttccacataaattaatgtgctatgtgattttctccattttctgcattatgggcacctattttggattgcatattaatgactctattgctaatacccgtgctattggctccgtattaggcggattattaggtggcccgtatgtaggctttctcgttggcttcacgggtggcttacaccgctattccctcggcgggatgacagcgttaagttgtatggtatccactatcgcagaaggattaattggtggattagttcatcgttattatgtaaaacatggacaaatgcaccgcatatttaatccttggacagcggctaccgtcaccttttttgccgaaataatacagatgagtattattttattactcgctcgtccttttgatgaagcactttctttagtaaaaaatattgccgctcctatgattgtagcaaatacaataggtgctgcgatgtttattaggatattacaagatagacgtgccatttttgaaaaatataccagtgctttctccgctcaagcattaaaaattgcggtttgcactgaaggtattttacgtaaaggctttaaccaagataatagtactcgtgttgcaaaagttatctaccaagaattaaaagtcagtgctgtcgccattacggatagagataaactactcgcttttattggtattggcgctgatcatcatttgccgggtacaccgatttcctcagaacaatctaaacaagccattaataataacgaagtcgtgtatgcggacggcaatgagacaccttatcgatgtaccctttctccacattgtaaattaggctcgacactggttattcctttacgaggagaaaataatcgcgttattggcaccataaagctctatgaagcaaagaatcgcttatttagctccattaatagaaccttaggagaagggatcgccagtctattatcagcacaaattcttgccggacaatacgaaagaaataaacaatcactattagaatcagaaattaaattactacacgcacaagtcaatccccactttttatttaatgcattaaatacattacaagccgttattcgtcgtgatagtgatcaagcaaaacagttagtgcaatttctgtcggcttttttccgtaagaatttaaaaagacccgaagcgatagtgacactcagtgatgaaattgaacacgtcacggcttatttacaaattgaaaaagcgcgctttcaagaaagtttacagatagatattcagatacctgaacatttagccactgcacgccttcctgcattttcgcttcagcctatggttgagaatgcaattaaacatggaacatcacagttattaggcatcggaaagattacaattagagcgcatcaagaagaccacttaatagtgatcgaaattagtgataatgcagggctttatcattcgcaaggcgcatcacatcagctcggtttaggaatgagacttgtcgataagcggattaaattacgctatggtgatctatatggtgtacttgtggagtgtcagcctgataactataccaaaataaaaatctgtttacccttagaaaaaaatatggataacgcagcataa

SEQ ID NO: 311944 - DNA, 405 bp, Proteus mirabilis; identical to SEQ ID NO: 303816

SEQ ID NO: 311945 - DNA, 870 bp, Proteus mirabilis
atgagcaccaccactcaagagcgtctagttggcgatagtgcacaaattaccgccattagacagcaagtacagcaaattgctgatattgataaagacttaatgattgaaggtgagatggggacagggcgacatctactcgctcagttattacatgaattaagtcctcacagcgataaagcggtgactacggtagattgtcaaaatttagtagatattaagccactgattgctcaaatagagcaagaggaagtcggcacacttattttacgctccccttatgatttaccttctggtgcacaacgttggttaagtgcttacctattagatatggaaaggcagggtaagcgccaatttagaacgatcgcgattttagaaaataatacccagcaattagtcactgaagggcgattgatacctgagttctattactacttttcgcaaataactttttctttgccaccattaagcgcaagacgcccggatattattcctctatttagagcctttttacggcaaagtgctcagcggcttgggatcgccgtaccaaaaattgatcgtaattatctcgatatattaaaacgttatgattggcctggaaacattcgtgagctacggaatgtcgctgaactctatgctgttggtattgtgaaaatggttgatagtgagcaacatcgtgccattatcccccctgaagggcctttagataacttagttgatgattatgagcgtcgcttaattgaagatgcactctatttatttgctggccgtgtgagcgatgtggctgattatttaggtatcccacgtaaaaaactctatttacgcatgaaaaagcatgaactggataaagagagttataaacctaaggtttga

SEQ ID NO: 311946 - DNA, 591 bp, Proteus mirabilis
ttgtgggagaaaaagagagtcactgatcctgcttttttagctttagataaacaaatgatcgctgactattacgcagaaaggctcaatataaataagtacttacaccaacatttatcttattttaatcagcataatattgaagaaataaatcaatgggttactgattttactcataccataatcaagccattgctctatcctcaaggcattaatactataaacctataccgacaacaaaatatccccgttatcattatctctgcaactatgtcttttctggtacatgcgattgcaaaacaacttaatgctgatatttctatgggcattgatatgcagataaaaaataatcattatacaggccatattgagggtattcctacctttagagagggtaaagtcactcgactcaatcagtggaaagaacaaaataacattaacaactcttatatttatttctatactgactcagccaacgatctccctttatgctatcaagcaaatgaggttatcaccattaacgccgatgaaagattaagccaaatagcaacagaaaaagaatggcaacagtgctactggcagttaaataaataa

SEQ ID NO: 311947 - DNA, 414 bp, Proteus mirabilis
atgcatggtaaacgtcctaaagcggtgactctgcgtacggcaccacatcctggtttcccaaccgatatgcaagctcagtttagtcttttaaatcttgtggctgatggagcaggaatgatcactgaaacgatttttgaaaatcgttttatgcatattcctgaacttatccgtatgggggcccatgctgaaatcgaaagcaatactgtactttgtcatggtgttgataagctttcaggcgctcaagtgatggctaccgatttacgtgcttctgccagcttagtattagccggttgcattgctgaaggtacgacgattgttgatcgtatctatcatatcgaccgtggctatgaaaatattgaagccaaattacagggtttaggggctaaaatcgaacgtctacattctaatgactaa

SEQ ID NO: 311948 - DNA, 198 bp, Proteus mirabilis
atgacgcaagatgaacaaaccttacttatgtttaaaggaatagctgctgaactaccagaacaaagcagagctaaggttgaacattgtattgctgaaataaacaagttgcttgcggaatatcctaatggtgaagcattgcttgctgtgggctatatcggtgccgaacagcagatgaaaggtaatattggtcaaggataa

SEQ ID NO: 311949 - DNA, 198 bp, Proteus mirabilis
atgcaaagaatgaaattagtcgcttgcgtgatattagtgagcgtaatcctgacagggtgtacatcaaagccgagtgtccagaaagcaccaccacttctaccgccagcatggatgatgcaaccaccgcccgacctactgacaccgctatcagaaattattggttactcagagagcgaattgcagagtcagagcaaatga

SEQ ID NO: 311950 - DNA, 1242 bp, Proteus mirabilis
atgccaaagctaatcaagccactaacggatactgaaattaaagcagcaaagccacaagataaagattactctctttacgatggtgatggcttaaacctcttagtaaaaactacaggccgcaaagtttggcagtttcgatattctcgcccgcttgatagtaagcgagctaaactgacatttggtgcttatccttccctctcattaaaaaatgccagagatttacgcgataatgctagagctttaattgctaacaaaattgaccctcaagatcacgaaagagaattacaacaaaaaaaccaagaagctaaaataaatacatttaaggctgtagctcaaatgtggttcgatgtaaaaaaggccactgtaaccgctgactacgctaacgatatttggcgttcactagaaaaagatatttttccaacaattggttctattgcagtaactgagataaaagcacgaactttagtgcaagctattgagccagtccaagctcgtggagcacttgaaactgtcaggcgcatttgtcaaaggatcaatgaaattatgatctatgcaatgaatgttggttttattgatgcagcacctagcatcaacattagcaaagcatttgaaaaaccacagaagaagcatatgccaagcatacgcccagagaaacttcctgagctgatgctaacaatgagacaggcaaatattgaattatcaactcgttatcttttcttgtggcagttattgacgctaacgcgtcctgctgaagcttcaggcactcggtgggatgaaatacatatcgaacaacgattatggcgtattccagcaaataggatgaaaatgaatagagaacatactattcctttgtctgaacaagcggttaatatcttagaacttatgaaaccaatcagtggtcacagagaatacgtttttccaagtagaataaaaccaactcagcccatgaatagccaaaccgttaatgcagccttaaaaagagctggctttggtggagtattagtttctcatggcttaagagctattggcagtaccgcactgaacgaacaaggttttcaagcggatgtgatcgaagctgctttagcccatgttgataaaaatgaagttaggcgagcatataatcgaagtgattacatagaacagcgtaaacctatgatgcaatggtgggctgatttcattactgcggctgatagtggcagcgtaatgagtaatggcagtcgtggattaagggctgtggtatga

SEQ ID NO: 311951 - DNA, 324 bp, Proteus mirabilis
atgacaaatgaagaatatcttaaccaaaagataaaatcttatgatagtgaagaacgtgtagctatccataacattaaagcagcggaatattctaatgaggaagataggactattgatattgaaacaaccaaaaaatactataatgagcaaagagaaaatttaaatcaattaaaacgaaggactaaagattcccccttatctcaagcatatgaacaaaacactcttagaaatacctatctctcagttatattaacatcagattcctaccaaaaatatgaatttgacagattaaagtgggataaaaacaatttaaaagaactataa

SEQ ID NO: 311952 - DNA, 195 bp, Proteus mirabilis
atggttaagaatgaacaagaaaaattactccgtattagtgaagtattaagtattatacctataggaaaatcaactttttatgcttggattcaagctggtaaagctcctcagccaatccgatttggtactcggtgctctatgtggcgatattctgaaattatcaactttattgaaaaccaatcaaaagtattataa

SEQ ID NO: 311953 - DNA, 591 bp, Proteus mirabilis
atgtatataacaacagcaataacgaatcaaaatgaaatcaacaaagatactattcgaaatgctataattttactaaaaagtacggatttaaatatttatactttaaaagtagcttcaaatggcagcttatatactaaagcattaggaaaagaaatcctgtctgaaaaaatagcagtttgggagaagcaaaaaaaacttttaacaaaacttcatggtaaaaaaaacttaagcatatcggcgcaactggactttattttaagtttcataaatcattacttattcttattaaaagatattaaaaaaccatttagaataaatgaattacatgaactaataaaggaaggctttatccttacaaatattggaaaattaatattaggactttcattagctttattagaaatggattacaaacttgaatattgtccagatgcagtaagagttccttttgaatcaaaatatggaagctgggggacacctaacggtttaaagtatctgatccgaaagacagcagaacacactgatattaatgatgatttatttattgaaaaagaattaaatactttttttaatgagtggcggtatgaataa

SEQ ID NO: 311954 - DNA, 660 bp, Proteus mirabilis
  misc_feature (626)..(635): n is a, c, g, or t
atgaataatatgatttttttaaacttagcccatgaatatattaaaagaaaaatacccatccatccattagttactggaactaaacgtcctgtagataaaggttggaataatgcacttattttaactatggaggagatagaaaaacaaattcatctttggctaaaaaaagggtatggcctaggtgctagaacaggctacccactatcaaatggagatttattttatgtcattgatgttgatattcatgagataaacttaacaagtgaagtaactcttgaactacatactcaattatataatctaggattagagccgaatttgcctaatgttattactggtagagataatggttcatgtcattattatgtttcagtacccaattcaaaattaacaacctttcttggtgcagctaaaactatttgcaaatcaaaatatgagcatgaaggcaagccatactggataattgaaattttaggtaaagggaaacaagttgttgttccccctactatacatcccgaaacaaataagccatacattttgaagtcattaaaaatcactgaggcttcaaaagaattacttgataccttggctgatataatgatagaaaaaaaacaattatttcaatnnnnnnnnnngtcaaaaatgtgctcaactttttga

SEQ ID NO: 311955 - DNA, 2010 bp, Proteus mirabilis
atggcgtcatttgatatcgaaacagatattacaaagttaaaaagtgctcttgaatctattaatgctgactgtaattatgatatctggagaaatgttatttgggcaatatgcgctcataacattatggatggcatatctatagcaaaaaactggagcaaaacatcaaataaatatgaagaacatacttttaatgcggtatgggattcctatgatccaagcggtggaattaatgcaggaacactttattatatagccaatgaacaagggtggaataatagtgaaataaaaagccttcaacaatctatacccaccgtcaacgattgtccttgcttccgtgtgtttaatgaaactgtaacacatagcactggaaactatcatgcaggagtatggtttttcaatgctaatgacgctaacgtaaaaggagaattagtttgcacacccgttactattgaggctataacctgtgatgcatctgaaagcaactttggattattattagagattaagaatccattaggaaaacttcgtaaatgggctatgccaatggaattgcttagcggaagtggtgagccagctagagctgtactcttatcattaggtgcctgtatttataataacaaattgttaaatacctactttaagaaagtaaaaccagctaaaaataatctttgtacctcgcaattaggctggtttgataatttatttgtactaccagactgtacatacggatcatatgaccaacatgaagttgtttttcaaactgctagcgagcctattagtatttattccacaaaaggtgaattaactgattggaaaaatgaaatctcagcactagctgttggtaaccctcttttaactaccgcaatatgctgcgctttctcgggagctttaattgagccatgtcatgctgaaagtggaggtttacattttcatggcgactcatcaacaggtaagacgacattagtccaaacggcctgttctgtctgggggggaactaacttcatgagaagttggcgagcaacagcaaatggaatagaaggcgctgcatcaatgtttaatagcacactattagcattagatgaaattagtgaatgcaaaccaaccgaggtgggacaaattatttatgctttaggaaatggtcaaggcaaacaacgagcgtcaaaaacaggggtagcaaaagcaatagcaagatggaaaactgcggtcatatccagtggtgaattaactacatctggcacagttgaattagcaggtgagaatgtgaaagcaggacaatctgtaagactactagatatatcggctcagcgttcttatggtgcatgggataacttacatggttttagctctggaagtgcattttctgagcatttaaaaactcaatcctctgtaaattatggtatcgccggtagagaatttcttattcaccttgtcaatgaaaaacagactctaccaataaagttacaacagattatgaataaaccagaattcaatttagataaagcaacagggcaaactaaacgaatagcaaaacgttttgcacttctagcccttgctggtgaattagctactaattatggtataactggatgggaatctggatactcaacaaatgttatgtccgaaatgtttcgacaatgggttgaatcaacaggaaatattccgttggaaaaacagcaaattattagacgggtgcttgattatattgaatgttatggagacagccggttcagcaatataaatttatctccaacagagcggtttattcatgagcgctcaggctggtggaaaacatcagataatggtgaacgcattttcttttttaattccaatggccttagaactgcaacaaaaggatatgattttaaaaaagttataaagacattaattgatgaaggaattttgcttctaaaagaaaaaaaccaacatgggggggatagaattagaattaatgggcaacaatgtagagtatatcctattcaattttctaatacagataatattgaggagtaa

SEQ ID NO: 311956 - DNA, 666 bp, Proteus mirabilis
  misc_feature (583)..(592): n is a, c, g, or t
atgataagctataaaaaaacaatgcgttttttattgtatttaagcttcggtttattttcaaacccagtactatcatttacttgtaaagtcgcttcaacgggacaaattgtcggtgatggtgctgctaatatacgcgttaatttaacgcctcgagttgaagtaaaccagaatttggtagtggatttatctcaacaaattctttgtaaaaatgattcttatggtggacctagagatccaatagacgttgaccatgttaatttagttagtggaacgacttttggaggcgcgctgaataattttgacggctctttattatggtataacagttattatcctattcctctttattacgatacaaaagttattaatattaaagacagaaattttatcccactaaatcttagattgtatttgaaaagtattggtgctgcgggagggaagcaaataaataagggggatttaattgcaaaaatagaaatgtacaaaattgcagattgggatggtgggcaccctcgtttttttacatggaatatttacgcattaaatgatgttattatgcctactgggggctgtgatctttctnnnnnnnnnnatatccgggtaatgcgcaacctattcctttatctattttttgtcctagacaacaaaatatttcttactatttaa

SEQ ID NO: 311957 - DNA, 240 bp, Proteus mirabilis
atgttaattataatgaaattaataactatattaggtttaatgattttgatttatgctgtaatcgctatgattaatggagatacgtcatttctagttatactctcaagtatatttggtttctttgccagtatagttcctgtttttttgaaaaaaaaagaaaaacctagtagtacacggataaaacaaatttcagggaatgattctattaatataaactcaggaagagatactaaattatga

SEQ ID NO: 311958 - DNA, 879 bp, Proteus mirabilis
atgataaccgttaattcttatttcagcggtgctggtcttatggatattggccttatccaagctggaataaatatagggcaagcatttgaaattgatacatccgcttgcaaaacctaccgtcataatttaggcgatcatattaaagagagtgatatcacaaaagagttagttttagaacaagactcatgtgacggaatgattttcacttatccatgtaccaagtacagcaccattggtgatattcacggggttcgcactggtgatgaattgtttttgcatgccttacgtcacttagctattgcacgacctgagttttatgtcgttgagaatgttcctggtatgaaagcattccctgttgttatggaagctatgcagagaatgccagattactacgttaatgttttttgcccgattaaatctgaaatttggttaccgcagaagcgtagccgattaatcatcattggtacgaaaaggagtttcacaccgcgccaacctgaaaaccataagccaattaaactagctgacatcctagagaatgagcctgacatcaatatacccaagtcggtctactctagaatgaatggcgtatatcgtgacttaccaataatcagcgacccaaccaatgacgatatcgccccaacctgtgttgctcactatgcgaaagataaaagcactcgcctggtagctgataaaagatttccgatgggcgttagaccatacacagtacgtgaatatgcaaggctacaaggtgtacctgattggtttcaattcccagttagccagacagatgcatacaggcaaataggaaacggcgttagtgtacaggttggtgaatggataggccatgaaatcaaacggtatatcgcagggatgcaatga

SEQ ID NO: 311959 - DNA, 696 bp, Proteus mirabilis
atgaaagagcgtggaattatttttaatgcggaaatggtacgcgccatccttgatggccgtaaaactcaaactcgtagaatcatgaaaccccaaccaaagacaaatgaaaatggtgatatatggtggcctagtaatatatgtcagtccatgatcaatattaaagaaatgatgcaggacaacgagggtgtatgggctggaattgctggtatatcctgcccgcacggtggtgttggcgatcacctttgggttcgtgaaacgtggagtgtagtcagtcatgagtttgatgatgatggattgatgattgattatgttcctgatagaccaactaaaactgtgcatgaaatgccgtatggtcatggttatttcactggacatgtcatttactctgctgatggtgatttcacgtggggtgacgatgatggttgtattgatggtcgttcttgctggaaaccatctatacacatgcctcgctgggcttcacgcatcacgttagagatcaccgatgttcgtgtagagcgtttaaaggatgctggcgatactgagtttaaagctgaaggttaccctttagaacgtgaattaactggcggtagtatggatccgttttgctggtttcgtaacctttgggattcagtgtcacctactaactttaaatatgcagataatccgtgggtgtgggttattgagtttaaaaaatag

SEQ ID NO: 311960 - DNA, 1422 bp, Proteus mirabilis; identical to SEQ ID NO: 306444

SEQ ID NO: 311961 - DNA, 546 bp, Proteus mirabilis
atgaatattataaaaacagaaattcctgatgtattaattttagagcctaaagtattcggtgatcatagaggttttttttatgaaagctttaatcaaaaaatctttgaagatgcggtaggttatccagttaattttgttcaagataatcactctaaatcatcaaaaggagtattaagaggattacattatcaaaaagcaccacatgctcaaggcaaattagtacgatgcgttcacggtgaagttttcgatgtggcggtagatattagacctgaatccaatacatatgggaaatgggttagtgcgatattatcagcaaaaaataaacgccaattgtggattcccgaaggttttgctcatggttttttggttttaagtgacgaggcggaatttctttataaagcaactaatttttatcaccaaaaaagtgaatctaatattatttggaatgatcctgatttaaatatagtctggcctattaaagataggccaacattatcagaaaaagataaaactggcatatgttttaataaattgattggaatgtaa

SEQ ID NO: 311962 - DNA, 984 bp, Proteus mirabilis; identical to SEQ ID NO: 306071

SEQ ID NO: 311963 - DNA, 192 bp, Proteus mirabilis
atggattttgaatgcggtgatataaatgaggggcgtagccataatctacaaaaattaatagtttctagtctagagggattaactggctatcaacttataatgaccacctctaaaatagaacctacacttaataacgataattatggtgttggtcgatactataataaaaacgattatattattaaggtataa

SEQ ID NO: 311964 - DNA, 702 bp, Proteus mirabilis
atgaaaaaagtattactcagtcttgctatgctgagtgtaatatcaacgccggtattggctaaagctcctgtagctaacttaaaaatcaatggtgatattaagccaccaacttgtactattaatggggcgacacaaagtgatgttatttttgattacggagtcataagcccaacacttatccctcaatcgaaaaactacgagtatcctttagctacaggtaaaaataccgttacggttgaatgtgatgctaaaacatatttaacctttgttgcatctgacacttatgacagtgcggaattagctaataatacgctagcacagtttcatttagttgataaagaaaatcctgaaaccgcagttggagcagcctcttttttgtgggaggatgtgactgttgatagtaaaccagcgtacatttcacgagcaaatgatgttactatcacagaaacaaattactataacgttctatacaaaggcgcaaccaatggttggacatcagaacaacaaaaaggcaatgttagtaaagaatctctggcactaattccaggtgaagttttccaagcagtttttaaagatgtatataaaattccttcttttcttttatccaaagatgcattaaataaaaaaggaatagatttatctaatggtttagattttatggggaggctgttctcacttttaactttggtgtctaatttttaa

SEQ ID NO: 311965 - DNA, 684 bp, Proteus mirabilis
atggagtttttagaaaataaaaaggagttattagaaattaatcaaatcattaaaagaaaatcatcagaactggttattttatccagtcaagagcaacaatatataaaaaatcgcgatagattagaaaaacaaaaacacctagagtggcatgacaaatttaaacaatatgaaagcgaagtttttatttatcaacaaaatctttatcatgttcagaaacgtcaacaattaaaaattgttcgttctcctgttacaggtacagtacaacaactcgctgttcataccctaggagccgtattgcaaccttcacaagcggtgatggtgatagtgcccgatactcagcataatgttgctgaggtgaatattctcaataaagatattggttttatctatccgggtcaaaaagcggtgattaaaattgatgcttttccttatacccgttatggcaccattgaaggcaccattgtcaatatagcaaaagattccatacaacatgaacaattaggcttagtttatcccgtcctgattgaacttgataagcaagtgatgggtgaagatgaagcacaatataaactggctacaggtatgtctttagttgccgatataaaaattgaaaaacgtcgagtgattgattatttactcagtccaatagaagtttatcaacatgaagcattaagagaaaaataa

SEQ ID NO: 311966 - DNA, 321 bp, Proteus mirabilis
atgaattccatcaaaaaacataaagatatcttttgcaaacgtttgaaagaagcgaggttagctgctggtttatctcaaaaaagtctaggtatcgcggcaggaatagacgaatttgtagctagcacacgtatcaatcgttatgaaaaaggggtccacgaagtagatattggtaccgctcaaaaattagctgatgtactagatataccattggcatacttttatactcaagatgatcaattagcacatgttgtaaaacactttaataaactacctaaactattacgagaagatataatacatataatcaaggctactaagtaa

SEQ ID NO: 311967 - DNA, 201 bp, Proteus mirabilis
atgaacttacgaaaacatatattttatatgactcctaatattgccccatatatcaatgattatcacttctcattatttatagttggtaatcatgaaaggcttccagcggaaataaaatatccagctagaccgacaaatcgacaaatacggaaagcaactaaatttgtaatgagtcacattaaaaggtggaatgatgaataa

SEQ ID NO: 311968 - DNA, 339 bp, Proteus mirabilis
atgacagataaactcaaagaagaaattgaaaaattacagaataacgctgctagtgaactggttatgtcttggtatttggcaagattagccaacacaatattaattgcgtgttattcgcttgataaagacaacgtcagccttgccaaagagtggctgtttggggctatggaaatgtggcctgaagttgatatttttgaagatttaaaaggtagcaatggtaacgctgatgacctgcaagcttggtttgataaaggcatggaaggagaaaaaaatcaatctcaatatctgaaaatcattcgcgagcaatatccagaaattgaaaagctacggacagcttaa

SEQ ID NO: 311969 - DNA, 198 bp, Proteus mirabilis
atgttaacgaatacctacggactcagaaacgactggtacgaacgccaaatggaacgagaagcgtttgttaattctcaggaagagaaaatatcagttgatgaggttatggatagcctaccagaagaactactgtgcatggatttagcaaggaagtcccggtatttgaaattagccctcaggtgctggatgccgttttag

SEQ ID NO: 311970 - DNA, 573 bp, Proteus mirabilis
atgagtaatataataaacctttcagatgccaaaaggtttaaagttagtttggtatcaggatctgatttttcttgttcatttgataaacaaaaaaagggtggatatactgctcaagaaaaggatatagatgtaagtgaggatattgacatgaccagagaagaactagatgcaaaactagctcaaaacaaagccgaagtacaagctatcgcctctggtatgcgtgaggagatggctacttggcgtgaaactcaaaatgccaagatggatcagattagtgccactcttactgctatgtctgaaaaaatggatgctaaatttgaaactctagacaccaaaattgatgcagtcgataagtcattgagcggtcaaattgacggtctgaaatcatcatactcatcagtacaatggatgttggggatcatattagctttattagcaataatttttgcgattccacaggttcaaagctatttgaatctatcagagccagccaagcaagtgcaacctactgttatttatgttcagcagcctaatgtagcagaaccaccacaacctacaaacaactctaaatag

SEQ ID NO: 311971 - DNA, 477 bp, Proteus mirabilis
atggtgaatgtaatgaccaataaagaaaaaatagagcgatatgaaaagattagctttataactccatttagtgagaaaaatgataagctagttcccgtaactagcatttatgcttcaccaacagccaaaacgattgaccttaaattctatgttggccttgttgggttaaaaccagatcatagttaccaattcaaagtttttataaagccaattgatatatcagttaaagttggagaaacaagagggtttatcaatcctctaactgaggctttttcagtcactataaccaccaaaaactatgagaaaaaatacatcgaaggtggttttaatgtcgatatggaaaatgttgagttaacagcctgtggcttatatcaagcagatagcatcctttatgatgtagatgaagtaaataactgtgaaatcgaaatacattcatcctcaaccttttttataataaataacgaacgtgatgagtaa

SEQ ID NO: 311972 - DNA, 270 bp, Proteus mirabilis
atgaaaggaacaacgttaagagagttgaatagatcataccgtcggcaagctaggtttatcgctggtcgatatattcatgccaattttagatatttcacagacaaaacagactcaatattttttgagcttgaggtggtggccgataaacatagaccacgcggaaaagcatatttgcgattaatggaaattgagaatttaaccaacaccatgaagtttaaagcgttgcaagaaaaaattcgccagcaggaggtatctaatgcagggagctaa

SEQ ID NO: 311973 - DNA, 384 bp, Proteus mirabilis
atgaacaagtcagctttattcacatccgctcataaaattgctaaagaaacagtttctatcgttggcgactaccgaatcgcattcatgttagctctgcgcagtttatataacagagttgaatcagtagaagataaattaattaaattaggctgttcaatttgggaaaactacggtaaacgtcgcatctacattaacaatgaacaactggagtctgttttcggattaagagtcaatacatacaatacaggcaatatcagcaatgcatttatgaataacgagaaaatttccaattctcgcgcatacaaactattgtcagtaaaaccttattttgactgcgtaactaattcatgggttcatcacgaaaatttatcaccaatcatttaa

SEQ ID NO: 311974 - DNA, 375 bp, Proteus mirabilis
atgaaaatgaaatttgattttaataaattaattaatgtggctataaatgtaataatttttttatctttctactttggtattacgatgaatatcgatggcttgattaacattggatatttttggatttggttattaacgattctttatatttctatactttcattaggaaagaataaaatagctgaaacttataaacatcaatcagcaatttggcgtgtatatgaggttttaacagacatactctatgtttctattgctgcttattttggatggtttgtattggcttcattatttatttttggtgcaatatttaaaattggcatgaaaattcagctagaagatgaactggtgaaaaaatcatgcaacaaagtgtaa

SEQ ID NO: 311975 - DNA, 2247 bp, Proteus mirabilis
atggataaaatcgaagtacggggcgctcgcacccataacctaaaaaatatcaatttggtcattccccgcgataaacttattgttattacgggactttctggctcaggtaaatcctctttagcctttgatacgctttatgcggaaggccaacggcgttacgttgaatcgctttcagcttatgctcgtcagttcctttccttaatggaaaagcctgatgttgatcatattgaagggttatcgcccgctatttcgattgagcagaaatcgacatcacataacccgcgctcaacggtcggcaccattaccgagatccacgattacctacgtctattatttgcacgtgtaggtgaaccgcgctgtcctgatcacgatatccctttagcggctcaaacggtaagccaaatggtggataatgttttagcgcaaccagaaggtaaacgcttaatgttattggcgccaatcgtaaaagagcgcaaaggtgagcatgtaaaattactcaataatcttgccgcacaaggctatattcgtgctcgtatcgatggtgaagtgtgtgatttatcagatccccctaccttggagttacagaaaaagcacaccattgaagtggtcattgaccgctttaaagttcgtgacgatctggctcaacgtttagcagaatcttttgaaacggcgcttgaattatcaggaggcacggcggttatctctgatatggacgatagcagtgctgaagatattgttttttctgcaaactttgcctgtcctatttgtggttatagcatgagtgaactagagccacggttattctcttttaataaccccgcaggtgcgtgtcctacttgtgatggtttaggggttcaacaatttttcgatcctgatttggtgatccaaaatcgagaaatttctctggccggtggtgcgattaaagggtgggatcggcgcaatttttactatttccaaatgttgcgctcattaggcgagcactatcattttgatgttgaagccccctttgactcattacccgataagatccaaaaagtgattttatccggttcaggtaaagaaaatattgaatttaaatacaccaatgatcgaggggatgttgtggttcgccatcatccttttgaaggggtattaaataatatggagcgccgctatcgtgaaacagaatcgagtgcggtgcgtgaagagttagctaaatatattagcaatcgtccttgtgcctcttgtggtggtactcgcttacgtcgcgaagctcgccatgtgtatgttgaaaataccacgttacctgaaattgcggattacagtattggtcatgcgatgagctttttccaaaatctaaaactcagtggtcagcgagcgaagattgccgaaaaagtattaaaagagattggtgacagattaaaattcttggtcaatgtgggattaaattacctcactctttctcgttcagcggagacattatcaggcggcgaagcgcagcgtattcgcctagcaagccaaattggtgctggattagttggggtaatgtatgtacttgatgagccttcaattggtttgcatcaacgtgataacgatcgcctactggaaacgttgatccacttgcgtgatttaggtaacacggtgatcgtcgttgagcatgatgaagacgctatccgtgccgctgatcatattattgatattgggccgggtgctggcgttcatggtggtgagatagtcgctcagggtacactggaagatattgttaataatcccaactcattaaccggtaaattcttaagtggcgaacgccgtattgctatccctgaaaagcgtgttcctgttgatcgcgaaaaaatgctcactattttaggggcgaaaggtaataacctaaaaaacgttaatttaaaaatacctgttggtttatttacttgtattaccggtgtttctggctcgggtaaatcaaccttaattaatgatacgttattccccattgcccaacgtcaattaaatggcgccactaatagcgtgccagcaccttatttagacgttgagggattagagcactttgataaagtgattgatattaaccaaagtcctatcggtcgtacgccacgttccaaccctgcgacttataccggagtatttaccccgatccgtgaactttttgctggtgtaccagaatcacgaactcgcggttatacgccggggcgctttagttttaatgtgaagggggggcgtgcgaagcttgccaaggcgatggtgtattaa

SEQ ID NO: 311976 - DNA, 1554 bp, Proteus mirabilis
atggatatagaaagcaaattagttgatatctttcgcagtcgttcggcaggaccatttctttttttgggatctggattctctagaaggtatttggggctagaggattggaaagggctcctcagtaaattctgtgtagctggtaagccattcgagtactacttatcatcggctaatggtagttacccaaaggttgccgcattacttgctaaagatttcaatgaatattggtggtctgctactgagtattcgcaaagtgtagagcgatataagtcaaaaattaaagatgaaacctcagcactacgaatcgaaatatgcaactatctttctactctagatcaatctaaagcgaaagaatcagactatgctgacgaagtaaaactactagccaatttgaacgttgatggtgtaattacaacaaactgggatatgtttattgaacagcttttccctgaatacaaaacctatatagggcaagaagagctactattttctaatccgcaagaaatcggtgaaatatacaaaattcatggttgctcaacgagttcaaattctttgattttgactgattccgattatgaatctttcaatcagaaaaatacctatttggctgctaagttaattacattatttgttgagcatccagtggtatttattggttactcgatttcagatgagaatataagtagtttgcttaaggcaatatctggctgcattggtcgagataatatagagcagctcagaaagaatctaatatttattcagaggcttgctgacggtgaagacccgaacgtatccgatacctatttgacgattgatggaattcaaattccgcttgtattagtcaaaacaaatgattttcttcccgtttataaagcgattcattctacaaaacgaaaaataccagcgagagttcttaggtactgtaaggagcaattatacgaattggtgcagtcttctgagccagagaaaaaaatatgcgtggttgatattgatgaaatagaaacaaaagatgatgttgaatttctagttggtgtcggggttgctcagcaagagtttgtagggccatctcctattggctacgagagtgttagcactaatgatctttttgaagatttgctacacaatgaaaaaggatacgattgcgagcaggttttaaagcatgtggcgccccgggcttgcaagtcaacacctaatgttccagtatttatgtatttgcataagtttggcattatcaatgaacagggttacagagattcaggatttaagttagataaggttgttttcagagatctgaaaaaattaagaatgaattcatatgctaaaccgttttttcgtaattatcggcatatggatatgagacagattctcgaagcttgcacacctgagaatgctgctgcatacattccatttcttagtattgataaaattgatgttgagttattgcaccaatttttgattgataatgaagaaaaattcgaatatgacgtttcgagctatgcaagtagttttagaaaattagctacactttacgataggttaagatggggatggtga

SEQ ID NO: 311977 - DNA, 1053 bp, Proteus mirabilis
atgcaagctgagatgagcatgtattctacctcgcaatattcaggaaagccgacactatacttagatcacaacatactcgatctcttcgttaaaaatggcgtgggtagttttgggcgagagcttatggacaagttccagattgtttattctgatgaaactctcaaagagataagacgatcttctggctatgaacacgactttcttaatgttctaaaagaccttgattcctatcatttaaaaatcatttttgagcagcctggcttcattgtaactgacaaagcgaccatcactagcagggatgtatttgaagcattcgaagaacactgtagcaatgataatgaatatggaagtattgaaaattcaatgcaccagtggttgttcaagttctctggcggaaggcctggtgatagcatttctgatattcatgaggaacagttggttgcttttgcacagcttatgggggggatgctcgaaaacgctgatgaacttcctgtcgaaatgagggcgctgattaaagagtattccgagctatccgagctaatgatagaacaatataaatctacgcttcataagcttgaaaatacgatgtcaaaggacattcctgatacgaaggagtggaatggaataaagtcctacagagagtcagtggatataggcccaatgaaattaaataacatagagccaccgaatgtaatcgaaaaaatatggggtgttttcaaatttaagcttcccaaaaacgaccacatcaacagcttagaagactttttccagatccgcataaaccctatcttccctaacagaccctaccatctacaccagaaagtaaccagtatgtataacatgcttaacactcttggctacttccccgactccaagttacataaggaaagacgatttattgccgctatgagtgataattgtcacgcatcaatggcctcattttgcaatttgttattgtcaagagatgagaactttgtaaaaaaggtacgggcggtttatgagtatcttggagtacaaacagaagtaaggttggttacggtaagcaatgtataa

SEQ ID NO: 311978 - DNA, 642 bp, Proteus mirabilis
atgagtagccgtggtattttttctttattatcttcaaatcaagcatatcaaaatgcagaaaaagaatggcatatagaattggatttttactataaatattggtatgacttagtggcaagaccaacagatatgcttgaacatgtagatactaaacgctctatagttagttttcttaaaaatttaaaaaatgaaattgaagagaaactagaaaagagatttgtttactttatatgttctagagaaagggtgaggtttaatataaaaaagaaaccatcatataatccatttacgggaaataaaaaaattcatattttaattggcgagaaagaatataaaaaaaccataaggtgtaagttttttgatgaagaaacaaaaaaacattataatcctgagatttatttaagagataagtatataacaattaagtttttaaatggtaattcatgtaccatgacaatccatgactttttagaagcgacaaatattaatcttggtattgatagtaaagtcgaatacgtaggttttactaaaaatccagatacaaggcctactaatggagctcatactggattgaacgatgttatctataatgttatagatgaagaaaaaacttcatattcattattgtcagaaagagcatag

SEQ ID NO: 311979 - DNA, 2583 bp, Proteus mirabilis
gtgacgctaccttcaatatctttaccaacaagaattgaccaagcccgactgaaatggatatcgttacagcaacaacatctctattttgcccctgtacgccaccatagcccagcttgtgcttatgcagttttatcattaattgattctgtaaaacctgattatatcttaattgaaggtccggatacctttaattcgcttattcctagcctaacggataaagatactctccctcctgttgctattatggggcaagccgaatattgtcatcataatagtagcctagaagagcgtgaaaaatcgctacactctgcctacttcccattttgtgaatattcccctgagtggcaagctttgcgaggtggtttacgtatcaatgcaacaacacgttttatcgatttaccttgggctgctcaagtcaataacgaagagtatagcgatctacaaagccgtagcttacaaaaagaacgttatttagcccatagccaatttattgcacaattagctaaacaatgtcattgccgtgatcatgatgatgtttgggagcatctttttgagttacgcagtattgaggcattagcagattggcaaactctgtttaatgacatttttatttggtgtgcacttgcacgccttgactatgaacctgaagtacttgcatctgagggctcttcacaacgtgaagcacatatgctcactcatattaaaaccatcaaacagcacgagcctaatgccaaaatattaatcgtcacagggggagcccacacccttgcgctaatcgaaggcttagcttcttcacaaccccactctttcgctatttctagctcagaacaaaagcactttactaaaatgcaaaaaatgggcgaaaaagagcaagcttggcttattcgctatagctttgacagattagatgcacttaatggctatgcatctggtatgccatctccggctttttaccaacaagcttggcaaagcttaatgcaacaacatcatgataaattagaaaacaatgaggcggcaaaacaaccaacgcaagtttatcgcaataaaatgggcatcgcctttttaagctcagtggctcagactatcagagaaaaacaatttgataatccccccagttatttaaccgtaaaactagcagccgagcagagtttacgcctcgctttactaagagagcacactggtatggggcgttatgatttgcttgatgggttacaaagcgcctttattaaaggcagtttagatgacagtcaaaacgaattatgggacgaaatcaaaacctgtttttcaggttatctattaggacaaattccattaggtacagcaacgccccctttagtcaatgaaacctatgaacgcgccaaagcatttcgctttaaacttgatgatacattagcaaaaactacaaaatgtgatgtttatcgtaacccccaacatcgcttaagaagtcgttttttacatttattggcatttttagaaatccattttgcccaccgtgtcaatggacctgattttctttctggtcaccagttagatctattatttgaagaatggcaatatgcatggacccccaatgttgaaggtgaactgatttcattatcagaaaaaggctctcaacttgaaactatcgccttaaataaactgttagcaatggaaaaacagcttgcagaacaaggacaaagtcgttcaagccaaagtgcggtcactttgttaattcaagcggcattaattgggctccaccagcgtatccctacgctatttaaactgctagatagctatattcagcaagattttcgccttgagtcattaacacaatgtggacataaattgatccatttatggcgaggtcgtcaatatcttgatattaccgatgagctgacattggaaaataggctacatcaagtgatccctcaagccttcttttgcttagagcaattggctcaaggtgatgagcaacaacaagaaagcaatctgcaagccctactctctttacgtgaactcattgagtttatgccatcactgaatcatcaacatgattataaaagtgatttttatcagcaacttaatcgccttgatgggcagttagataccgttcctttattaaaaggtgcggtagatgcattacgttatctaggttcgtatattgacgaaaagaccttagcggccgtgctaaatgcgacctttagtacaggcagctctcccgaacatgccattggttattttgtcggtataatgcgcaccgcaccagagctagtcattcgcctaccgttgttagtcaatcacttaaatagcttattacagcaatgggatgaagaacgctttattcagattttacctgatctgcgttttgcctttagccaacttaatcccaaacaaaatgcagagcttgcacaatatattgctaatgatattggtttagatacgcaagccttatcactatggcaatcagaatttagtgccaagcaaatgcttgaagccactaaactcaatcaaaaattgcaacagcgcattaagacacaaggcatgatttcttggtttgaggcgaagaaaacagagaaaggagaccatactcatggagaagcatga

SEQ ID NO: 311980 - DNA, 828 bp, Proteus mirabilis
atggctaagattgaaaaattagattttggtgttattgaagccattagtaaaatattaggtgatacttcaactggttttactggtactgaaattggtaaagctttatacgaatcaaaaattaaagatatagaccctataaataccaagtggaaacgcttaaattcagctattgcgaataaacaagaagaagatggttgtgctaacaatgtgcttaatttcatacaattagctatggctcctgcaaagcacctcaataatattgagtggttcaatgatacacgttacaaactaaatcaagcacttagcttcgctggttatacactaaacgaaaatggaaaaattgccaaagtatctaaagccaacactatatctgaagctgctatacgagcaagcaaattacacgagcatctaaaatctagaaatgctcatcccgatatatttatatactgccgagaagaattgctagtagataactattttcacactgtatttgaggctactaaaagtgttgctgataaaatccgtttaaaaacaggattaacttctgatggagcaactttagtacaagaagctttttcattcaaggggataccttatttagctttaaattcacttcaaactgatagtgaaaaaagtgagcaaaaaggttttattaatttacttgtaggcttatttggtacttttcgaaatacaacagctcacgccccaaaaataacttggaaaattaatgaaattgatgcattagatatactatcaatggtctcgttaatacatcgaagattagatgtagctatagaagcaaaaaaaatgtatgaaaatagaatttaa

SEQ ID NO: 311981 - DNA, 1161 bp, Proteus mirabilis
atggaactggaatttgatatccaaaaacgattaggtaagttctacattccaatatgggctggctgtgataaatccgtagcggctgccattacgatgtttagggaacaatggcattcatattctcaagtttccaaaagccataatataaccagattaatcaaggaattagttgacccagctgtatctgaatatttgagtaggcttccagccaactatctacgatatagtccaatagcgccagctaagctaacttacagcgatttaatcaaaatgagaggttttcgttactgctctgattgtattggtgattatcttaggccttttgttgaacattctacgtatacagagccagataaattatttatagctactcaagaaacattaaaaagcttattttcccactgcaaagcaaaacgcccaaaaagatcaaggctcgcacctgatatctattttaatacggaaagaggcaaaggattatgccgtctttgtggcaacccaactgagttttcttcatttattacaaattgggataatgatggttttattgaagatgctgaagagaaatatgggctaaagaaagggcctgatcttagccataaatattgtgctcaccataaaccacaattgaaagatggctcttggaacccagcctataaacaagcaattcgctcctctaaacaatttgaattggaagttttaagattatgtcgccaaatagctaaccctgagcgtttaaatgctatgtctggtgatgacctcattgatgagtacttttattattatcttcaagataaaacaattagtgatacccaagcacacgcttgctttgattatattaaaaatacgttttctaacccaatagttgtagatgaaaaaacatatgaaaaactagttaatatagttaataatatgacaaatgtaggagtttctttagggcctgatgatatagataagatacgcaatattgccaggaaaatggtcaattcacgtttatcagataataaaaagcgcatgttagttttaagcaaaaaaggttttaatcaacgagagataactgaaataatcagttcactgacaggtaaaaaattatcacaccaagctgtttctaaggccataaaatcagtttgtactgtatttcaattaaatactcctaaaaattaa

SEQ ID NO: 311982 - DNA, 237 bp, Proteus mirabilis
atgaataatttattttttatcgtgttgactttattttgcgtttttttaactgggtgtgaaaggacaataatagaggctaataaaataacatgccatgatgataattatgaaaagtcattatcggaaattaaaaataaacatttgcaggaaatatttattgatgaatgtagcgccataagaaaatcgaaggaaatgagagagtggaaatttaaatcaagtccagaagataaattttaa

SEQ ID NO: 311983 - DNA, 1410 bp, Proteus mirabilis
atgcctatagacgactcagatcttcaatctgtgttattttctattcagcagtcgatttctcagattaataaaaaacttttaattactataccttttcatctacatgaagatatcttaaattactcaaagataattgaagaattaatttccaacagccaacttgaaaaacaaagtatcacactcaaagatttcaaactatctcaagccaacgctttctcttcatcaagaaccgtaaagatagataatcaaagttatgcgttcacgaatgtactgataataaaccccaaaatgaaagagatcgtatcatgcgaaataaaacatctcgctctgataaatggatctgagcatatttacgcttaccaaaatgatgaaacggtatacattatttcactggcaaattgtttaagtgttatgtatacaactctccgagagcgttacaacgttataataaatgaggaaaagtttgaacatagctacccttctattacgttgttggagggaaatataacctcattaagcggtttcgatgatgcttcagttgtaattaggcatcataatgacatttcaatacaagaagcggaaaatagactaaaaaactggctacaccacctgccacaaaaatttcatcagccattaattaatctgattaggtcacatgaatacatgttagaaagtgagataatgtcgtttagagataaggtaaaagaactagatttgccaaacagcaatctctttttgatcaaagaagtttctgatttcaacggcacgcatagaatcctctatcgagacaatgatattggtagagaagttgccacattcacaccacgttctctcaccaagagctcaaagcaagtaaccctaattacagatcttgtccttactgggtctcaagtgattagagctttaaagttctatttaaaaggtgaaggcagccgaccaagcgataactactttaatttgactaaagaagatcatacaaatctatttaatatatttttagagcttgaaacacttaatatttgcactgttctctataccaaagatgctattcgaaaaatagaagaggaactacaagtaacattagggaatcagatagtagttaatgttgttaatgggagagatattggtgacaatgctttttttggtagcacaacaaagataaatcaacgagataaatcgattataacagatttattgctcgatgagcttgctttatctaatctatatgaccatttatcctattcaggcacatatgtaaaatttaaagatgaaaacgaaataaataaaattaatcttgttgccagatatcaatctcttccaaagaagtcatttgggtttttaacgtgcagtactaagtccgaggaacattgtaagccgtttaacagaatattagagttggcagataaataa

SEQ ID NO: 311984 - DNA, 786 bp, Proteus mirabilis
gtgagaaatgtaccgttagaaagtgttgatctccttgagagagatgtgattgcgctgggtacagattatctgcctaatacgctattagaaacgcatcgacatcgacgagcacaatttttatatcccgctaccggattgattgaagtgagcacaaatgatggggaatgggttatccctccctcttgtggtgtgtggatccctcctcaaacggggcatgaaacacgcatgttagatgtgagtaccagaagtttatatattgagccagcggcagctcctcgtcagagtcaacagtgtgaagtgttaagagtgtcaccgcttttacgtcaattacttcttgaagccgttgatgtgcctgcgcaatatgataaaaaagggcgcgatggtattttaatgcaacttatcttatatgagttagcgaaagccgaacctttgcctttctttgttcctattccacaggacagtaaattagctaaattatgtcgcgattttattcgtcagcccaaaattgacgctctacctcagcagtgggccgataaattacataaaagtgaacgctcgtttagccgttttttccgccaacagacgggaatggcattttcacaatggcgtcagcaagtctgtcttttaaactcacttacgcaaattttatcagggcatagcattaccgctgtggcttttgatttgggctataacagtgctagctctttttctactatgtttaaaaagcagatgggacaatcaccttctcactttagtatggatggattgaacgtcgatcatttttga

SEQ ID NO: 311985 - DNA, 1461 bp, Proteus mirabilis
atgtcaaaaggcggttcaaataataatacaagtcagaaattaggactgcttgcactggttgcaattgtaattagctcaatgataggtagtggtgttgatggattaccacaaaatatggcagcaacatctgaaattggtccggttattattgcttggctgatttgtggttttggcatgtattttattgcgcgaatttttatggtgctgtcagatattcgacccgatcttcaatcgggtatttatatgtatgctcgtgaaggctttggcgcatttgttgcttttattgttgcttggggttattggttaatgaccatttttagcaatgtagcttttgcgattatggtgatggataccttaaattatttcttacccggagattttaaaggtggcaacaatattccttctattattggtgcttctatccttatttggggattcaattatcttgttttatcaggtaccaaattagcaggtgcgattaatattattggtacttttgctaagttaataccgttaagtatttttgtgtttattctagtctattttttaaattatgaagagttgactaataacttttggggaaattccgccacaatcccagcagataatctaggtcccatacctgcacaaatattagcacctttagatattgccctatggtgttttatcggtgtggaaggtgcggtggccttatcaggtcgagcgcgcaataagaaggatgttggtaaagcaacattaataggatttattgtctcattgattatttgtatttttatctccgtattaccctttggcgtattaccgcagaaagcactgagtacaatacctacaccatcaacagcgggaatattgaaaacagtcgtcggagattggggagaatggttaatcaatattggtgtattagtttcggtattaaccagttggctagcttggacgatgatttgtgctgagatacccatggcggccgctcaaaatggtacatttccaaaagcgttttcagtgaaaaataaaaatggggcggcgtctacgtctctgtgggttagtagcctctttatgcagttagtggtctttgttgtttatttttccaataatgcttggttaacaatgttagctatttctgcattaatggttttgcccgcttatttgactagctcggcttatttattacaactttgtttatcggataattttgctaaatatgctaataaaggaaaaacctcagctttaattagtggacttattgggctaactttttgtttatttatgttttatgcctgtgaaattaaatatttatctatggtgcctattttactgacattaggcattcctctatttatttggtcgagatatcaagaaggacaagaactatttagtcctatagaacgtatattatttatttttattattgtgctggatatattaacagtttttttatacctaaatgattatattaaattttag

SEQ ID NO: 311986 - DNA, 2373 bp, Proteus mirabilis
gtgaaatttaatcatcatgtattatttgtctcttctgtggggttaaaagaagataaccccgcaaaacaggcattaaattcattgaagcaagcaatcatagagcgtggttttattgctcagattgcagataatattgaacacggtattaaatatataaaagagagtcctaagtatagtgccgtaggtattttttgggataaaaataattccaaaatgaatatagagggtgaggcctttatctcattatttagaaaaagaaatcctaacacacctatacttctcctttctgaagagaatattaccgatgatgtttctatcgatattcttaaagaggtaagtgagtatatttacctttattcagaaaccgcaacatttaccgctaatcgtatttataccttaatccatcgttatgcagaaagtcttttacccccctattttaaaacactaaaagatttcactgaagatggtgattattattgggattgccctgggcatatgggcggtatggcttatttaaaacatcctatcggtatcgagttcattaatttttttggtgaaaatatgatgcgagctgatatcggtgtcgcgactgctgaaatgggggattaccttattcatgcagggccttcaaaaacatccgaagaaatggccgcagagttatttggtgctgactggacattttatggcgtatcaggctcatcgggttctaatcgtattgtggcgcaaggggccatagccgctaatgaaattgttgttgtagatagaaattgtcataaatcactgaatcatgggttgactctttcacaaggtcgtcctgtgtatttaaaaccgacacgtaatggttacggcttaattggtcctattccaactcgacgactcacacaggcaagcattcgcactttgatccaagaaagcccgttaacagaagaagctgttagctcggaaccgacttatgcggtagtcactaactgtacttatgatggcttctgctacaacgttaatgatgttgtgaaaaatttagccaagagtgtacctcgaattcattttgatgaggcatggtatgcttatgcgcgctttcatcccctctataaaaatcgttttgcgatggacgtgtctgaggatataccggatcgtcctacgctttttgctgtgcaatcaacacataaaatgttgccatcactctctatggcatcaatgatccacgtgaaaaaaagcgcacgcgcccctttaaattttgatgactttaatgacgcttttatgatgcacggaactacgtcaccttattaccccattattgcttctattgatgttgcggtaggaatgatgaaaggggaatcgggccaatctctagttcaggagtctatagaggaagcgattgcatttcgcaaagcagtggttgcagtaaaacgtcaattaaaagagcaaaatggtgatcctgattggttctttgatgtactacaaccaactcaagtttgtgatcctaacacgaaagaaaattacagttttgagcaagcaccattatctttattaagccaagagcctgaatgttggacattaaaagtcggagataaatggcatggtttttcagatgaagatattgccgacactgacagtatgttagatcccgttaaagtgacgataacttgtcctggcattaccgctgatgggcagtatcaaaaaatgggtattcccggttatatcatgactaaattcttggatgatcgtcgtattgaaatcgccagaaccggagactatacccttttaatcctcttctctgttggggtgactaaaggtaaatggggaacgttattagaaagtttactgacttttaaaaagctctatgattcggatgcgttagcggtagaagctattccttcactaaaagaaatctcccctcaatatgccaaaataacattaaaacagctttgccaatctatgcatgaaaagatggatgagcttgatttaatgaaacatattaatgatgccgtaaatagcgttcctgaacccgttatgtcaccggctgatgcttatcaaaaggttgttcgttataaaacagaacacgtacatttagatgatttttcaggtcgtatttctgccagcatgttagttccttatccaccgggaattccagttttgatgccaggtgaacgcttacctaaaggggatgaaggcgttattggttaccttaaagccctacaaaattttgacaatacattccccggttttgagcatgaaattcaagggatcaatgttgatgcaaacggagatttttgggtaagagccattgttgaagacgaacgagtcgcaaaagaattgcctgcatctgtgaaatttaaacgccgtgtttcagcaattaaaaaaggccgtcagtaa

SEQ ID NO: 311987 - DNA, 1500 bp, Proteus mirabilis
atgataaaagattataagcgttggatagtcttacttttagtatcaagtatgctgtttctaattgttgttgatgttaccgtactttataccgcactaccgcgtttaactcatgatctcaatgcgagcgcctcagaaaaactatggatcatgaatgcctatccgctgattgtcgcagggctgttgccagcagcaggtatgcttaccgatagaataggccataagacgttatttattagcggattacccctttttgccatcgcctcattatgcgcggcttattcccctagtgccaccagcttaattatttctcgtggtttcttggctgtcggtgctgctatgagcatgcctgcaacgttgtctattgtgagacaagtatttactcatccacaagagcgtgccgtcgccatcggtatttggtctgctgttgcttctggtggcgcggcattagggcctttaattggtgggttgctattaaaccatttctggtggggctcagtctttttgatcaatgtccctattgtactacttgtgcttcctttctcgatttggctaattcctcacttttcgggacaacggcagcataaaattgattatttaagctcaatacttattttgattggcttagtcagcgctatttataccttaaaagagataggtaaggcttatacacaatggaatgaagtgatcatcgccacccttattgccattatttttctcacactatttgcgcggcgccaacgtcgtcaaacgcatccaatgattgattttagcctatttaaaaagcgctatttcagtgtcggtgtggcaatgtcgactctttctatggtgatcatcgtgggtattgaatttctgctaagccaacgcttacagttagtcgccggctttacaccactgaatgcagctttagtgattttacctatccctatcggctcagtattagcctctcctttggccgggttttggctagcgcgtttaggtgcagtgcgcttaattattatcggattcgccctaacattaatgggtaacttatggttaattgccatttcaaactcaccgataatgctaatgggtagcctctttttgattggctttggtttaggcattatttttaccaccgcatcgacctctattatgctaagtgtcgacgataaacaagcaggtatggccgcttctattgaagatatcgcctatgagttgggtagcgtgattggcgtgacctttatggggagtttaatgagcactctctataccttaaaactaactttaccggatacgcttaacgtcaatagtgtcgtttatgatagtttagatgaagcacttattgtcgctgaaaagcttcccgaagcagcggcgaccctcttaatctcacaggctaatagtgcgtttgaatatgccttttctatcgttctgatcgccacagccattgtgactacaataagcttaattgcactcccttattgcttgcgtaatgcggtaagagaaaacaagcccagccactaa

SEQ ID NO: 311988 - DNA, 1164 bp, Proteus mirabilis
ttgagcgagataaagattggtagccaactggtgaccaatgccacgggcgggttactctctaacgccaataacagtggccacgccgaaggcaccacgcaatcggcggtcagtgaaggcactgtcattgttcgcaatgaagacaaacaaaaacaggatgttaacgagctcaaccgcgataccgagcacgccaatgatggcagtattaacccgatattcgataaagaaaaagaacaaaaccgcttaaaacaatcccagttgattggtgaaatcggcaatcaggcgatggatatcatccgcaccgaaggagaaattgcgggctataaagcccaaaaagaccccgatgcgttagccattgccaaaaaacaactggaagcggcgggtaaaacacctcagaaagtcgcagaggaacggataaatgcagaaattgagcattacaagaaagaaaactgtgcaggaatgagcacaggtgcatgctcagctaaaatggcagaagatcgagacaaattcttcagagaagccgcctctttaggaattgattttgtgccagtggtcggtgattttaaaagttttgctgaagctgatggctggattgattacacgttagctgctgcgggtacattgccttttgctaaaatattcacgaagccactgaaagaagctaaattactattaaaagccggcgatcttgatggggcgaataagcttataaaagaagcgagtgatggtataccaacaaagttgccttcaagtcctgcatcgcaatcatcaagtggagtatggaaaccagatcatggtgtagaggtaaatactgggtcaggtaaacaaaaagattctcagatatggactgaaactaaaaaaacagatcccgcatctaatgcttatgatcactgggataaacataaaagtgaattccctgaatttcaaaattcaaagcagtatgttgaggcagcccatgattttgtaaacactcctccaaagggtactttgataaaagaacgagcgaatggagatacgatgtattacaatccggcaacgaatacttttgctgtaaaaatgtggacggaactcctaaaacaatgtttaaacctcaaaatgggcttgaatattgggaaaaacaaaaatgacaatagaaaatttatatccttgcccttgttgtggcaataa

SEQ ID NO: 311989 - DNA, 1293 bp, Proteus mirabilis
ttggcgaatgcctcgtcaccgtacttagcaacattgataaaacagcaagtaggcgaagataataaagccgcgaatgccatggcgcacgcagtattgggcgccgtggtcgctgagctaaataaccaatctgctgctgcgggtggattaggtgctggtagcggtgaactgtccgctcatgttatcttaaacaccctcttcccgggcaagaaggtttcagacttaaccgagagtgagaagcaacaagtcagtgcactaagccaattggcagcaggtcttgcaggtggactgactaccggtgatatggccggtgcaattactggctcgcaagctgggaagaatgcggttgagaataacctcatgggtggtaccgaggatggacaagttaagtttgctcaagcccatgtcagcgatatgatgtcttgttcaagtaatccttcaggagatgcttgtattcgcggccaagccgttgatagtgcgttaaaattagcattagtatctagcttaagcgctaatactctaattgttgttgctgatacagctgctgcgggttgtttgagtaacccagtgctttgtgcaaatgaagtgggtgccttcattattgaaacattaggtgcagaggcagctcctgcaggtatcacgattacagggacagcaggatataccgctaaacttacgaaagaacaacttgttgaattagctaccttgcaagcagttcggaaagaaggtggtgatgttactcctgaaatggtaaataaggtaatttcaggaaatgcaagcaaagaaatacctaaaatcacaaatgaacaaaaagttatagaaataaaatcaggtagtaagggtgattggaataagcaactgaacaagccagagccaaataccatttatcaggtcgatggtaataagacgtataaaactgattcacaagggcgagtagagactgtagaagcaaaattgtcgctgaactcaaatgatagaaatacctaccagcaatgtaaagtgggtaaatgtggtgttgcgggtgataaaggcggacatttaattgccactattttcacaggcccaggagaaaaactcaatattgttcctatgaactctaacttgaatagaagtgaatggaaaaaaatggagaattcatgggtaaaagcattgaaagataataaggaagttgatgtcaaaattgaacctatatattccggaaatagtgaacgaccagtaaaattcaatgtaagatatacaattgaaggtgaaaggccagtgatcaagaactttacgaatgcccaagggggaaattag

SEQ ID NO: 311990 - DNA, 942 bp, Proteus mirabilis
gtgacccagaccaagttatcgacacaaacgacaacagataataaccaagaagataatgacgttatcatagaacaatttctcgatagtatttggctagagcaagggttatctgcgaatacactcagcgcttatcgtttagatttacaggcgttaagccagtggctggtcacacaaaaactcaattggttatcggtgacgacgttagatttacacgcttttcttgccactcgtttggatgagggctataaagcaaccagtgcggcacgactgttaagtaccttacgtcggtttttccaatatctttatcgtgagaaattacgccaagatgatcccagcgctttgctttctacacctaaattacccaaacgtttacccaaagacttaagtgaacagcaagtagaaaatttacttagtgctccttgtattgatgagccaatagaattacgtgacaaagcgatgcttgaggttctttatgcctgtggattgcgggtttctgagctagtaggattgtctttatctgatattagcttacggcaaggggtgttacgtgtgataggtaagggtgataaagaacgattagttcctttaggtgaagaagctatttactggttagaacaatatctgcaatatggtagaccagcccttatgcaagggaaaaccgatgatattgtgtttccaagcttaagaggccaaaaaatgacgcgacaaacattttggcatcgtataaaacattacgcggtgatcgccggaattgattcagagaaattatcaccccatgtgttgcggcacgcctttgcaacacatctattaaatcatggagcagacttgcgtgttgtacagatgttattggggcacagtgacctctctacaacacagatttatacccatgttgctacagagcgcttaaaagtgcttcatcagcaacatcacccaaggggataa

SEQ ID NO: 311991 - DNA, 285 bp, Proteus mirabilis
atgggaaaaatatcgtgggaagaaatggcctatgccgataatggctctcctgatattttttggagttctttagagtttaaagagttactcaaggatggatataaaccctcagatatagattggaatcgatacgaattaaatacctataacaataaccgtttgtttcgctatgaaataggatttagcagattatcgccaataaaactagttaatcctgaagagagaacatttcattataacccttacctttctattattgatgggaaagtgactattgtccgataa

SEQ ID NO: 311992 - DNA, 432 bp, Proteus mirabilis; identical to SEQ ID NO: 298229

SEQ ID NO: 311993 - DNA, 1134 bp, Proteus mirabilis
atgcttcataaaaaattacatagcgaaatgtcatgggaacaacttggtgagtactatgatgaaattagtgatatgtccggtgttaggcaagatccgatccaccatgctgaaggtgatgtagctattcatacacagcaggtgatccacgctataaaatcactccctgaataccaagagctgtcagaaagagagcaacaaattctatggattgcagcacttttacatgatgtagaaaaacgttcaactacccgtgaagagaatgggcgaattatttcgccaggccatgctcgtaaaggagaattaacgacaagacgttttttatatgaaaaagtgccggttagctttattgatagagaacagattgcggcattagtacgctatcacggattacctttatggttaatggataaacccgatcctaaaaaagccttattagcggcttcgttaagagtagattgctatttattggcattgctggctaaggcggatgttctgggacgaagctgtgaagataagcccgctttattggataaaatagcgttatttacactttactgtgaagaattaaattgttggagaacacccgcacgatttatttctgatggcgctcgatttcactattttcatagtgaaaataatgtcgatcctcactatgaaccttatcctgagcaaggaagtgaagttattgtgctttgtgggctaccgggaatgggcaaagatagttatattcgccaatattgtgcagatatgcctgtggtaagtttagatgcattacgtcagcagcataatataaaaccagatgatcgtgatgcgaatggatggattgcacaacttgccaaagagcaagcgagaatatatttaagagagcataagtcttttgtttggaatgcaacaaatattactaaacaaatgcgtaatcaacttattgctctgttttatcgttatcaagctaaagtgacattggtatatattgaagtcccttatttgcaatggaaaaaacaaaacagcgcaagaaaggaagcggttcccgataaagtgatggaaagaatgttgagcaaactagaagtcccaacaccagaagaagcgcttaacgtgatttattgggttgatggggaagctcaaaatttgatttaa

SEQ ID NO: 311994 - DNA, 1293 bp, Proteus mirabilis
atggcagagaaaaaggatcttcagaacacaacacaccgtacttaccgtgtattttctttaccgttaatcacgctactgattagcacatctctgttttctgcaaccagcgcttttgccaatacattaacggataatcgtagtcagttaaaagatctgcaaaccaccattgctgaaaaagaaaagcgcgttcaagagcaacaaaaacagcgtactgctttacttgggcaactcaaatcacaagagacgcaaatcgctaatgccagtcgctctgtgcatgagacgcaaaaccgcttacaaaccttagctaaagagatcaaaaccatcaccgcaaatattgcccgattgcaaaagcaatataacgagcaacaagcactgttagcacgccaactcgatgcagcttaccgacaagggaaacatcaaggtattgagttactgtttcgcggtgaagaaggtcagcgagaagagcggatcttagcctattacagttatataaatgaagcgcgtaaacagtcaatggagcaattggcgcaaacttctaaagagctacaggcagaaaaagatgcccaacaagcgaaacagaacgaacaaaagcaggttctcaccaaacagcaacaagagaaacaaaaactggataatgcgctagctgcacgtcaaaaaacattaacgcaactagaatcaaccttaaaagaagatcaacgcaatttagctaccatgcgcgctaatgaaacacgcttaagaaataaaattgctcaagcagagcgtgaagccaaagcgcgagctgagcgtgaagcacgggaagctgctcgtattgccgccaagcaacgtgaagcgcaacagcgtggttcaacctataaacccacagccgaagaacgctctttaatgtcccgtactggtggattgggtaaacccgcaggtcaggctatttggcctattagaggcagtttattacaccgctttggtgagtctatttccggctcgggtgaattacgttggaaaggaattgtgatccctgcggcacaaggcacggaagtaaaagcgattgcggatggtcgggtgctgttagccgactggctacaagggtatggtttagtggtcgtcgtcgagcatggtaaaggggatatgagcctttatggctataaccaaagtgcgttagtcaatgttggtcaacaagtcaaagctggacaacctatcgccttggtaggaaacagtggtggacaagagcgctcagcgctctattttgaaattagacgccaaggaaaagcagtcaacccagttccttggcttgggaggtag

SEQ ID NO: 311995 - DNA, 165 bp, Proteus mirabilis
gtggatgaagaaggtgctattggccgtagtatggcggatgcaccggaaattgatggtgctgtttaccttaatgagcagtttgatgtcgagccaggacagatcgtacgtgtgctgattgagcatgccgatgaatatgatctgtggggtaccatcgtcgaacaataa

SEQ ID NO: 311996 - DNA, 1947 bp, Proteus mirabilis
  misc_feature (1849)..(1858): n is a, c, g, or t
atgacggtacaactaaagcataaacctactccagacacagaccagcaaattgagctaggttcgttcccgtctttcactccgtctggtaaggcaaatgatgcgcccgcgatattgactgcatggacagcactcgaagctctgtcacctcaaagctataagcgcccagaagatatggcagctggtgaccgttctagagttgccctattggatcgagacattccatggggaccaaatgcccgcagcaagcctaagcataaactttatttcgaaatcattctcggcgctatcgcactcgacaaggcgacagacgaattggtcaaggtttttggtgaggatgaggagcaatcaaggccggatggcaagaaagcggccataggctcaatcttggtcgacaaggaaggctttgttcttgaaaataacggagtcgccgtttccagttttgcttgggcgctcaaaccagcactcgatctgaagcttggtagcttaggagcctggccgaaagtagaacggcacattatcgagtgtttagagcagatagttagtcgccataacgaggatggagaacccttaccgatcgatctggatactattattaatgctcatagatggcttgtgtcacaattcgatgtacccgagcatttggttgaaccaccttcatttgtaatcaaagtatttcattatttcaagaacaaaacaccacctgagccttcgttgctgaattctttctaccttgaagatcttgacgaagcagtaaaattgctcgaagcggataatgcaggaattggtttgcaacgttacatgggaataggcagacctagccagaaaatcgatgtgttgtcccccgtttccgcagtcgagccgttcgtcgcaccgtcgctcataccgcaggctcgttggccttcacaaggtggtcacccattagtgttacttcaacaggccgctgtgaatgcggcgcgtgttgagctggttgatgctccaggtatcattggcataaatgggccaccgggcacaggaaagacaactcttctccgagatatcgttgttggttgcattcttgatcgagccacagctatggtcgccttcaacaaaccacaggatgccttttccacaacaggcgagaagcaggcatttggctctaatgcttttctgcatttctacaggttacatgaatccttgaagggccatgaaatcgtcgtagcatcctccaataacaaagcggtcgaaaacgtcagcaaagagcttcccctcaaagaagctaatggacgccatgaacaaattgcctatttccgatccatcagtgacttaattgcaaaccccaaacgcacaggcgccttcgaaccagaggatgctaccctatccgaacctatcgagacctggggattgattgccgccacacttggtaatagcagcaatcgaggtaatttccagcaaaatttctggtggaacgaggaccgcggtttccttacctacctgaaagctgctcgcggaatgaacgtcatgcgtgaaatcaaggatgaacaaacgggagcaatcattgatcgagtgatgcctagcgtagttatcaatgagcagcccagcaccaacaaagcagatgccgctgccgcttggcaaaaagcacgaaccatattccttaaactaaaggaaacgatagatactgaaatagccagtatcgaaagtatgcgccgagatattcaggcactcaagggagcgaccattgaacttcaaaaactggaacagcttcgtcctagtctaaatgaagccctcgaacagacataccagattgctgaatctgcccatagggaacaggaaaaggcaaagtcgcaagttgagttgaacaaggctttgctcnnnnnnnnnncttgttcgggaccacagcttggaagtcttggaagtcggccttgcaaaatctctcggaaaccttacagcagtctgcctcacagatgctga

SEQ ID NO: 311997 - DNA, 696 bp, Proteus mirabilis
atgtatacatttcaggatacaattaattataacaaaagaatttatgactcatataatgaacaaggcaaaagccctccaaaatatttagataaatatgttccatactttaacaaagggaaaataagtatatgggcctatattaaggcatattataccggtgagcttagccgtaatagccaagcagaaatatttttaataattggctggttaatttttttccccggttttttatggctatttggctatctctctttctttacgcctcctgtgtaccttattgctgataggcaaagaggaatactgtatagctatggcatggggaaagtgcgtttaacccgctataaagaggcgcaatttggttatgcgggcaacatgttggcaattaaactatatggcattaatgaaaaaacaggccaattaaaaacgatcctctatcgccccaatgtatcccactactccagtttcctaaccagtactgacagtgaaaaccaccgttttatcactttccttaatgcctatatgcaacaaggccgagatgctgtttcatcggttgattaccaagcccgtaagccctttttatcttttggcaaaaacccacttcctgccgattttgagcaacaggtcgaacagattctggcaaagcttgatcaggagaaaaaaaccatgcgtaaaattgataaggaaggtacggaatga

SEQ ID NO: 311998 - DNA, 927 bp, Proteus mirabilis
atgacctgtttacgcactgtatcaaagcacccagagcaattagaaaccacaccattagttgcggaaagtcatcactatgatgatcctttagcacctcaaaaactggtatttttaaaggcagttaatcaacagcgttgtgtgattaactcaccacagcgcaatagccaactcaccaatacaatacccttttttatcgttcttttagttatggcttgttatacattatttaattttatggaagggcatattggagccaaagctgagctagaaagcatgtctcaatatttatttgaaaataataaagatattaacgcattaaatgagattgagcgtaaatctattttaaaatatcaacctttttgggaaacagaaaaaattagctggtgggagtatataaaagcgtataactccggtgaattttttattgatagccaatatgataaatacctcgtcattggctggttaatttttttccccggttttttatggctatttggctatctctctttctttacacctcctgtgtaccttattgctgataggcaaagaggaatactgtatagctatggcatgggaaaagtccgtttaacccgctataaagaggcgcaatttggttatgcgggcaatatgttggcaattaaactatatggcattaatgaaaaaacaggcaaattaaaaacgatcctctatcgccccaatgtgtcccactactccagtttcctaaccagtaccgacagtgaaaaccaccgttttatcactttccttaatgcctatatgcaacaaggccgagatgctgtttcatcggttgattaccaagcccgtaagccctttttatcttttggcaaaaatccacttcctgctgattttgagcaacaggtcgaacaaattttagcaaagcttgatcaggagaaaaaacaccatgcgtag

SEQ ID NO: 311999 - DNA, 693 bp, Proteus mirabilis
ttgacgtatcaaaatccaaaaacagcgcaggctggttatcaagaaattgaaaggctattgaattcgacttcaccggaagcacagcaagcatataatctgttggaatcttatactaaagcgtttaaaaactttgggtatacagatgaagaagctcgctcacgtgcgggaatgtatgttggttcgatttatttgcttggtggtacgtctgcagttgcaaactcaggcgcattagtaaaacagtttggaaaagatgttgctaagccaaatgttaaaccagagggatcacagccgaaaaatgacacatctggaaatacattaccaaaagagcaagttcatacagagtggaaaaattcaattacacagtctcgtgttaatgtccgaaatggtgatggctctactggttcaggactcgaatatgcttggaagaaacatggtggtgaatggggtgcaaataaatcacacttcacaataacaaaggatgaactaaaggtagtcttgcagtcagataatgtagcgaagacaccagtgcaatactcaccatccactggtaactatattcgtactgtggatatgggcaaaaatatcggtgttgatgcaatgaataatagtacgccaacgtctattatgacagtcatcactgataaaaaaggtaatttagttaacacattcccaggtaagactgtggttaggtaa

SEQ ID NO: 312000 - DNA, 240 bp, Proteus mirabilis
atgttgatttttgcatttaaagcgttccaattaatatctgatatattagattggtatttatcagccaaatttactacggcattaatattttctttagttaatggcactgagcaatgttttttgcgtaaaaaccatgtggattgcaataaactgtctacagcttcacggcataataaacgagataatattttaatttgtttctcatttatatcattatttgtaataagtaaagaaaactga

SEQ ID NO: 312001 - DNA, 483 bp, Proteus mirabilis
atgcacaatgacaatgacaatatttggtttacatataaagcccgaattcaagcatgtaatagacttgagtggtgggattttcattcgcaactactattagtttggtatgctattttaggtgtaactctagctattgtatctattccgtacccagagatattaggtaaaaatacgagtatttatgcatcaataatgtccgttgcgcttcttgttatctctctggttatatcaaatcgagattttagagggcgttcattgaaaatgcgtgaaaactatttagctttacaagagctttatagttcatgtccattagttaataatgatcttgatgataaaaaatttagagtttttgctcatggcttaaaaaatcgaaaacctaaaatagtagaaatcatttatgtttatgctgctattatttttcggatgttatgttgcatatttttttatatcgctcctttttctatctttttattggatatttga

SEQ ID NO: 312002 - DNA, 471 bp, Proteus mirabilis
  misc_feature (76)..(85): n is a, c, g, or t
atggcttcacactggtttagttacagccaatggcaactaccgagtgagtctgactacaaaaaactgcaggagctgnnnnnnnnnnttagtagtaatcctttaaatcgtgatcatactgatttgatagaggtgcaggcttctcttagtcgagagtaccaagagcttgctgaacaatatcaattattacgtcgtcctttttctgtcaccgttgatgttccttacaccgatgtgtggacgtattcacctgtgcaatattacgcaggtaaacacccttgtgaaaagccagcagagatgatggaacacattattcgctcaagcagtcgcgaaggtgatctggttgctgatttctttatggggtcaggtgcaacactaaaatccgcattaaagttaaatcgtcgagttcttggagttgaacttgagaaagagcgatttgatcaaacaagagaggaaataaataacatgaagtcataa

SEQ ID NO: 312003 - DNA, 468 bp, Proteus mirabilis
atggaacaaattcatacacaaggaacggttattactgatgttaaccataatctggtagagccttgcaaattatataatcaacagggatggttacatcgcaaaggggcgactcccgctcatcacgatattgtggttattcctggttcacgtggtgatcacagttatctcgttaaacctattatctctgaattaagccttcattctctaccacatggtgcgggtagaaagtggatgcgaactgaatgtaaaggccgtttatcacatcgatttacgccattacagctctcacgcacagcactaggtagccgtattatttgtgctaataaacaattaatttatgaggaagcgcctcaatcgtataaatcaattgaaactgttatagaaagtatgaggagtcttggtttaattgaggttatcgcccgcttaaaaccggttattacttataaaaccagtggggagatagcataa

SEQ ID NO: 312004 - DNA, 696 bp, Proteus mirabilis
atggatctcatttcacgattaacaaccaataccactcgtgctgattttgccttagctcatcaacagcaattaatacagttactgatacaacactttcctgccaaatatcacaccttatttgcaaccccgcaaaaaactgcagaagatactattgaatggtatggtgaaatatccggtcagccagtggcattaaatgcattgtcagagcaacaacgccaagagataagagatgctctcgatgatgatttaaaaaatcttaaagagcaaacggcattacttgctgcacagcaacgcattaccgatgaagagcgccatctgcttgataccgcctcaaccctacccgatgcagagagcatctatatcattaatggaaaacccattattacttggtggcctcgtaccacacctctagcgccgactgttgcacaagtcactgctggctctagtgcagcggctgccggagcggcgcttgcaaaaatatcaccgaaaactcgccaccgctggttacgttggttactggtattattattggttttaattgccttagtctcatggttaagaggttgttttgatatcaatacaacaccttccatcaatgatacttcagcgaccgctgtcgcaactcactctacctcaacggtgacagctacgactaatacgactaataagcaagataacctaacaacaaataaataa

SEQ ID NO: 312005 - DNA, 510 bp, Proteus mirabilis
atggatagcattgatagctacgtgccctcatttaaaggtgaacaagtttacggtgtgcctgaatcacaggcctcatggtattcctcacaaatgtttatcggcaacaatatgtgtgcggttatcgctaaacactggctggtggataaagcctgcaatatgcccgcacgtgatgcgatacgccaaggctacgatattgattgtgataacgacgatgatcgcgctatcagtaaaaagcttcgcaaacgagataaaaaataccgcattacacatcagcttaaagagctggttcactttgggcgtgtatacggtggtcgtttagcattattcgttgtggagacatcaaagcctcgttctcgcgccagcgcaggatataagtcagttgtgaatgctgaccgtttaaccggtgcgagtggttctgtttttcgcctcttaaacggccaccacatagaattacctcttagttgtgaagaaactaccgcttcttttctcaggagatttaagaatgactaa

SEQ ID NO: 312006 - DNA, 411 bp, Proteus mirabilis
atggctagatcgttagctattgaccctttaattgggcgactagcaatttcgatgaataattatttaaatggtaacttaaacgaatataggattttaataaaattcaaagataggaattttggatatatttattctgtatcaaaatgcaaatttataaaaattgacactactgaaaattatttaagtgagtatccatttggcatagaaatatatatccaagattttattggattatgtttgggtaaaatccaaatttgggatttggctggaactagtatacgtagttggtatcttggtgatatatatgaaaatatgatagtgttcttttataaatattttggagaacaaagaagacctgatttagcacttatggtatatgaagcatatatttcacatataagcaaggcataa

SEQ ID NO: 312007 - DNA, 306 bp, Proteus mirabilis
atgcgtcggcgtctcaacagtgagacaagtctgctgaagacgttaggtgtaaagttggatgaatggagccgtgatcgtgtaggcactattcatacgttccaaggccgagaggcagacacggttatcctgctactgggtgctccgaaagccagtcagcaaagggctcgccagtgggcagctagcccgccaaacattattaatgtagccgtctcacgggctaagcaaaacctatatgtggtgggttcagctgttgcatgggctggggcaggaactagtctgcaggtcctacaacggcaattagcataa

SEQ ID NO: 312008 - DNA, 153 bp, Proteus mirabilis; identical to SEQ ID NO: 298591

SEQ ID NO: 312009 - DNA, 663 bp, Proteus mirabilis; identical to SEQ ID NO: 190890

SEQ ID NO: 312010 - DNA, 1035 bp, Proteus mirabilis
gtgatttattactctatatttatattttcatcaactatcctgttgtttttatcaagactggttaaaggaacaaattttttattttatactgctgtttttatggccattcttttttcagggtttagatacgatgcaggtaacgattatccaacatactacgcaatggctactggatatgtaaattacgatagattggaattaataccaaaattaataatggatgtatctttcttttctgaatcccccgcaatatttttctttgtgacgtctttcatctatattatatgtgtccagtatttttgttgtaagctttcagaaaataaagaattatcatttttattgttccttctctttccgctttcttttctaacttcatttggttacgtcaggcagttcctatcaattggattttttatatgtgcaatagctatgagagtggagaataaaaataaaacatccttattttttgttctcttatctatagcttgccatatgtcagcagtgttttttataccaataattctatttaaaaaagttcttagtaagagaaaaataccccttattatatccgttgtagtcattgtgttatctatactattctcttcattagttgttagatactcataccttgctgggagatacgaacactatataaatggagccaatgttatcgatgcaggaaaaaaaatagggtacatatcaatagcactccttgcatacctatatattttcggcaggaaaataagaacaagtagcgagatttacctatttaatatttatgttgttttttgtgttatgtatgcatttttgatgaattttggtgagtatgttgttagagtttcttacttcttgtttcctgttttttgggttttaataccaaagacaataatcttaaaaggaagtatttttaaatacatccaaatattattaatagcatcatttggttttttaatgtttttcaccaccctgtacttagctagcacaaacccaacaagagattttctaactgattattcgataattttcttaaagtag

SEQ ID NO: 312011 - DNA, 426 bp, Proteus mirabilis
atggttacttttcataccaattacggcgatatcgtgattaaaacatttgcagataaagcacctgcaaccgtagaaaattttttagattactgtaaagaagggttctacgataacactatcttccaccgtgttattaatggttttatgatccaaggtggtggttttgaacctggtatgaagcaaaaagaaactaaagccccggtaagaaacgaagcaaacaacggtcttgccaataatcgtggtacattagcgatggctcgtaccaacgatccacattctgcaacagcacaattctttatcaatgtagcagataacgacttcttaaacttccgtgcagaaaaagccgtttctactggtcgcagtggtttccaccaagatgttcctcgtgaagatattatcattaacagtgttactgttagcgaataa

SEQ ID NO: 312012 - DNA, 462 bp, Proteus mirabilis; identical to SEQ ID NO: 298454

SEQ ID NO: 312013 - DNA, 831 bp, Proteus mirabilis
atgagcacattaactgttcaaaatttaccacctgttcaacataacgggtttcgcgtaattactaccgagctcttagctaacgtttatgaaactgaaattaataatattcagcaaaattttaaacgtaataaaaaacgctttatcgaaggcaagcattacttcaagattgtcggtgatgctcttaataatttgcgactgacaatgagtcagttacaaatatcaaccaaggttagaagccttatactttggactgagcgaggtgcggctcgtcatgcgaaaatgttagacacagacaaagcatgggatgtgttcgaagctctagaggatttctattttgctaagaaagaagatgctaaatacaaaacaaccacagacgaccgcgctcctcttcgcaacgctgtagattgtcttatgacaaaaaagcgtcttagtttccctaaagcatatgcctatgtccatgccaagtatggagtaaacagcattgatgaagttccactagagctattaccagaagcagtagactacatctacaaagttgcacttgaaggtgaatacattcctaaacaggaagaaaatatactttttgaaccgaatcaaaactcaatcactgtaaccataccaaaagaaggtagatggttagtttcttataagggtggcaaacaacaagtagttagcgttgatggtcataacgttgtcagtgttgaatacattcaaaaattacaacgtgactctaacgctctcattgagttattgcagaatttccgtctacgcacccaagttatgcaaggtgagaaaagcggagatattttaaatactccgttaattgcatag

SEQ ID NO: 312014 - DNA, 357 bp, Proteus mirabilis
gtgaacttaaagtatgttggtatcgttatattaacattaagcgttgtgtttggtgtctatgtgacatctactacaggaacaagttacttcgatagatttaacccagcagagggaatggcatatgtctctttttcgctctttattgcattgataggagctatatttacagggtgtggtttcattgttgaagctattgataggaatgctaatcacatacttggttctcttgatgactctaaatacctaactgagctagctgaaaaaaataaagcaaaaaaagatagtgatgtgaatgctaagcaagcaccacaaggtacaaaccatgaaaagataagagagattttaaaaaggagataa

SEQ ID NO: 312015 - DNA, 297 bp, Proteus mirabilis
  misc_feature (219)..(228): n is a, c, g, or t
atgacagaatcttttgctcaactctttgaagaatccctaaaaacaatcgaaactcgtccaggtgcaatcgttcgtggcgttgttgttgctatcgataaagacgttgttctggttgatgcaggtctgaaatcagaatctgcgattcctgtagaacaattcaaaaacgcgcaaggcgaattagaaatccaagtgggtgacgaaattgacgttgctctggannnnnnnnnncggttgaagatggcttcggtgaaaccgttctgtctcgtgagaaagctaaacgtcacgaagcgtggctga

SEQ ID NO: 312016 - DNA, 303 bp, Proteus mirabilis; identical to SEQ ID NO: 302177

SEQ ID NO: 312017 - DNA, 366 bp, Proteus mirabilis; identical to SEQ ID NO: 310213

SEQ ID NO: 312018 - DNA, 537 bp, Proteus mirabilis
  misc_feature (518)..(527): n is a, c, g, or t
atgctattaaaaaaaatatttttagtgtcttttttattccctacactctcttacgctaataccttaccaacatcaaatatagataattcactaactcccaaccatgataatcttgcccgtttttcactcggtgacaatagtcaagcatccggcagcggtgccactgctataggtatcaatagccaagccaccaatactcgttcggttgctattggttatgctgcattagccaatgaggaaaatacggtttcatttggtaatagtgaagagaaacaaacagcacgactcaccaatgtcagtgaaggtaaaaataatactgatgcagtcaatctggcacaaacaaaagcactacttagtaaaaataaaaggttaactgatagccaaataaatgtttttagaaatcaaactaataataacttaaacaccatcaaaaaaaccattcatgagtttgatgattattatcgaagacgacaagcatcaattaccgatgcaattgaagcactggataaaaaagttannnnnnnnnnattgccatga

SEQ ID NO: 312019 - DNA, 1770 bp, Proteus mirabilis; identical to SEQ ID NO: 301596

SEQ ID NO: 312020 - DNA, 240 bp, Proteus mirabilis; identical to SEQ ID NO: 304321

SEQ ID NO: 312021 - DNA, 645 bp, Proteus mirabilis
ttgtattccaatggaacattagctttaatttctgcattacaagccctagaattaacaggtgaagtaattactacaccatatagctttgtagcaacaagccatgcaattgttcttaataatttagaacctgtatttatcgatattgatcctatcacttacaacctagatcctaaaaaaattgaagaagcgataacagataaaacatcagcaatccttcctgtacatgtttatggaacaccatgtgataatgaggcaatacaaaaaattgcagataaatatcatctaaaagtaatttatgatgcagcacacgcttttggcgttcaaaaagatggtgtatctattttaaactggggagatttatcaatattaagttttcatgcaacaaaagcttattcaacaattgaaggtggtgcaattatttgtcatacacccgaaatgaaaaaaaaattagatcagttaaaaaattttggctatgaatcagaaaccgaaattacaatgctaggctctaatgctaaagtaaatgaaatccgagctgcatatggcttagctagtttaaaatatatagatgatgctatagcttcaagaaaacgctctgctgaattatataaaaaagaattatctaacataaaaggtatttctttttag

SEQ ID NO: 312022 - DNA, 507 bp, Proteus mirabilis
atggacataaatgcagtaacaacgcctgaaaaacctatcttgcacttgttatgtggaaaaattgcatcaggaaaatctacattgtcagcaaaattaggagcatcacctggaactgtaattgtcagcgaagatcactggctggctaccctctttgccaatgaaatgcaatccatatctgattatgtacagtattcattaagactaagaaatgccatgaagccttatctggtgtcactactaaaaactggtttatcagtagttcttgatttcccggcaaacacacaaacaaatcgtgaatggatgatgagcattattaaggagtcaggtgccagtaatcagctgcactacctgaaagtttccgatgaagtatgtaaatcccgcttacggcttcgtaatgcagaaggagaacatgaattttcgacctcagatcaacaatttgaaatcataacccatcatttctcagaaccaacagctgatgaaggatttaatatcgttgaatacagctga

SEQ ID NO: 312023 - DNA, 750 bp, Proteus mirabilis
atgagcacagaagattcaattgattttaacgagctattcccagaggatttttgtatctctaccatagcagagcttaattcttggacctcagtgcaaactatagcttcagcggctcgcataattgaaaatagatgtattgaagatgatgatccacagtgtttgttgataatgcctatagatgagagattaaattttgagtgggtttttacaaaggtattagtttggttaattaaaggatataaaccaccaaaaaataaagttgatttttcaagggttttagatgtagaaataaaagatgaaaccataaaaaaaataaaagatcttagatttaaccctaaaatagcatctcaaagccgtcaagagtccaatggtgatgtaaaaaaatattttttaattcaggataaggcagaagtaattgagcttgtttcttttccactgagagcattaatggatgtgctctttatggggtttgatgctgcgtggggtggataccaaataagaaaagagtctcataagcgaaccggtagctccccaactatataccacaccccttatgcagatagtcgtttattttctgtaattgaggctttatgttttgcggctctgggaatggaaattactgttaattttggtcgtgaaaaaatgcaaatagtcaacgactaccgctcagttaacatacaagttaaacctccgtttaacaaagagcttataaactcagcgctccaattatctaagggaattaaaatatga

SEQ ID NO: 312024 - DNA, 1089 bp, Proteus mirabilis
atgattaataaggaaaatctaataatccatccccatataaataatgctcattgggtgggcaatcgaatatcttcggcttgtaatcaaaatgcaattatgcagatcgaaaacgaaaagaattatagtgaccagtactttggcaactcctgggattggactcctgcgataaatggtgcggtttacgggcgaacagagaatttttctccatctgatatcgagtcacttggttcaggtgagtttatgcgagtaccttacagaagaatacccattattaacgttcattctattgatgagttattaaatatttcggctaagttatcaccaaataacgatagtgcgaaaattgtttggagggggcaatctaaacaatactcacttcaacgtgacgacaccgataaattgagattgtatggagatacatcaatttttgagccatccttgcttccttcagcaagtaggcagaatgtttactttcctgagatttttgatacatggtcttcattgcttgatatttttatcagggttgttaataaaggagaaagtagggatgaggtgaataaatgcgcagaccgttttcagtcaagctataaatataggcaatggggatttgcaacagcacagcactacggtctcccaagtgttggccttgatgtgactcatgatattttcgtagcattatattttgccactaattgtttcaaaacgaatcaagacacaggtgagatgtctgtgagtagagctactgaagctgaaaatcctgtaatttatgccatggagggttttgaagattatgatttattagaagacgaaaaaataagcccgtactggttgcattgtgaaaggccaaaagcacaatctgcaaggttcttcacttcaggatggggaagcgcaccaaatcgcgcagctaataggatttatgtggctcttagactgataggccataccaaatggaaaataccttatgactctcgattcatcttcccaaatgaggaaaaagatcattttctcaaatttctaataaatgattgtaaagcttatgattttccatttgttaaggatgtaattaataaaatttactatgttccttag

SEQ ID NO: 312025 - DNA, 225 bp, Proteus mirabilis
atgactattgtattcattccttcacttgtcgcattgcttgaatctaaagagagcgaggctgggtatgaattaactcagagtgaggttgagtcgatccgcgataatgctactactgttgagttgccatcagacattgtcgacgatatggacaaaagccgcggctatcaggatctcaatgtgaataatgtctggaatgattggttaatttacaagaaaactagatga

SEQ ID NO: 312026 - DNA, 831 bp, Proteus mirabilis
gtgaatgattgtaaaatgttttttgatgaggcaaaacgacaggtacattttaagcagaggcaattatttgaagaaatagataaaggttggagaggattaacaaaaaaatcgaaagatgatgcaatttgtatgttagtaactctagagcctgacacaatcggcttaatgggtgagttatatagggctggttacatacctctagatcatcgtgtagagggtaaagtcagtgaactatatgaacgtattttaaaataccggagtaaattcaaattgcacgaaaggttgtgtttaagcagagatagcaaaataataaatatgcacacaggagttaatgactttttgctagacaggatttattggtcaagtgttaattatagattagcaatgcgttttaataacagtgacttaccagatctgaaaattattgctatccgatctttattgaaaagtattgagatgctaagtgagtgttttggtttgggtctcttcagtaattatagtaaggaagtaaatcgattaagcaagcaaagaactgaagctggcagaaaaggaggaaaattacgtaacaaatatatggttgatatacaacagcatgcatacatgttgttacttgaacgccagcctagagatgagaaatggaaaaaaaagagtatagcagtgaaagctatagagttggaattgaaaaattatattctgacgttacaaaaagaagatgactatgtagggcaagagtatgagaatttatatagaacaataatggattggtctagagaagataataatttggttaaaaaagcaatggaaaagacggttagaatgaaaaatagttaa

SEQ ID NO: 312027 - DNA, 1002 bp, Proteus mirabilis
atgttacaacaagatagccttaaacaggatgttattgcatctgtaaaaaaatcattaaatgttgaacatttttaccacagaattagacctgatatttcgccattcattagtgcaacctcgaagttatcactcaaaaaccttgatgaatgggagcgtctaattcgttgggagatctacataggtcaccaacaaaataacgctctactgactaaagttaatagccaattaattggctctctcagatggctggatttatgtaatgctgatggcttcaagcgagagcgagcactaaagatactgacgggtggtgcaccaaacagttttttacttgcgttgatgtttcgaaaactgaatgactgggtgcctgaagtcagagttgctgcacgtaatgcattgccattaattgcggaaaaaacagatccagagattatcgttgatgtcttatttatcatgcttccctattggaactcgtggagaaggataggggatgatgaaaaacaaattctattgagtattattgcaatgaataaggttgcagaatctcttaaaaatcgactgatattatctacttcaggacccgctgcgaccatatttgcacagtctgggcgtgttgatgtattagataaatttctgactgaaattgctgaattatcggtgcagcctgccttgcgagctaaagcctatcgttgcttattagaaagcaaatttgtttgggctgaaggatgtgaatttaaatggatagacaaaaggtatggcatacggcaacgaattcctgttttaagggaaagaagaatagagactaaaattccttttattgagtatttaaaaatggcggcaattgatcgttctcctagggttcgccgtattgctggagaaatgctaatcaagcagttagaaaatattggggatgatgcatttaaattagcagaattgctggcatccgataaaacagccgcagtagcagaacgaggtctgtttgcattgaaagatttagctaagtag

SEQ ID NO: 312028 - DNA, 468 bp, Proteus mirabilis
atgtattggtcaataatattaggccatagaacagttatgtttgaatggtttcctcaatggactatttctattacgtttgctgctattgtaagtgcaatcggtggagtttggagcattttacgtcgcccactaaagcacgcatttaaaaacgttcttcagtctgggtttatggctctagtattaatcgttcctatgtttgatgtgctgacgtatttactcacagacaaaaccattcgctaccaaacagaatatgaaatcacatcaccgggccctagtactagccgatttagccgatgtgaccacggtatatggataaaagaaacctatactgaacaatggaaattactgtgtatcagcaatccaaaatcgaaaaccaaagaaaacacaggtatggtatgggttacaacaaaaacgggccctatgggcgcatatattgttgattatcagttctcccctttgaatctttag

SEQ ID NO: 312029 - DNA, 768 bp, Proteus mirabilis
atggataacttaacggaacatcgcgattcatctctggcaagttggcttccagatttttttaagcaatggccaaaaaatatcgattggtctagagaaagaaatcgctccaaaatagatattaatactgcggagctaactcagtttttcaaccaactttctgaaccactgaaattagtacaacatcgtgctttgtcttttgatccatgggaagtcgcaggccttgaacgtaaagaagttcgtaacaccgctgttcttgcttggcttcttgatcctgagggaactcatggtttcggtagattaccactacaaacactcctacaaacaatacgatgcaacaaaaattatatcccagaagattatcatcgctattgtcgagtacaagttgaaaccaattcagacaatggtgctaatcgtgttgatatagaaatagacgcagataattttcttctattcattgaagtaaaaattgatgccagtgaacagcaggagcaaatagcccgatactgtagggatgcagaacggcgttccatgtcacgcccatgggctgttgtctttttaacaccacaaggaaaagaatcacagactctaggttcagagttcaaacgtaaaaatgtgccatgtttatcatggcgtcaactcgcgagtagtttggaagactcattacaatttcactataacaagttcgcttccattgaaaaaaactcaccatcgcgccaaatggcagcacatgctgtattttgctttcttaatcgaattcgtacattttaa

SEQ ID NO: 312030 - DNA, 642 bp, Proteus mirabilis
atgaataaactcagtgaaacagaacgccaagcaggcgtacaactactttcacatttgaaaatgtttaacgaagcggttgtttactttgaacagcatttagatcctgctttttggaaaagttttgacaagtgtatcgaccgatttattaaaagtaatgatttggcaggtgatgctaattatgagcacaaaagttattgttggctcgcgccgaaaaattgggtcattgacaataataactggaaatactggtttgaaacgaagacaacagttgataaagaactcgactataccttagccgttctgacaagtcaggggatcgagcaagggtattttggtttcgaatttaaattgaatgctgcgcattttgggggagcaaaaaaactggctaatcatagcgattcaatttcgaaagaatataaagaacagctaataaaaataggcttaaaggatcaaggaaagggtaactattttcttcctgtcatgattgatttaaagtcacttaaggattgttggagactcaatggtgaattcccagtagaagatgatgttttttcaccgctaagaaatgcccttgagacgctattaaaatcagctaacatactggatactatgttccaagatgtcattgagataagcgaataa

SEQ ID NO: 312031 - DNA, 393 bp, Proteus mirabilis
atgatgttaggaatgattttgcaaatcgaatttccagataacttattgtttagtaaactagaacaacaggaaaaaataccttgccacatacaagtatctaataaatttgaaattgtttttgaaattgaatcaacaagaattattggagaagtgagtgagtatgataaaagattattcgaacaaagagtcatagcccgagttggtggtaattatatctataatgaaccatcgttaataacattacatcgcattagtaaaggtgtatacagagtagctgctctcttcgttttttatagcgattttggatggtgttcagtcattgaaaacggcgattatatggacccccacccgttttgggatgataatgacgaaaatccagactttaagccataa

SEQ ID NO: 312032 - DNA, 525 bp, Proteus mirabilis
atgataaataatgaactaattgaatacctacattctgtttatccagaattgccgatcaatactaactatatgcgaggttattcagttgatgagatccagaaaattgagcgattatatgatattgaagtaaaaggacaattatatgatttcctcgcagctattggccgttgtagtggtggtttattcggtgatgaccctcttattttctatagaaatgggcaaacagttagggggaatgtattatatcaagacgctctacgatatgagcttccctcagctcagagatatgatttgatgaaacaaaaatcattttttatctcagtagaaagctatacacagtatttttttgttttaactgcttctgatacccctaaccgtgtttatcaatatgatgaaaatgaagaaacggtagaggcgactaattgggaacttaaaaactatttaaggcatattgttaatgtgtacactcgaaattacgatgtaaaggcatctttcgaacaatatggagaacttattattatttaa

SEQ ID NO: 312033 - DNA, 1608 bp, Proteus mirabilis
atgccttttataccgacaaagcaacaaatacgggcaattgaatacctagattcactggttataactgcatgtcccggtagcgggaaaacgactgtaatagcagagaagattagttcctctttgaaattaaacaaaagttatcagggtattataggtattacttttacgaaaaaagctagcgcagagttaaaaagacgatgcagttcaaatgctaaagatctaaaaagtagcttctttggaaccattgatagcttttgttatcaagagttaataattccttttctttcaggatgttggggtggtgagcctcgaaaatgtacagtagtaaaaaaactaaatgatgaacaatcggcactctttgttagaaaatatacttcaccgaatgtcagagaattagatgaagacactgggtttaagcaactttatttaaagaatacattatggatgtcttcattttcagctcttgctgtactaatactccgagaatcattggctgcacagaattatatagtggcaaaatatacacatgtttttatggatgaataccaagatagctcggtagcacagcatgaattatttttatcgctgaaagatttgggattagttgcaacagcagtcggagataccgatcagtcaatatttaaattccgcggaagttgtccggagcttttagattgcttagtacattcacctgactttaagcatattcatttagatgaaaatcatcgatgccatccatcaattactaactatgcaaatcgtcttctatatcctgattgtgatttattggctactgatgagatcagggtgtttcgttatatcatgaatggattacattctaatgctgcgggaactgtttcaacatggatcacgagttggattcaagaaaaaacagtcggaaaagcttctaaaatagcaattttagcgaaaacttctaatgtattaaatggtatctgcgatgggctcacatgcgattataggctgatttctgatacgccatttgatgttattggcaccgagtgttcagatttattttcagagttattaaactttaaacatggtgcaacgcaaactgctcaatctcttttggattctttatctattagatattcgctaagcagcaagaaacaaaaaaaattgcttgaaataattaagcttattagacaaacaaataacgaagagtttatcgatttttcgcttttgataactgctgagcttgatttaatggttaaacccgaaacaattaaagccactaaagaaattcaagaatcagaaatccttcttaaaatattctgcccactaaatgataatgaagttcaagtgatgactttacataaatctaaggggctagaatttgatatagttatacattttgggttagaagagtggagcttcccttttcgtaagtacattgaaggcaggagagaacccgtatatcctgaactagagcaggaaactaacttgcattatgtgggtataacaagggctgaaaagttatgtattttaatacagacggagttgcgccaaaatagttatggagaagtgaaacgctctcagccatcttattttcttacacttccacagcttaaaggactttatattagttag

SEQ ID NO: 312034 - DNA, 1701 bp, Proteus mirabilis
atggaaattagcaaggttgacctagttggctttaggtgttttaaggatgtatctataaactttcgctcggatactttattgatcggtgctaatgatgttggaaaaagcaatctcctccatgccttgcgtattcttttggaccggagtttgtctgaagtagatattgagcctacagaaactgatttttatacgagtaaagtggattcttgttcagaaataatcataacagtacattttaaagatgtgattgaagatgctgtattgtcagtcctgaaaggagctgtcagtaatgatggaaaatctatatttcgctacaaggctcgtttagatgatttaagctatcagctatttgtcggacacaatattgagtatctcgaagaggtaactagtagattctatttaagatatgtaaatcttaactatatggagtcgcaaagagatttgcaaaaatacattgcaaaagaaaagagaaagcttctgaaaacatccttttcttctttatctgaacagcaattggaggaagataaagatttattagatgaaataggtagagatcttttggatttgaatgataaagtttcgcaacttgtttatgtagatcaagcaacttcagaggtaaatacagagctaaagaaactatcgaatcaacatcgtaattatgttgtgcaattggatacaggtgctattcaagtaagtgactttgttgacaaattgaagttaggagccagcatggatgggtcctcagtaatgcttggtggggacggcagaaataatcagattttactagccttgtggaaggctaaaagtgtgagagagcattctttggatcatgaggtagtattttacgtgatagaagaacctgaagcacatttgcatccacatcagcaaggtcgaatggcaaattacttgatcaatgaattaccaggacaaacgataatatcaactcattcgcctcgaatagccgcaaatttcaaacctgattcaataattaggcttttgggtaaaaacaactcaactattgctgctagtggaggttgttccgattgtattgaacaaggctttgaggatatgagctatcgcataagtattattcccgcggaggcttttttttcaaatggtgttttactggtagaagggccatcagaagaactgttttaccatgcattagctcaatcacttgagatagatttagattttctcaatctatctattctttgtgtaaatggggtttcatttaaggtgtatgtagctattttaaatgcacttgaaataccttgggtaatgcgaactgataatgatgtgtcaaaagtcccgagtaaaatactatggcaatatgcagggatgaatcgatgtttagcattatgtggtgatactcccgaagaacattctgagacagaggtttcagcgagagacactctagacaacggtaaatgggataaaatcactaaacgcattgagcaacataatattttcttatcccgtgttgaccttgagacggatttagtagaagagttaagtaatgaagtgctaaaaattttaggaaaaacaactcaggaatctgctattaaacatcttcaaagcaaaaaagctcttcacatgcgagaactgttgaaaaatatttcagacgatctacccgtaatatcagacggtcagttagcaaaaccacttcacacacttataagactagtgatgggggactga

SEQ ID NO: 312035 - DNA, 663 bp, Proteus mirabilis
gtggttcctggttatgtatacattctcatcaatcctagtatgcccggtttgattaaaatcggtagaacactacgtgactcaaatatgagggcgcgtgaactatcttcgactggtgtgccaacaccgtttcaagtagctttcgaattatttgcagaccaacacgaatctttggaagctgaaatgcaccttaaattgacagattttagggtcaatccatctcgcgagttctttcgctaccctctagataaagccattgcactactgattcagctagctatgccagttcaaaattctaccgaacaatatgtagcggaagatttaacacaaaggctaagaaaaaaataccctacatatcttcaccccaatattacagctgttaagattgtccaaactattggacgtgtctggttagaaattacaatcgagcaagagcttgggggatatctattagatcagacaattaaacgcactgatctaggctttattatcgatgatgacgaaaatgacttatttttccagccagaagatgatatccgcttgaatgcgaataaatttgtgagtgaatatgatgagtactctattgtaatgactacagatcttttccatgaagaagcatgccaacaaataattcaaacatataaaatgaaatcacactttgcataa

SEQ ID NO: 312036 - DNA, 627 bp, Proteus mirabilis
  misc_feature (568)..(577): n is a, c, g, or t
ttgaggagcagagatgatctctatcaatatttgttgattgataataaagtctcgtctgagataaaaacaacaaaaattgaacaagctatttcaagtatgcaattgtatattaatagttgtttatcagatgaagaaaaagaaataaaaacaacagttaagtctcgtcagttctttaaagattggaataactataacaaacgctatagtacttggagtggtatctcattattagcttactatcctgaaaattatattgacccttcaattcgtattggtcaaacaaaaatgatggatacattactacaaacaatcagtcaaaatagtattaatagtgatactattgaagatgcgtttaaaacctatttaacttcatttgaacaaattgctaatttagaggtaattagtggttatcatgatggtgataccttagaagatggcattacctattttattggtcgtaaccctgctgatccgatgagttactattggcgtagtgcagatcacagtaaaataaaagcaggagtaatggctgccaatgcatggactgagtggactaaaattgaaaatnnnnnnnnnntcatattcgttatgatggtacttggagttcatcaactcgtttcccattaa

SEQ ID NO: 312037 - DNA, 291 bp, Proteus mirabilis
atgatgaaaattaccgttgtatgtggaaatggtttaggcagtagcttaatgatggaaatgagcatcaaaagtattttaaaagatctggccgtcaatgctgatgttgatcatgtcgatttaggttcggcaaaagggacaccgagtgatatttatgtgggaactcgtgatattgcggaacaacttaatgctcaagcggttaatggcaaaattgtttctttagataatatgattgataaagttgcgatgaaagagaaactttcgaccgcattacgtgaattaggcgcgctataa

SEQ ID NO: 312038 - DNA, 603 bp, Proteus mirabilis
atgaaactattgccatttaattttgaattaattgatgaaaataagtattttatcagtaatttggcagggtttagccatgtcttaaatcagatggatttatctaatattatagattttggtaaaagtaataatgataacttaaataatatacttaggaataagttatttattactaatgatgatattcaactttctgaaatgatgatagcatcgggtttgggaaaaaaattaatgtcagagatgacattttctccgatatttatgattgttccaacattacgctgtgatcatacttgcaagtattgtcaagttagtagagcctctataagtgcacaacattatgatttagatgagaagaatatccctaaaataatttcattaataaaaagaatatcaaaaaaaaactataaactagagattcaaggtggtgagcctttaataagatttgatttaatcaaaaaaatatataatgaggcagtattccaacttggtcaagagaatattgagtttgtaattacttcaagcctttcattactcacagatgaaatgattgaatggtcagaagaaaaacctgtaatctactcagtatctttagatgcataa

SEQ ID NO: 312039 - DNA, 780 bp, Proteus mirabilis
atgcataataaaaacaggatattacctacaaagaactcatttcaaataatcacagaaaatataaaaaaactacaacatagattaggtcgcgatagagtttcaacagttactacagtaacaaaggaattgcttcataatcctcaatcactgattgatgctcattttgaattagatgtatttgatctttttattaggcctataagcccttatggatttgctgagaaaaaagaaagctacacaatatctgagtatattaatttttatgaaaaattattagatattattttcgaggaaaataaaaaagggtttccttttgttgagcattctggtgctatacatataaaaagattatataatcctggtttttgtgggtatgctgatttaaaatcccctagtggtatagtatttaatagcttattattcaattatgatgggaaagtatatggaagtgacgaattaagaatgcttcagcaggtatactctgatattgacttttctttaggtgactttgattcgttatcatttaataaaaacactatctataataatttactttctaattcatttaacatgctacatgttggttgtgaaacttgtgcttttcagccatattgtggcgttgacccttgtcaaaatatcagtttatttggtgagccggttggaaataaaagtctttcacgattttgtctttatcataaagggatgtttaaactactagtaaaaaaaattgatgaagataatgcaggggctacattactaaaaagttggatttatgcttga

SEQ ID NO: 312040 - DNA, 816 bp, Proteus mirabilis
atgaatgaattaaacaaaaacgcttggatcattaaagctaatgatgtaattgatgatgttttaagtaaagcattcaaaaatgctcagtatggttcgtgggatgaaaatcaaatcacaactaatgtattggtttcattaaataaattaggaaacgtattgaaatggaaatcacaaaaccagataacggtttgggattcttataaacaaagaggtaaggcagagacagaatccggagacatactttttttcattaaagtcatcctgtctagtaaggtgacaattgaaggagtggcttactacgaagcaaaaaaaatgcatttaaaaaataatttaatacctgatggttacacttcttttaaggaagatcaattggttaggatatgtaaacattcgatggctagtaatgtgttgctttacgatgttaatcttgattcaagtaccagcgaaggagcccctacgtgctctttaggtgcgttcgcacttcctactatttttgcgtgttctcttttaaaaaaagggaataaattaactcagcaagagaccaaagaacttccaggtttcggcaagccgtgggtatattttttagccgataatttttcaggatttggtcttgattaccaccctagagccgttatatatgcgaagaattttatacaacgtttccaccgagatttccctggaaatattgtcatagctactactagtaaagtgctagatatagagcctgaattggatcgcagttttattccttcagatttatacatcccgtctaactcggttatagacagagaaaataatgatcatatggataattaa

SEQ ID NO: 312041 - DNA, 1389 bp, Proteus mirabilis
atgatggaaaaaaaatcaataaagataaaagataaaaccaataacgaagagaaattaaatgagatcacttttttctatggttacgatttagatggtaagcttgatatcgaatattactactttccaaacaatcagtattttggtgtgatagaggagattgacatatttgcattacgcaaaacaatcgaatatagtattccccttaatcccaaatacttatctttaatgaattttacaaataataaaaaatatatatcggatgtaaaattatattccttttcagatgactctggatatttgcttcaaataaaagtttccgatacaaagaagatggtaaataatatattaagatttattgatgaaattcccgcatctaaaaatgtcggaagtataataaccgtattaaatgaattaagaaaaataaagtctgataacaccgatgactatgaatattactaccgaggacattcagacaaaaaatatagacttaccccttctgtatttagagaacacaaactcagtgagtcaactatttatcatgaattctcactcgaaaatgcaaatgaattttctagtaaaaatacttgctttgatgatttagtcaaaatgcagcattattccttaccaacaagattgttagatctcactactaaccctcttgttgcattgtattttgcttgtgaagagaaaaaaggactagatagaagtaattgtaaaaaatgtgggaaatgcaaggcatgcaacaaagagcctaatggtgagttttttgtatttaaagtaaaaaaaaatctaataaaatattatgattctgatacgattagttgtattgcgaacatagcaaaattatcttcaaggcagcaatcagaattgcaaaccaacgttgttaattataaatgtatccttatagattttgtgtacaaatttatgtataaagacattttggctacatgcagtaatagagaagtcttgtcatttgaaaatatttataattgttatagtaaaattaaacgcgatgatgatttttatgaaatgagtactcacaaacggaagttcaatgaggattcatatcaacttttacattatattaagcatgaaaaaccatatttcctgaatgtaatgaaccctatgcattttaatgcccctctcatatctaaagcagtaaaaaataatagtcgagtaaaatctcaatctgggctttttttgctgttcggactgaatgataccttaagtaaaatcagtaaaggtaattttgaaatattttcactaacagtgactgataaaaagcatatattgaagcagcttgatttgttgaatataaataaaagtactatttttccagagttggataaatctgctgagtatattaaagaaaaatttaaagacaaataa

SEQ ID NO: 312042 - DNA, 165 bp, Proteus mirabilis; identical to SEQ ID NO: 305612

SEQ ID NO: 312043 - DNA, 180 bp, Proteus mirabilis
atgaagaaaaaaaaagggaaaaaagggcgtaagatttttggcaaagaaatgttaatgaagataaatgagtctaaattaattgcaaaagaacaactggctaatatgcattataattctaaacctttggatataacctgtagcacaccttcatcaaatatacgttgggcgactaaaagataa

SEQ ID NO: 312044 - DNA, 462 bp, Proteus mirabilis
atgaaacactggaaactttacattgtcgttgtgatggtggggattgttgctggtggttgtgcgcttattaatgcacaagcgaaaagaattaacacactgacagaaaacaacaaagaactgactaccgcactcgaagagcagaaagatattaatactgactatcaagtacgcatagaacgactaaatcaacttgatacaaggcacacacaggagcttgttaatgcaaagaatgaaattgatagcctgcgtgatgatattcgcaatggcactaagcgggtgtacatcaaagccgaatgtccaacgtccgacagtggtaccccctccggcttggatgttagcagacccaccacagtggcgagagacactgaagaaaatatactcaatctcatggagcaaattgaaaacctcgaaagacaatatcttggtttaagggattattactttactgaatgcaatagttaa

SEQ ID NO: 312045 - DNA, 450 bp, Proteus mirabilis
atggctataaatgaagataaagattctcctgttgttgatgctttaaaaaatatgcttattccaggatattccacatataaattatataatgttctatctgatatagaaaataatacaactgatgagcttaaagaaaacgcgcgaagaagtgaattggagtcatttattcttcaatcaagagcgaaagtggagcaggagctgtccatcgctagacgtattatgtgtgctgatgaagtagaaatagaggaatattacgatgttaatgggaagggaaatattgggttgaaatctgatgactcatcctttgctattggtgcgtctggtgaggggagaaaggtaacaaaaagagtgatcaagtttaaaggatttagtgagaaatacactcaagaaataaaaaacaaaatagatgagctggaagataattcagcggttgtcactagagataaataa

SEQ ID NO: 312046 - DNA, 267 bp, Proteus mirabilis
atggaattaaatttatgctggtggaatataggaatatctccaccgacaaaatcaaaacagaacgtcaagactgaaaaagttggcttagcgaaaaaatatcttgaagaacttatcattaaaaaaacgcttgatatcattgcgttgagtgaggtttctgaaaacgagagctacgcttttaagcagttggcgactcaattaaaaatgggttatatcgatctctcaggtaaaataggacgaattattattgatatatcattaatatactag

SEQ ID NO: 312047 - DNA, 753 bp, Proteus mirabilis
atgaatgggcatcaatacttagaaaatattataaataaatatagtgtaaatttatataatgccgaatatcttaggatgttttttaagccatttataaataattgggctaatggcaacttagtggatttaactttatctggctcaatatcaaagggaacagcagtatctaatggtacagatgttgatcttttcatttcgttatcatcgtctacaaaagatagtttaagcgatatttataattcattattcgttgctatgcaaaaaaatggattttatgttcgcaaacaaaatgtttcaatcggaataaattatagcaactatcagattgatttagttcctgctaaaagacaagaccaatatggaaatgatcatagtttatatttgaataaaaaagggtcttggactaaaacaaatataaataaacatatttatgaagtgaaaaactctggtcgtgtaaatgaaataaaattaattaaaatatggcgtaatatttatcatcttgattttccatcattttatttggaaatgttggtcattgatgccttgaaaaaccatcgtataaatgatttacccaataattttattagtgttttgagatatatttcaaataatatagaagtcaattcgtatatagatccggcaaatacgaataattgtatttctgaccagatttcaatgcaaacaaaaaaacagatagcatctcaagctactgatagtttatctaaaaaaatttgggaagatattattttatga

SEQ ID NO: 312048 - DNA, 288 bp, Proteus mirabilis
  misc_feature (273)..(282): n is a, c, g, or t
atggccagtatgatactcgattatcattatgaaaaaaaatctaatttttcatttaaaattcaaccaaaagatttagtcgaatttattaatcaaggggtatctcttacagagagtgaacttaaggataatgcaacgctggaatttaatagaacacaaaacgcgtcattaggtgttgaacttagaagtgaagtcagttttgatgtgggagtttctgctaatgaaaatatagaattaaatttaccgagaaatgcggttggtgctaatctctctttnnnnnnnnnnctttaa

SEQ ID NO: 312049 - DNA, 1416 bp, Proteus mirabilis
atgattatgaatgaatctggttttttttggatgtctaacctttctgagggggaacttcctgtatctgggcaattgacaattgatgataacggaattattgagcttgaacttcatcaaagctttgctggcagagttggaggtgaggcaatatttggtaccgttgaaattgataaagaaatttctatttttggtgttttaaaaaaatcagaaaaatacattaccttaaaaaacatcagaaccaatggggggcaagttggacatatttcatatgaaagattcgtggctgagatttgcctaatatccaatgtaaaaataaaaacggagaaattcaaggcaattaaaataccactaaacaatttgaatgactgggctcatccaggaaaatttgaatatttagaaaatacagagttaacctctgctataaatatgaatttgaaagagaataactcctggacactggatgatggcacccttaaactcgtaaatcatctagaagggaaaaaacccaatcaacaaacggttaagcttgacattagcattacatcacatttttattatgaactaacccaagacactgaaatttatgacctcttagataagtatgatgggctccaggatttattaatgattctaatcaacgatcaagcatcggttggttggccattattatactgggaagataacgaggtactccgtacagtagagtgttattttagaagaagccacctaacggagaacgcatttaaatggatcgacgtaacagtaccattccctagaattagggacaaattcggggcaatggttactacttggtatgaaaaaaggaaaactcttggtccaggaataaatctttatttgagtatccttagaaacaaaaacacgtatgcagagaatatttttgtcaatatggtttggggactagaggcattagacagaagaaatgatttaaattctgatgtaatggttaagtcaaaacttgaagagaaaatacaacgaatatctgacattattaaagaaaacaaaatactcaaatcagatgatcgcagatggctaatcaaggcattatcgagagataatgaacgatctcttgctgaaaggctttatgacacgttccgtcatcttaatctagatattgaaccaacattactgagaacgttttgtgattcctgcgcacatctcagaaatgatttatcacaccatggaggagaaagaacccctggtgaatatgataagtttataacaaaacttattccacatctgcacgcgctttccactttatatttacttgtcatgctggatattcttcaaatagaaagtggagagcttaaaaaaattatttattactaccctggatgttataagcatagaaaagctttaagttctgttggcttgatttcagacaattctcaactttag

SEQ ID NO: 312050 - DNA, 939 bp, Proteus mirabilis
atgagtatttttttcaatcccgctaaacacccacatcgcttaaagacacaaccattgggggagcaaggtgagcgctataacgaagattggcccatgcctgagctcgattttttagagaccgtcgataaacaacagtgcattctagttgataaagaaatacgccgacgtgatgcgtttgctttccctgggtttattaccggaattattgtctttattatggtatttcattttgtttttatggaccactataatcaatatacaacttttaaagacgatattccttattatgaaaaaaaatatggtaacttatatttggaaaacccaaacgatcctaaaatacctccttttgttaaaaatgaatattcccttttcttctatcaagacagtgtgacaattttagattactttaatgcttattatagtcgatatattacatcaacaccctatcaagacacgctattttttcttactatgttcatcatgtctttcgtcttacttggcttgggtggctatcaatcttttttcaaaaaaaatccaatactcgtttttaatcgtgaaagaaatctggtctatacttggcgcaaaaataaggtatttattgcccgctatcctgaaattggtatcggtaaaattggtaaaacacttacctttcaattattcgggttagataagtcaaaacaaactttagtttctgaattgtttttccctaatgtctatgtttattcagtctacaataccagtactgactatcacgaccagcgcttcattaattttatcaatacttatatgcgcgaagggcgtgatgccattattccattcgattatcaccgtaaaaaacccaaagtgtattttggcaaaaatccacctcctgctgattttgagcaacaggtcgaacaaattttagcaaagcttgatcaggagaaagaacaccatgcgtag

SEQ ID NO: 312051 - DNA, 261 bp, Proteus mirabilis; identical to SEQ ID NO: 299232

SEQ ID NO: 312052 - DNA, 558 bp, Proteus mirabilis
atgttgataaataaaaatcaaggttgctctgtaattgccggaggtaaaggaaacgatactctaattgttgagggcggacagcatattttatttgccaatgaaggggatgataagctctatggtggtaaagggaatgatgttcttatttcagagagtggtaatgattatctggaaggtggagagggggatgatatctacctaattaacaaacatcatggtgagatcacgattaacgatcatgtagggaaaaatgttatttttattactggcttgggtaaagatgaagtgatgttatcttcccgtgataatgatgatgaagttcttctttctcaggataaaaattttattgtgagaataaagaataaatataaagaggagctgcagagcacttatcagattgaacaaagggaggaggtgctgagtgatgaagcattagtctctattgtgcatgaaatggctcagtttaatcaaactcagttgtcttctatgcaaggaacctttttgcctgaagctaaagaatggactttaatgccaatcatcactaagcatttaggttaa

SEQ ID NO: 312053 - DNA, 726 bp, Proteus mirabilis
atgtgtaattactcactacttataggaaatggaataaataatattactcaaggaaactcttggcttgatgtattaaatagtttagaggaaaaatatggaattaagataaatacaaaaaacaaaccatttccacttgcctatgaagaaatttatttaaatattttaaattcaaaccgtaatggcttttcagaatatgagataaaaaaggctattgcagacaaaatacaaaaaatacatcccaacgaaattcatgaaagaatagtagaattagaatgtaacaatatactaacaacaaattatgatttaacatttgaactttgtttaaataatgatattaatactgaaaatttaaaaaataaaggaaaaataaaagaaagtagatacaatatttttaggcattacgaggttgaagataaaaaaatatggcatatacatggtgcattaaacaatcctaactcaataattcttggctatgaacactacagtggatacttacaaagcatgcgaagttatacaaccacgggaagccaatataaaaatgaaagtttaaaagttccactaattaaacgactgaaatcaaataatattaacaatagttggatcgatgattttttcactaaagatatatatattataggattaaatttagattttgttgagattgatctttggtggttacttacattcagagaaaggtgccgacatataaaaaaattagatttttaa

SEQ ID NO: 312054 - DNA, 402 bp, Proteus mirabilis
atggaaataaaaacccctccccaacaaaaacacatagcccacctccaaaagctgctaaataacgaaaataaaacttctacggttggcattgtagatttaaaaggagatattgattattggcaagtaattgcgttagaaaatggagaagcagtcggtttagccaccatccagtttggaaatgagttatataaactttatgtagccccaaattaccggaataaaaatgttgctgacaaattggttaactatgtaatgggttgtctaaaaaataatggtgaaactgaaatgtttattgaaatgacccaaaagtccttgcctttttgggggaattttataaaaaaaaaccagcttaaatacaatgtatatgaaggacaattgaaagctgacatcattttaaaatag

SEQ ID NO: 312055 - DNA, 396 bp, Proteus mirabilis
atgattaaggtcatttctgctgattcttattattattcttgttattttgattgtatttttaatgattgtttttctaatcgtaagaaagctggttgcatatattttggcgactatgaaactcatgatgatgcatggaatactattaagagagtattgggaaaatactatgattttgctggaacaattcaaatacctcatcatgggtcaactaaaaattatagaaatgaaattaataaaaatgactacgttttttcagttatttcatatggtacaacaaatacacatgggcatcccggctcatttacaacagaatctattttaaataacaatggtattttattggaggttacagaaaatccatcatcaaggttacattttgtgatagatgaaaggtga

SEQ ID NO: 312056 - DNA, 1152 bp, Proteus mirabilis
  misc_feature (1038)..(1047): n is a, c, g, or t
atgctagcgctcgctaatgtctatttaaaaccaaatagtagtttttataattttgaaaaagcacttaagctggtagagagagcatataacatacagccatctcctgaaagcaaattattattggctaaattatattctaatagtgagggggttcatcagaatattagaaaagcagttagttttctgaaagaaaacataactaatgataaattgacaggtaaaagccaaagagaattagtaaaaatatattttgattttggtgcttctgattatcttaaaaaagaagagattgtgaatattttaagagagagtgtaattaaaaataaatcagctggtacatttaatcaaaactatagcttagctcatttttatgcagatcttcttttagaagaagatgtcgccaataatgaagaatatgctttttcattatatcaaaaagcacgaggttatgcctatgaagctacttttcatcaagcaattgcgactattaaatataaaaatataatagatgatcaagctcttattaatattgtttcagaattgaaagatgatttagaaagcagaaggttgaccgaaaaaaaacgacaggaaggatatagtattcttttccgatatggaatggattcacagtatgtaattgattttattgtggaacgttcgctatatgatgataaaataagaaaggctattcaaccattattaagtcaaaatacaaatcttgcatttcaatatacaataaagaatataatacatgagaactcagctaacaatattaatgaagataatttaaaaaaatattataaggatatatttaaattagctgaaataggttctattgatgcaattaaatttattattacaaaagagtataaagataagagtgctggtgatgaaatttatcaagactattcttttgataagttaactaatatcactattaaggaacgtttggcttggcgaaaaaaatgtgcagatttaggtgattttatttgcttaaaagaattagctataatttatcgagacggtaaagagggggtnnnnnnnnnnggaaagaggggggtagaaagaacattgcgaaagcatctgaatatgaacgacgtattagcatcaattcgtctcactttgagctggaatcagaaaaatatgaaatag

SEQ ID NO: 312057 - DNA, 924 bp, Proteus mirabilis
atgaaatatcattccttattaaaaaatttattttatgcaacactttccatcatggcgttaaattttagtggcgtcactatggcaaaaaacaccatgaatgatatttatgttattaatttatcctcaaataatacagtttgtggtgtaaaaattaatgaaatgctagtaatgcataataaaaaacaccctaaaggtcattattccaccggtcaaaatatctctagtgtgcttgaaaatgggaaaaataccttaggtgtaattatgtttaatgggtcggtttttactggcgaagaaaaacttacccctgatatgtggtgtgaagtcgaacttaagaaattatctgcaaacggcgatagctccttaatatcgggacttagattaaacggaaataatgatgggaaaatggtggtctctgataaatatcaaaataacagtgagcatatctattttggtagtcccagtcgaaaaagtgaatttgatgctttagaagcaaaaaaccaatttaatatacagggtctcccccaatggcaatgggaaaaagcaactcccattactgaagacgatatccctaaaattcgtgctttttatgccgaactacgacaagcatttattgataaaaatctagataaattaaaaactatgggggaaatatcctgggaagaaatggcctatgccgataatggctctcctgatattttttggaattctttagagtttaaagaattactcaaggatggatataaaccctcagatatagattggaatcgatatgaattaaatacctataacaataaccgtttgtttcgctatgaaataggatttagcagattatcgccaataaaacttgttaatcctgaagagagaacatttcattataatccttacctttctattattgatgggaaagtgactattgtccgataa

SEQ ID NO: 312058 - DNA, 924 bp, Proteus mirabilis; identical to SEQ ID NO: 312057

SEQ ID NO: 312059 - DNA, 363 bp, Proteus mirabilis
atgtcagaatttgataatttattgaaatcagctaggtatcttaatgcatatacaagacaacaaactggaaaaccacaaggagttttgtttgttgaaaatccatcagatcggatattctgggaaaatgttattgctcatgtttgccctaataaatatagtgtaaaagcatatagcctagataaggcaccaggcaaacgttcatttgaaaaagactatgacaagttacatagctcatttattgttggtgtcgatagtgattttgattatctttgcccaactagacatgatcaagctaaggctttaaatgaaaatccctttattatacactgtctcttatacacatctgacgctgccgacgaatag

SEQ ID NO: 312060 - DNA, 189 bp, Proteus mirabilis
atggatgaacctgaaatttctttacatcttaattggcaggaaaaattaatttcaagcataaaaaaacttaatgaaaattgtcaaattatcattgtaactcatagtccagctattgttatggatggatatatggatgcttatatagatatgagtgatattacgatggaggctagtgatgtcagaatttga

SEQ ID NO: 312061 - DNA, 309 bp, Proteus mirabilis
atgattatcgcttattcaacagctcctaatgaaactgtcgcccatgaaatagctcaccatcttatacaggcgaagcttgcagcttgtattaacgtccttcctaatatcaaatctatctatcattggaataatgaaattgttgaagataatgaggtacttatgatgatcaaaagcgagagttcaaaacaacagattttgattgatacactagtaaaaatgcacccttacgatacaccagaagtcattattgttcctatagaaaatgggtttcatggttatctagaatggatacatcaaagcctaaattaa

SEQ ID NO: 312062 - DNA, 156 bp, Proteus mirabilis
atgaaggcaatatctttaccagaaaataaaggattattaacggatgaattggtgatcgattctgctgtgtttgaaaatataaaaatttcttctgaacgttatattgaatctatattaaaaaatataggtgatgaaattaataaagaatattgctga

SEQ ID NO: 312063 - DNA, 174 bp, Proteus mirabilis; identical to SEQ ID NO: 16562

SEQ ID NO: 312064 - DNA, 264 bp, Proteus mirabilis
  misc_feature (213)..(222): n is a, c, g, or t
atgattatgaatgaatctggttttttttggatgtctaacctttctgagggggaacttcctgtatctgggcaattgacaattgatgataacggaattattgagcttgaacttcatcaaagctttgctggcagagttggaggtgaggcaatatttggtaccgttgaaattgataacgaaatttctatttttggtgttttaaaaaaatcagaaaannnnnnnnnncatcagaaccaatggggggcaagttggacatatttcatatga

SEQ ID NO: 312065 - DNA, 1137 bp, Proteus mirabilis
atgactagagtgaagtttcaaagggtaaattcaaagattgaagctactagacaagaaattagtactattaaaactcaacttaaaccaagaagaccccgacaatccgttaaggtgaaaaatcgagatatttgcgtaaggaaacctaaaattattgccgacttatcaagtaaagttgttcttaccgattccacatggcagtttgttgaaatttaccttcgctctcaaaatcaagatgatgcactcttttattggaagcaagcaagaaacttttacgaatcaacaaaaattcttagtgtcgtatcaaagcctttaactgcatattactgttttttaaatgcaacgaaagcattacttgaagtaaaaaatgtgaactacgatctatctcatggggtaacgggaaaaagggtaaatggccatgttggaattcagaatgaacttgttaaatttcaaccagcgggggttttagccgcacttggtaaatatctaggggagcatgtacctgcaggtggagaagagtttacattaaaaaacatactctataatttgccatttatccaccgagccttcaccattacatatagaaatatggcagaattattcattccagttttagaacctcgtttagtttataataacaaagaagataaaggttggcttgaacttaagcttgaaccagaacattccactaccagaaacctgagtcgattggttggttatagccttgaccctcaatatgataatagtgtgtcgtatacattgagacgaaataaaaagtttgaatggaaattaaccaaaggagtaccgacacaggaaagtttaactaaattgcatgaatatcataaacagcgtagaaaagagctaagatatatttatagttcaaatgcactttggtatgttaaaagaaaagatttgaaaaataatataataaataaaagtacccttaccttaatatttggtgcaatgcaccgattaagtgaattatctagatatacccctcaagatctgagtaaacatcttgagaaaaatgctagttggttgcttacagaatttattagtaaatctatatatcagttcattgaccaaatttcatctgagattactggtaatgattttagggtaactggatttagagattaa

SEQ ID NO: 312066 - DNA, 750 bp, Proteus mirabilis
atgctaatgacaatgattaaatcacttatttttatcccttatctattattaagtggatgtggtgagtatatcaatatatatcttaataataaattccccgtcaatatgaataatgatggcaaaaaaatcacggtttattcaactatttcccctgaaacagtagtgcaagtccgaggtacttatacgtctaataagtgccaacgttctcattttagtgctgattataccgaagtcacttattcctctttaacacaaaaagtggaggtagagcgtaaaataactgaggataataaaaccgcgacctataccgtgcctattgatggagggggatggtgtaattggaaattgataaaaatagaactagcgccaatctctaccatttataaaaatcatatggtgattagtaaggttattccaattgtcgatgacaagcattcaaaaatagaactatttactacattggcccctgttatagtggaagaagatgatcaatccatctattattcaccatcaatcacggaaggtgagaaaaaactatctaataaattaaatggaaaaatttattttaattataaagttgaacctaaactaactacgactatcatctcaaatgataaaaaagctattttccctaacggtaatattaaaacactgagtggttcgacttatagtaaaatgattggttttaatgaaataatcgagaatagtgatgagaaagcgtttacttcttttgttcgatatattgattaa

SEQ ID NO: 312067 - DNA, 810 bp, Proteus mirabilis
atgaacatcaataacttatctataactaaaaatgctcaagtttttgaattaaaaaaagaactcactaaaaaatctattgaaaaatatttcaacaacataaaaaaacaaggtaattttcttataaaagaagtacgttgtgataacacaacaagtacaagtaaaaatgtaaaatattcttttgttctatttaaaatacatgaagagccatcatttttaactagcacaaatttgatagaaatcaaatatggatattgcctgctaatcgaaataaaaaactcactaattgtttataaaaaaaatgcagaatcaccagaaaaaagcttgccacagtacattaaagaatatgattacagccaaatatgtcattttaaaggagatgaagatcccgattatgaaaaaatatctatgaacaatatgtctctttccaatgcaataattcgctctcgttcatatgaagcattacagttaaatggtattatatctaatataacaacaggaagatctattccacgaaatttcagaatgaaagtgaaaaatgaaatttacactttaactcctaatacatcaagaatagttttgagagataaaaaatgtaatataaaagaaataataaactggtctaatgatttgataaatgatatacaaaaaaatgttaaaagcccattcatatcaaatttcgccacacctataaaattaaaagaaataataaatttaaagataaaagtatctgctatactgataaatatatctgatttagaaatagctgtctcttatacacatctgacgctgccgacgaagaggatagtgtag

SEQ ID NO: 312068 - DNA, 873 bp, Proteus mirabilis
atgtttttttcaaagaaaataaaccaattttttgccgtagccatcaaccaaagtttggtaaaagcagcagaaaaaattaatgttacaccttcggcgctacgccatgggattaatgaactggaaaaaaagttaggtaaatcattggttaagagaacgaaagaaggcatgatactgacgccagcgggaaaaaaactatatgaaaacttatatccttattataaaaaaataaaaaaaattgaaaatcaactaatagataattatacaggaaaagacacgctttctattaaattggatggtctttattatccagacctaaaaaccaagctattggcgattaaaaaagaatatagccagtatagattagctttaactgatggttttgttgataaccttgagaaagagttatttgatgaagaatttgatctggttatctcctctcttgatttttcatataccgctcagaatattcaagccatcactctatgtacacagaaaattggtttattagttaataaacatgtatttgaaaaatatgctgacaaaaagaccttttttgctaatgaaacactggtgcaacgcagtagtgctttgcaaaacccaatattctctaatatttttaataaattaaaaaaaagcggttatcaataccatacattaggattaacagaaatggcggatgtcttacattatattgaagaaggtgcaggttactgttttttacctgataattttgattatatttcaactatcacaaatgataaggttaaatttatatcttcacctttttgtttcgacatctttgtgcatcaaaaagtctattttaaacaagataataataaaaacttactcaatattgccatgacacttcgttaa

SEQ ID NO: 312069 - DNA, 567 bp, Proteus mirabilis
atggttatttatttttatagagaatgggtaaaaatattattttttatgcttatttttttacctgttgcaaatgcggctacaacaatgaattttgatggtactttgattgatacgccatgtaggattgatcagccaagtttaaatcaaaatgtggtttttttaaatagcactccaagggattattggaaatatccagcagttagacctgcagaaaaatttaccattaaactgatccaatgtgatgcaaaatcgttatggaaatcagtgaaaattaaatttaatggacagccagagccagagatgggggctgaacaacaaaagtaccttacactttcatctggcgttaataaaagtaagttagccattggattaattgatatagatggaaaccaacgtattactttaggtgaaaaccataacggtggaaatggaactcaacttaacgatggcacgatgttgctgacctttaatgcatttgttgaagcgacaccaaaagcaatacaggaaaaaagtgttgtacctggagtttataatgccacggtagaatttgaggtttcttatgaataa

SEQ ID NO: 312070 - DNA, 729 bp, Proteus mirabilis; identical to SEQ ID NO: 311591

SEQ ID NO: 312071 - DNA, 537 bp, Proteus mirabilis
atgaatattataaaaacagaaattcctgatgtgttaattttagaaccaaaagtatttagtgatcatagaggttttttttatgaaagctttaatcaaaaaatctttgatgaagcaattggttatccagtaaattttgttcaagataatcattcaaaatcatcaaaaggcgtattgagaggcttacactatcaaaaagcaccacatgctcaaggaaagttagtacgatgtgtttacggtgaagtatttgatgtagctgttgatatcagaccagagtccaaaacatacggaaagtggataagtgcgatcttgtcagcaaccaataaacgtcaattatggattccagaaggttttgctcacggctttttagttttaagtgaagaagcagaatttatgtacaaaacaactaacttttatcatccagaaagtgaagaacatattatctggaatgatgagaatattaatatagattggccattaaaaactgctcttaatatctcagaaaaagatcaaatagtccataaatttataaaatcatga

SEQ ID NO: 312072 - DNA, 939 bp, Proteus mirabilis
atgccattgagagagaaaaagtatcaccaaaatcaagagagcattttattttttccaggtcagggtaggccttatttaggtatgggaaatagggtatatcgtgacgttccatcaataaaagaagtatggaattgtgcgagtgaaatagcagggttcgatgtaaggacggtttgtttaaaagggcccatgaataaattggtacaaacctgttatcagcaagtggcgttaacaactatcaatattgcttctctttatttactgcgtgagcattgttatgtgaatgaggcggggtattcagggcacagcgctggagaatattcagcgttatttgcggcgaacgtactggaattggaatctgtttttaagttaattagttatcgcgcatctattatgcagcagctcgctaagaataacaaaggggtgatgtatgtcgttaaaaattgcccttatcagacgttatcaacattgattgcccagcaagatctcgcaacacaggtgaatatttgctgtgataatagtgaacttcaccaagttattggaggggagtatgcaagtgtacgtaagattgtcaatcaattagctaatatgaaaatagaaaccaataaattagccgttaatggtgcttggcatactgaattgatgagcgaggggaaaaatttacttgctcattttttacagacaatccctttttcaatcccagataaacccctagtgatgaatgtttctgctgagattgttagcgatattgagacaattaaacagaatttagttaatcaactcacagaaaccgtaagatggacagcaactatggcgctatggtgtcatttaggctatcacaattttattgaacttggtgatagcaagtcattgtattatttagcgaaaaattcacatacgctaaaagataaaaatatattgcatgttaatgattatatttaa

SEQ ID NO: 312073 - DNA, 564 bp, Proteus mirabilis
atgatgtcggcactattattagcacaaaagctcattaatagtgatttacttgataatatatttatttgtggtggttttcgggctgtaccaattttatcttttagtgaaatagaaagacaacctataaccctttttttcaagcctaatacgttggaaaatataaatagtattgaaagagtcgcctgcatcattatcaataaaaaacagtgttcagatatttcgatttctatcaatcattatttttctatgagtcaaaatagaaaaaaggcaataaagaaattagttaaaaattggcaccgttgtattaataaacagacgggttcaatttatataactgcgttactgacttataaatatatttctatgcttgaaaccgcattcacagcattacctgttaatcttaattgctattttttaaatcgtctttatggtgatagtggatttatcacaccggctcttatgttcgatcatttacaaaaagcagcagatagtgcctctcattaccttttgagtgcatttgatggagaaaatggtgtttggctggttgattgttggaaacaataa

SEQ ID NO: 312074 - DNA, 1380 bp, Proteus mirabilis
atggttaagaatgtgttgaaaatctcaacattagcaatgttggtcgcattcaatgtgaatgctgcgacagtcgatctccgtattatggagacttcggatgttcacagtaacttaatcgactttgactacttcaaagacaaaccaacagaacagtttggttatgttcgtacggcgaatttaattaaagccgcgaaagctgaagcaaccaatgcgattttagtggataacggtgacttgatccaaggtagtccactggctgactatcaagcagctaaaggcttagagaaaggggaagctcatccagcgcaccagttaatgaataccatggggtataccgtaggtaactttggtaatcatgaatttaactatggtttagattacctgaaaaaagccattgcgggcgctgaattcccatatatcaatgccaatatcatggatgcgaaaacaggcaaaaactatttcacaccttatatcattgttgatacaccagtaaaagatcgtgatggcaaagagcacactatcaagattggttatatcggctttgtaccaccacagattttaatctgggataaagccaatctggatggaaaagtcgttgtcaatgatattacagaaacagcgaaaaaattcgttcctcaaatgaaaaaagagggtgcggatctgattgtggctatccctcactctggtttctcttctgaaccttataaagctatggctgaaaactcagtctattatctgagtgaagttgatggcattaacgctattatgtttggtcatgctcacggcgtattcccaagtaaagaatttgaaggcattaaaggtgttgatgttgctaaaggcactgtaaatggtgttccagcagtaatgccaggccaatggggtgatcacttaggtgttgtcgatatggttatcaataacgacagcggcaaatgggtgatgacccaagcaacaggtgaagcgcgtcctatctttgataaagcaaacaaaaaagcattagttgaacgtgatgccgagttagcgcaaatcattgaaaaagcacaccaaggtactcgtgatttcgtcggaaaacatattggtaaagcgtcagctaatatgtatagcttcttagctttagtacaaagtgatccaacggtacaaatcgttaacgatgcacaggttgattatactaaacactttattcaaggtgatccgaacttagacggcctgccagtattaggtgcagcagcaccatttaaagccggcggacgtaaaaatgcacctgcagacttcgttgaagtagaaaagggtgacttaacattccgtaacgcagcagacttatatctgtatccaaatacattagtggttgtaaagcaaccggtgcagatgttgttgagtggttag

SEQ ID NO: 312075 - DNA, 2250 bp, Proteus mirabilis
atgaaaactcaattaacaaggaaaatacttggctcttgtattctattttctggtattcattctctggtgtttgcggctgaaacggaaaaaacagttcaatttagtagtttaaaagtctcatcggcacaaaaacaaacaccagagcaaaaagcgttagctaagccgggggcttatagcgctattggtgaaatcaataatcttagctcggtagaacaagcattacgatctacaccgggaacttacacccaaatggatgccagtcagccgggggttggggttaatatccggggattaagtggttttggtcgagtcaatatgatgattgatggggtgactcaaacgatgtatagcacgtcacctagccaatatgcgcatggtggacaaccatacaaccagtttaatagcatgatcgatcctaactttattgtgcaaattgatatttctcgtggtcaacaagatggtgaaaatagtattaatgcgttagcggggagtgctaattttaaaacaataggtattgatgatgttttattttctaatcatcgttggggaataagaagtaaagcggctcgagggactaatggattaggttataacggtatggttgcgattgcaggaaaacagccgatatttaatcatgatggttatattggcgctatgtttgccataagtggacataatattgaatcttcttataaaaatggggcaggttttaatagtcatgagtttgcaaccactaaagactttaaccaaaagccacattctgaattagcaaaaatatcgtttaaacccaatgattctcatgaaatagaattaagtggtcggttttataataataaatttaatcgaagaaccatagagagccaagattattatgctaaatatcgttataccccgctaaacgatctttttgatagtgaaatattattgagtagaagccaagcttcacaaaaatttgccggtgactctttaatgtcattacgcaatggacatgcgaaaaatatttccaatgcacttgtcgctaaaaataccagtcgatttaattatcatgagctggatatggcactaacattaggtactaaactgatgtcgattgattataatcgagaagtgacagctccttcgagcgatccatggcaatcacaaaatatgattgaatacaatgtatttgctccgcaaggaaaaaacgacatcagcagtcttttttcacaaatgaaatttgaatacgatatttataccctcgcattaaatttaaactatacggattatcatattaaaggatataaacccgcttgtgatcccaaagcagcgtgtttccctgaaggtgcgatgaatgttaatcgccacgaaaaagcgtgggagccgggagcactcttttctgcacaaattatccctgaatttgaaccatttatcagttatgcccatacgacaagggcaccaaacccacaggaaattttctttgctaatgaaggtggggcatcgatgaacccctttttaagaagtgagaaagcggatactttccaaataggttttaatagttatcgccctgatttaattgttgccggagacagctttcgcttaaaagcactttggtatcataccaaagtaaaaaattatatttctagtgattcctattttgtttgtaaaggtggcaaacgttgtaaaaacgatggtactttgactactgatgactatggtgatatggaatacgatggaaatatctatttatacacaaatagccttgatcctgtcacgatgagaggttatgaactacaagtaaactatgatgctgatgtattctataccacactttcttatagcaatgagcgtacctcacaacccacttctattgcgatgggtgattttgggcaaagtcctgcatcagaacttcccaaatactacgcaacgattgatgctggtgtgagattattcgatgaccgatctctcgaattaggcaccaccattcaaattactggaaaaagtcgtaaggcttcgcctgaagggctcgattatgatacaggagccatccctatggtcgaacaagaaaaaatccctactgtgatcaacgcgtacgctaactatcaaatgaataaaaatgtgtcattaaaatttgcgatacataatctcatgaataaaaattattcaaatgcacttgatagaagtaattcagcgccagatatgtacgaacagggacaaaataaacaaacggctagaggcagaagtttcctgtttggtggagaaattcgtttttaa

SEQ ID NO: 312076 - DNA, 240 bp, Proteus mirabilis
atggaacttaatcagctaataaatatattaactacagatgagcaaataattattcgagagttagtgagctttaaagcagataaagatgaacactttacttggctaccaaccgataatatgcaaaaactgatcacttttttatggcaagaaacagcaactcaattagcgaaacgcaccgtaccagatagtgaaatattaaataattggtttaggaaaatacttgatgaaactgaccattga

SEQ ID NO: 312077 - DNA, 1341 bp, Proteus mirabilis
atgcatcaatctgatgtagcggatcgctcacttttttcccttagctggcctatttttattgatatttttcttcatcttgccacgctattgattaacacttacatgataagtcatgtctctactgcctatttagctgcaatgggcgtaggtaaccaagtttttgatctttttatcaccatatttaactttattagcgtgggatgtagcgttgttattgctcaatatttaggcgccggtaagcgcgataaagccagtcaagctattcatatttctatcgcctttaactttttgctgggctttagtagtgccattattattctcttttttggctacaacattctaaatgtaatgaatacgccagagcatttagtacaagatggctataactatctccatattttggggatttgtcttattcctgaagcaatttcaattatcttagcagcctgtttgcgggtttatggtaaatcgaaagcggcgatgtatgtgacgttaattgccaatattgtcactgttatcggcaatatgattgtactatatggtttctttgggcttccacaatacggtttagtgggtgttgcatggtcaacagttgtcggtcgtattattgccgttgtcttattatgtggtcttttattctatggattaagaattaaattcgatataagactattagtgatttggtctaaaaatatgttagccaaaattctacatattggtttacctgctgcaggtgaaaacctagtgtggattttacattatatgaccgcctctgcctttataggcttaatgggagaagttcctctcgccgcacaaacactctatttccaactatcattattcttaatgttatttggcattgcgattagcattggtaatgaaatattagtcggtcatttagttggtgcaaaacgatttgatgatgcatttacacggggttttaaaagcctaaaagcaggtgtgctatttactattggtgtggtgattatttattggtttatgcgtgatcctattttgtattctatcaccgaagatcaacgcattatcgaccaactgttgcctttatttattttatcggtctttttggagcctgggcgtacatttaatattgttatggttaatgcgttacgtgcagccggagatgccaaattcccactcattacagccgtttgctttatgtggggagttgctattcctattggctatttccttggtataaaaatggaaatgggtttaattgggatttggataggttttctttgcgatgagtggctacgaggcttaacaaatgcatggcgttggcgctctcgtaaatggcaagctaagcgcttagatatttga

SEQ ID NO: 312078 - DNA, 633 bp, Proteus mirabilis; identical to SEQ ID NO: 307521

SEQ ID NO: 312079 - DNA, 669 bp, Proteus mirabilis
atgaatgtatcaaaccctcttcgcctgcaattcaccgatgctttcgagaatgtttgctttactgcgttctgctacaacctgaaccagctttcgggcgcggttcaagaagccgcacagcgcgacgcgcagaagttggtttctatcgacgtgatggagccagaaggctctaacactctcagcacctacagttgttcgctaatcgtagggccgaccggcgcagagcagagcaatctgtacaaacaagttctgcaagcggccaaaagcaatctgaactggccgcaaaactacatgcccgcgtctgcgaccgataaggaacttgagaacttaggaattcagattgcagccggcgtggcagcccaagttatcgtccagattggcggtaaggctgttaaaatgatcctgcgcaaactgaccggcgttccagccccagcagtagttgacggaaacgacccgaccccgccagaaagcgctggcgatgtgatcggcaccgtttccgacccagaccccgaaggcttattgccagaaggtggtgatgacggcggctacccggaaaacagcggcgaagatggtggcgacggcgaagatggtggcgacggcgacggtggtgatgacggcggctttgaccccgatatccccgatatccccgatgtcttcgaaaagaaagactaa

SEQ ID NO: 312080 - DNA, 462 bp, Proteus mirabilis; identical to SEQ ID NO: 298454

SEQ ID NO: 312081 - DNA, 384 bp, Proteus mirabilis
atgcctgaactcatgctcacgttgccatttccacctagtgttaactcatattggagaaacattaagggtagaacgctgatcagtgaaaaagggcgtaagtttcgaattaacaccattgcttctgtatatgagcagttaaaacgaaaacccaaagctattaaagaaaatgtctctgtcctggttcgtttatacccaccaacaaaacagcgcagggacattgataactttttaaaggccccatttgatgcattaacacatgcgggtatttgggaagatgatcagcaggtaaagcatatggatgtgatgttaatggaagtcgtaaagggtggaaagttagaaatcactatccgctcatttaataacgtgatgtacggtcacgagtaa

SEQ ID NO: 312082 - DNA, 348 bp, Proteus mirabilis; identical to SEQ ID NO: 307469

SEQ ID NO: 312083 - DNA, 528 bp, Proteus mirabilis
  misc_feature (410)..(419): n is a, c, g, or t
atgaatacaatacaatgtggtgaaaacactaaacaagattgcgttattcaaaaactctcttatttttatccgcaatatcaaatattagaaaataaccaaaaagctttatacataatcagaaataatgcgctggtattacaaaactgcacaaatacaataactattaacaaagatcagattattttcttacaacaaggaaattataccataaaaacgctaggcaatgagccttgtgaaacaatttatattcctctttctgatgatttcttaagaaatttcatgtcaaaaaatagtgatattctcagtaatatcgatagagaggaaaatttctcatcggcttttatctgttttgaagattcacctctgatccatttttgtagtaatggttttgattatctttcttcacaaannnnnnnnnntcacaaaattgtccagatacttttactcaattacgtattgaagaaatgctcattctattactttcttccgagcaaggtgccaatcttatggcgttactacgccaattaa

SEQ ID NO: 312084 - DNA, 546 bp, Proteus mirabilis
atgtggatcagtgcttcttttcatttaaaagtaatccgcacctttgatgctttagtgacacaacagcaccaagagaaactcagtgataaggtccaagctggcgtgatactactggaatcgatgtctaaaagtttaaatttttcgaattcatcaaaattaggggcttatcaaaagttacaagccatggcaggattacctgaattagcccctgtgtatgcgattgatgcaccaagtggatctatggatggctccagtcgtccaacagttgcattatcaacactgatcaacaaacacaacctacctatttcagcacagcaagcctataagcgattagccgaactaggcattgttgaacgtctatcacgcccaagcacgaaaactgctagcaaaacgaaagagttttggtctgttacggctagaggttgtcagtttgggaagaacatgaccagtcctagtaatcctcgcgaaacccaaccgcatttctttgagagtaaaacggatgagttgattcgcatggtgatgctgaataaacaggtgagtgcatga

SEQ ID NO: 312085 - DNA, 315 bp, Proteus mirabilis
atgctttctttatcaacgcaagctattgcaacgaatcatgatttaggaagtaaaacaataaccttaactgccaaggtacttaaacgtattccatcttgtacaattagtgagatagaaccaattgagttaggtgatatttacgatgatatgattggaacacttcgtccaacggcgattagtataagattttctgactgttctaatctaggattagctagaactgtcaaccttgttcttaaaccacaaaaccaaccttatttagaaaataccattaaaaatggaacccaatgctgtagtaaaaataacggattttga

SEQ ID NO: 312086 - DNA, 1551 bp, Proteus mirabilis
atgaaaaatctcaacagaattgatcggcataggatttctaatgccagtcactcttcttttcaagcgtcaactcaaagtgatcgtgcaagattgatttattcaggagcatttcgtcgattgcaacaaaaagctcaagtattttcattggaaagtaattctgctgtgcgttcaagactcacacattcggtcgaagtttctcatattggtcgatacatcattgcaagagtgagcgaaaagattgatggatcgatgcttgatgaggaaacaaaagactattggaaaaaaaatagcttagcattatctactattgtagaaacggcttgcttaatgcatgacattggtaatccaccatttggccattttggcgaagctgctatcgcccaatgggcagaatccgagaatgctatggagtgcctaaagttagcattaaatgggaattatgtaacagattggcctttagaagactttaagaactttgatggtaatcctcaaggattccgtattattacaaaacttcaaggtgaagatggatattatgggctaaaccttacttatactcaattggttgcgtttctaaagtatacatatagtccaaaaacaaaacctaaaggtacagaaaataatattattccttttagcaagaaaataggcttttttgatacagagttagatattattgaggctgcttgggataagcttgagatgaggaggcatagcaggcatcctctaggattcttgatggaagcttctgatgatatttcttactgtattagcgatattgaagatggcatcgaaaaaaacattatccaagaagaacacttcaaagagaaaatacttagtggtttagcgaaagttaaatctaaattcgaaaatcctaaaatatgcgagactttggaaaaaagcttgagttccgatgacaccgaagccataggttcatttctgagctttaagacggccttatccaattatcttgtagatagtgtcgctcaaatttttgtcgataattatgatgatttcgtaaaacttgaagttcagaaagaaattatttcaaaagatacactggaacatgctttattggacattttaaaagtttatactggcgattatctctttacatcaagtgaagccgagtgtatggagctttcgggattttctatcatttcaggtatattagaaaaataccaaagtattctatgtttgagaaaagaacaatttctatatcttatcgataataattacaaaggtattaaggataacagacttcacatccatcgtcggttatttaataggttacctaaaaaacaccttaatgcatataaatgtgcaattataggacaatcaattccagaggtgaataaggaagctaagcgtaagcaaattgatctagttgaatactttaacagtgaatttaaatccagctttatgagattggatcctactatcgagtggaatctaagaacacatcttattgttgactttgtatcagggatgaccgatcaattctcgatggaattctatcaaatgattaaggggataaatgtcaaatcataa

SEQ ID NO: 312087 - DNA, 648 bp, Proteus mirabilis
atgtcaaatcataatactacaagtatgcatggaatgaagatagatcgacaccccattgtatgggtagcacaagtattatctccttgggctaacggcaatgggagagttcatatgagccagtacaactacgttcctcagtcttttaatgattatcggtttgagttttacttacctattattaatcttaatgaaaatacattgatagatattcttatatctatggataaaggtatggaattagccatgcattctaaaattatattggatggtaatgtttatcactttcctatgattgactttggcacgaaatgcactaatccagtagcatcagagactatcaaagaactatgtcgctactggaatatggctttcaatatctatgcgagtgggagatcctttcatgcttatggtaatcgcctcctaacccaagatgaatggttgcagtttatgggaagtttgctacttttaaacaaacctagcggatataaactaattgatgaaaggtgggtggggcacaggattatggggggatactcagccttaagatggagtaaaaatacttctcattataaaaaattcccaacacattgtgggtttgtatcaggagatgactttgtcattgagaatattagcaaattccctacttaa

SEQ ID NO: 312088 - DNA, 3054 bp, Proteus mirabilis
atgcatgtagtgctttttcacaaacgtacgttagtctccatgatagtttcactctccttattttctctcaatagttattccaagactaaggataatacaaccgatcttggacaaattcaggttgcagataatttagaaaaagatcaacaaggttatgctcaagtctatgaaaaggatgtggctaatatttatttaggtaaagcccttattgaacgttatcaaggggtatcacctgcagatttatttaaaagcgcgataggtgtttatagtggtgaagcccgtaatggaggagcattggatccgaatattcgtggtattcaaggccaaggacgtatccccgttactgtggatggtactgagcaggcgattacggtttatcgtggttatagcggtgcatctaatcgtaactatattgattcaaatttgataagcagtatctatatagaaaaaggtccttcacttaatcctaatataaaaacagggattggcggaggggttgccattaaaacattagatatacgtgatattgtacccattggtgagtcttttggcattaattttaaaggggatattagtaataatgccacaggctataaagatatttatactaatatgattgaagagtaccgttattatccaaaattctatcaacaaaatgcttatattatcgatcctgcattagaaataacacctaaaaaaagtaaaatagaaaactttcaagattattcatttcgcttaggtgtaggatttgataaagaaaaatttaatttactttttgcatatgcaatacgtgaaaaaggtaattattttgcaggaaagagaaatgtagaagagtataataaagtagatgagcaattgcttaattctgtttatataatggacgggaaaagacattttgagccttatttaccttttattgctcatatttatcgacctggtaatgaagtaccaaatacatctaatcgtaaccgctcttttttagtaaaaggaactctatttccacaacaaacgcatcgtttctccattaattatcgatacaccgatttattatttggcgatattatgccatcacgattaagttgggttcgttatcaagaaaatttagttaatcaatggcctttggcaaatattacacaacaagcaggcacattaacctatcaatataaaccagaagataaaaaaacagatttattactgcgtttatggggaaatttaacgttaggacatactaatactaggggaggaaaaccaagagagcctaaaatggttgattttagagctagcagaaatacaaggtgggatccctctattgatacaggctttttagatacagcttctctatatcaagataataatcgttatggtgttgatttttcatcgttatttaaattatcgcctcagttttctatttctttttccggtcaatatcaattggaaaaattagacagtcatgagcttgaacttcccatgggttttgatttcgtgaccgaggggcgagcagggcaacgtcatgaagtcaatttagcgttagccacagattggaaaccattaccctggtttgcgatgaatattggcggtaaatatcattactatcatctgacggatacctttttaaataataaacggaagaatagggttaaaaattacgagaaaacagcccctatccgcggttatctgatctcttatcgacgagtattaaccccagaagagtatttactctatcgcgcggttaacaaaattgatgtcgatactttacctgacgagttaaaaaattaccgaaattctgctgagctgagtaaaaaaattagagactttcaacaagcggttttagtttaccctgaaggtggcgctttgctagaggaaatcaaggagcaggttgctaggccatatcttcagagaatacagcatgatatggagcatgaagattttattcgtaataaccatggaaagatgcaaataaaaaacgctaaagccatcccgatgaaaagagagtttagcctttggttatttgatgaaaatggcgtactacttaagagtaagaatattttacttaatggttttcttgatatggaggaaaaagtccctcatccagtgacgggtgagttagtttatcgctttgaaaaagatgttattaatcctcaggcattttctctatcagaagatattcaagatccctacgcactggagcctagctatcagcatggcgcattttcccctttaatctctgccaccctttatgccaacgatatggtgcgtttttatggccgttatactgagcaattgcgtttgcctaacttatttgaagataccagtggtttttcaggctctaaagctcgctattatggttttaagttaaagccagagcgtgccaaaagcagtgagtttggtgtggttgttgattttacgcattggttgaatatagagcgccacgctgatattaaaattaattactttaaaacgaacattgaaaatgtatttgatagagatgctaattggcaaattagacagttagaaaaacaaatattagaaggtgtagagttacaagcccggtttgataatggatttattttctttgataccgcattagtgtatagccataaaaataaagtctgtgatgaaaatgctttttatgagcttgatgcatcaggattatcgggtattaaaaactgtatgacagggggataccctggcggatttttgcgcacctcaatgcagcctaaatactcagttaacctacatttaggcacgcgctggctaaatgataaattagaattaggtagtcgctggctctattcatcagaagttgaaaataaagatgagaaatggcttaaagaaaatttacctaatagctattttggcataaataataatccgatgcgttgggcaaaagtatttactattgatgcttatgcaacttatcaatatagccccaatttatcttttgaaataacaggaagtaatttattaaatgaatattacattgatccgctgacccgttctggtatgccggcaccaggaagaagtttgcgattaggtgtaacagcccaattttaa

SEQ ID NO: 312089 - DNA, 2034 bp, Proteus mirabilis; identical to SEQ ID NO: 305095

SEQ ID NO: 312090 - DNA, 315 bp, Proteus mirabilis; identical to SEQ ID NO: 305099

SEQ ID NO: 312091 - DNA, 291 bp, Proteus mirabilis
atgatgaaaattaccgttgtatgtggaaatggtttaggcagtagcttaatgatggaaatgagcatcaaaagtattttaaaagatctggccgtcaatgctgatgttgatcatgtcgatttaggttcggcaaaagggacaccgagtgatatttatgtgggaactcgtgatattgcggaacaacttaatgctcaagcggtcaatggcaaaattgtttctttagataatatgattgataaagtcgcgatgaaagagaaactttcgaccgcattacgtgaattaggcgcgctataa

SEQ ID NO: 312092 - DNA, 2034 bp, Proteus mirabilis
atggatattaatggtatgtctatgctgaaaagaaatttcaaatactccacattagctacagcaatttgtctgttatacgcgccgactacttttgctcatattgaaaaagtagagacagatacattgactgttattgggcaacaagacaatcaaataacggattttcaatctgtcgtcgatacccgttcagcacaagctcaaaccgcatctaccacggggcaattgttaaaacaaatcccggggatcaccgtatcaggaacggggatcgccaatggtggcaatattatgatgcgtggttacgatcaaagaggtgtcaaaatctttgtggatggtattcatcaacctattgataatactatgaacaagcttggtggcctttttattgaaccctcgcttatttcgcgcgttaaagtcaaacatggtggctcttcggttaaacatggaagtggcgcgctaggtggcgttgtttcgttctcaactctccatccaaatgagttattagacgccaataaaaaccttggtgctaaattatttagctcattctcttctgcggataaacatttttcttatggtggtgtgatcgcaggtagacatcagttagtggaagggttattggcttatagccaaagagagcgtggcccaatacgtattgctgatgactcaatattaaataaccacgaacgtatcaaaaattattttgcaaaagcctatgtttaccctacagaggaacaaaccgttattttttctgcccgtcaatataataatgcaggagagcaaagagaagttttaaatcgaatggggggatatggaaaaagagacagtaacaatatgtatcgagccaccaaacaaaatgatatctcactcacctatcatttaaatccaaataattatgattggctcgatctgaccactcaactttattattctcagtttaaaattgcgcatacgtttctgacggatacacgcaaagaaatatatccagacatagaaagtgtgctaggtaattctgaaaaacgtacccaatatacctatggtatgaaagtagaaaacgcctttaatttaaattactttcaagataggttgactcaatctgtgattatcggcattgatgctgaaaaacagaagatggtatcgaataataaggctaaaaatttccctttatcacatatggataatgcctcaggttgggttcataacacgttaagtaccccactattccccattactttaattgcgggtcttcgttacaactattatcaaaatgtccctgataacagtaaaactttagattactacaaagacttaaataaaaaaggagacatgacctccgctgacaaatatcaagaaacatatcaaaatatttctaaaaatattgcgttacgtctcacactgaccaaatggttacagatctattcttcttattctgttgcctttagggcgccgactttaagcgaaatgtataacgactcagtacatttcactataatttccccttttaagaaaagctatgatgctcgttgggttccaaattccacattagaaccagagacgaatagaacatgggaacatggtatcaatttacaaaaaaatgcgttgctttttaccaatgaccagctaaacattaaagcttcatattacagcactgaatcaattgaccacattacttatcaacagtggtatcatagtcgtaagcctatccaattaaaaaatagtcatattgcgttatctcccattaaagatgctcgtgaacctttattatttcaatcagttaacttgcctaaagcgcttattcacggctttgatttaagattgctatattctcatccatacatcgctatgggggtaaattacaatcaaactaaaaccttggaactgtcgtctctagagactatttcaatggtgcgtcctgaaacattaaccgcttttataaatgtacccattatcaaaacaccattttctgttgcttggtcaggaaagtttgccggtccaacggccaaaaaggcacacataaataccctggttcagaggaagtga

SEQ ID NO: 312093 - DNA, 462 bp, Proteus mirabilis; identical to SEQ ID NO: 297861

SEQ ID NO: 312094 - DNA, 369 bp, Proteus mirabilis
gtgctgcttgctattatagagcctatctatcttttattacgagataaactttatgcttttgtttcttgtaccctaggtgccgaattctcagggaaaatttatcaacacctcattcggctacccagtcagttttttaatcaacgtcaatctgggcaaattattgctcgtattcaagagcttgctcatattcgccagtttattactggctctgcgttgatgatggtactggattttatttttattatcgtatttctttcagtcagtaatgtttgcttattccgtattattaacttggataaccatagcagcattagtcgtttactttttattttggctgatacttggccccatgatccgttattgggttga

SEQ ID NO: 312095 - DNA, 1041 bp, Proteus mirabilis
atgccaaattttagagatgaacaatatatttcagcgtttttatttaatatggggctttggaaaagtaagaataatataagcttgatggctggtaaagatattgttagtcagggaataaaatattatagtaacaaagaaataacttttaatgcaggacaagatatttttcttgcctccaaattaataaaagaagccgctccttttttcagtgatattcattacccccaactacaatctaaattattttcagataataaccttattttaaatgccgcgcgtgatattgatttaagttcaacagtattaaattcaaaagataaaatcattgtattagcgggtagaaatataaaactgggtgcaaatgcttattccgccatcgaagatccccacgaagatgcgcaagacattcaatataccaccacatccattatgggaaataaaggtatttctattgcatcatcaggctcactcacaacagaaggaagttcacttaaatcagagggggatattgctatttccagtggtggcaatatccaattgggatcagtaagaacacattttcgtaaagagtcggactcagagttagaagaacttcgtaaacaagtcagtactgaaattaatagcggtaatcatctaacactattatctgagggcagtattttatttcaggcctctcaattggctgctaataaaaagatggatattgctgctaaaggtggatttctttatgcacaggcaatggaagaatccagttactatgaagaagaaaagaaaaaatgtaattggtggacactgtgtgcgactaaaaagaaatataccaaaacatttaataacacaacgaataaagttaccgagtttattgctaatgacgatattaatttaattgctaaagatgatatcactttagaagcaagcaaattagagacagcaaagaatgccaaattaaccagtaaaacaggaggcattaattttaaagcggtgaaagatactgcttttaaacaagttattactcgttcaaaagatatatatcactcaacgtaa

SEQ ID NO: 312096 - DNA, 273 bp, Proteus mirabilis
atgctatttgctagccgatttaataatattaaggagataaaaaagttaggttctcatcccgcaccacaagatctatttagaaaaataacagaactcgataatattgaaagagttctttttaattcaaatagtgaagcagcacttcaatgtggtttagggcgagtagatggctgtattaccacacttagtgcagctaaaaaatatcatttaaatattttatatgattttggccctgtccctatgggattttctattcattcaaaattaaattaa

SEQ ID NO: 312097 - DNA, 438 bp, Proteus mirabilis
atggatagattgataaaaatactatcagcaattattctttttgccgctccttacttcattactatactcatgtattgtttatgtaagaaatacttcccatccctgtcattttctacacatagggaggctttaggagcagctataagctcatattctgggactttagtagcggttttaatagcagcgttaacttttttgcttggcataaaaaactataattttaccaaaatgcaaaggtatggatacatgctgcctattatcacattttatgctctaacttttgtagagcttggaattttgttttttattggacttctactaatatctaactttaaagaattgccactcccatcaatgtcaatggtcattgcagctacatcatttttgcatttatgcttgttgacatttcaattaataaatttatcgaataaaaagtaa

SEQ ID NO: 312098 - DNA, 396 bp, Proteus mirabilis
atgaatttcattggtagaacaacgctaagagttgagtctgggaatcctctcaccagagcattattgcgcttggtaggagtacagaacgccactgatgagttgttaagtggtattgagataattataaagcctcaaaaagctaaagatataaaacacttaaccaaagagattattaacaacaactatgaccagatagatgatataagcataaaagctaaaaactcagcggcggatatacttaccgaatattacttggatgggaaaggacatctaggaattaatttacccaagaaagtttcaaatgctgaaatagcaaatgagatttatactgcatttattagactaaaacctgctataatggagagctataaatacataaaagaagatcttgagtaa

SEQ ID NO: 312099 - DNA, 363 bp, Proteus mirabilis
atgaaggtgagtttctgggcttattatgcacaaaacacaaaaacacaaggcaaaagatctattgatttgtctgggataataaatgaaaaaattatagatacatcatctcatgctatgaattgtggtgattatttcacttacatgcaccctatagatataaagacatttttatttaccaagacaagtgattcagatctcataaaaaaaataaatcaaaccaacaactcaataaaggatataagagacagtctagcttcagatgagctacttggctttccatcttttctttttatagatcaaggtatattagggtatgcatcatcatttatgggccctaaaataagagaattaatgacgctttaa

SEQ ID NO: 312100 - DNA, 1101 bp, Proteus mirabilis; identical to SEQ ID NO: 305433

SEQ ID NO: 312101 - DNA, 582 bp, Proteus mirabilis
atgaaaaatgcaatagaaatcaaattattactgagaaaatggatatctactagtggttactatgacttccatagtaacgatgtaatgattgacgagttatgtttttatgaaaaaaagaacagggccgatgttgtttatgcaaatggtagactaacaggtttcgaaataaagtctgaatctgattcacttgcacgatggaacaagcaacatgatgcatacttaaaattgtttgattccgtgtggctatgttgtcaccataaacatgccgtaaaagcactagaattatcgtcaaaaaatattggtatactaatattagataactatagtaaggatttgacaattttaagagaggcaaaggagaataaaaacattgataaacatgaggttatttcattgttatggcgttctgagttagatgaattatgcttagaaaacaatctaaaaataaatagaaaagaaaaaataaatgaagccagacaaagaatattatctgagcttcaatttgataaagttaagaaaaaagttctttcatgtattaaaaatcgttataaaaataaagactattcactatcttcatcgtaa

SEQ ID NO: 312102 - DNA, 285 bp, Proteus mirabilis
atggggaaaatatcctgggaagaaatggcctatgccgataatggctctcctgatattttttggaattctttagagtttaaagaattactcaaggatggatataaaccctcagatatagattggaatcgatatgaattaaatacctataacaataaccgtttgtttcgctatgaaataggatttagcagattatcgccaataaaacttgttaatcctgaagagagaacatttcattataatccttacctttctattattgatggaaaagtgactattgtccgataa

SEQ ID NO: 312103 - DNA, 1020 bp, Proteus mirabilis
atgaatatattattaacatctattggtagacgtacatacctagttgattattttaaagatgcattaatagaatcacagggtaaagtttttgctgcaaatagtacctttacttatgccatgactcatgcagattcatacataataacacctgagatatactcaaataattatattgattttttattacaatattgcaaagaaaacaatataaatgtaattatctcattatttgatattgatttacctatattggctaaaaataagcaaaaatttttagatattggtgtaaatattattgtatcttctccaaatgtcactgatatttgtaatgataaatggaaaacatatctttttttagttgagagaaacattccaaccccaaaaacttttttatcattaccagcagtacatgaagctattgacaataatacattagagctaccattaataattaaacctcgctggggaatgggctctatcggtatttataaagcagaaacaatagatgagttaaatattttttataaaaaagttaaaaacgagattcaatcaacgtaccttaagtatgagtcagccttagatattgataaatcagtactgatacaacagtatatatctggtaatgaatatggattagaaattatcaatgatttagatggtaactatatcactacattttgtaagcaaaaagttgctatgcgttctggagaaacagatcaagctctaactattaataatctagcacttcataaaatgggtgagttactatcacaagaattaggccatatttctatattagatactgattgtttagaacaaaatggtaagttctatatattagaaatgaatgctagatttggaggacaatatccattctctcatttagcaggagcaaatattcctaagcaaataattgaatggatttctaccggaaaaacaatagatgagtatgttactatcaaagaaaacatactatgctgtaaagacattaaaccaactatcattaaaaatgaatattaa

SEQ ID NO: 312104 - DNA, 1029 bp, Proteus mirabilis
atgaatattaatcctttaaaagcccctgaacatgaagcttcaattatggagcattggaaatatacggataaagtatatattagctgtgtttgcattacgtataatcaagaaaattatataaaagatgctattgatggaatgctagcacagatcacagactatcgatttgaaatcgtcatacatgatgataaatcgactgactctacaagagaaattttattagggtataaacaaagatatcccaatttaattaaattagttttacaagatgaaaatcaatatcaaaaaggcaaaaaaattactccattagcagcagcagaagcaaatggtgaatatattgcactttgtgaaggtgatgattattggattgatataaataaaatacagaaacaggttaagtgcttagaagaaaataaagatattaatatatgttttacttctgcgaaatctatttatcgtaataaaattaatttagtttctcatcactcctcttcaaagaggatatattctaccgaacaagttatagagggcggtggagattttatgccaacaatgtctattatgttaagatctaaaataatggctaatttacccgaatggtattatactgctcctgtaggtgattattttttacaaatatatttatcaatgccttatggtgccatatatttaccagaccatactagtgtatataggataaattccattggttcttggagtaatcaaagaaaacatttgtgtataaaaaaaatcaaagctgaaggtgagctttatatttcaacattacaacagctaaaagatatgggggtaaccaactcattgattaataatgcaatttcaaaacaatacatgtatctcaccatattggctataaaaaataatttttctaaagatgcaaaagatttaattgacatatcttggttatattctaaacgtatatcaaagaaacaaatttttctctactatgctaaaatactctaccccatgattaatatagtaatgaaattaaggcattactatactcaataa

SEQ ID NO: 312105 - DNA, 147 bp, Proteus mirabilis
atggggtttcatctcttaggagtctgtgagtctgaactgcccctagtttattggacaggggcttttttcgttttaacccgcgcaaaaataaatcatgatagaaaacttaacacattatcggatctgtcagtctgctcattatcctga

SEQ ID NO: 312106 - DNA, 1266 bp, Proteus mirabilis
atggcactgactgacgctaaaattcgggcggctaaacccgatgtgaaatcctataaattaaccgatggtgcaggtctgcacttattggttcacactaatggttctaagtactggcgattacgctatcgccacttaggtaaagagaaaaccttagcattgggtttataccctgatgtctctttatcagaggcgcgtttaaaacgtgatgaagcaagaaaattgattgctgacggtattgacccgtgcgaacaaaaacgtgtggctaaagcagcttctgatgctaatctctcttttgaaaccatcgcaagacaatggcatgccagcaataaaaaatggtctgaatcacacagtgaaaaggttttaaagagtttggagtcgcatgtctttccttatattggattacgggatatcactaccctcaaaacccctgacctgctgatccctatccgcgcagcagaaagtaaagagatttatgagatagctgcgcgtttacagcaacgtatcgctgctgttatgcgttatgcggtacaatccggtattattggctataaccctgctattgataccgcaggggctgtaacgacggtacaacgccaacaccgtccagctcttaaccttgaccgtctaccggaactcattgcccgtatcgatgcttataaagggcaatccgtcactcgcctagctgtgatgttaaatttattagtgtttattaggtcaagcgaacttcgttatgcgcgttggtctgaaattgacttcgataaagccttatggactattcctgctcagcgaaagcctatacccggcgttaaattctcacacaggggcgctaaaatgcgcactccgcatttagttccccttagccaccaagccatcactatactgaaagaaatttgggcatggacgggtgaacatgaattgatcctaacgggcgctcataatccctttaaacccatgagtgaaaatacagtcaataaagccttacgcgtcatgggttatgataccaaaactgaaatttgtgggcatggttttagaacaatggcgtgcagttcacttattgagtccggattgtggtctaaggatgcagtagaacgtcaaatgagccaccaagaacgtaactcagtgagggctgcttatattcataaggcagaacatatagatcaacgccgattaatggtgcagtggtgggcggattatttggatgctaatcgtgaacaaacgatttcgccattcgactttgcaaagttgaataatccaatgaatcactaa

SEQ ID NO: 312107 - DNA, 306 bp, Proteus mirabilis
  misc_feature (228)..(237): n is a, c, g, or t
atgacagaatcttttgctcaactctttgaagaatccctaaaaacaatcgaaactcgtccaggtgcaatcgttcgtggcgttgttgttgctatcgataaagacgttgttctggttgatgcaggtctgaaatcagaatctgcgattcctgtagaacaattcaaaaacgcgcaaggcgaattagaaatccaagtgggtgacgaaattgacgttgctctggacgcggttgannnnnnnnnncggttgaagatggcttcggtgaaaccgttctgtctcgtgagaaagctaaacgtcacgaagcgtggctga

SEQ ID NO: 312108 - DNA, 309 bp, Proteus mirabilis; identical to SEQ ID NO: 296730

SEQ ID NO: 312109 - DNA, 198 bp, Proteus mirabilis; identical to SEQ ID NO: 244514

SEQ ID NO: 312110 - DNA, 1791 bp, Proteus mirabilis; identical to SEQ ID NO: 106123

SEQ ID NO: 312111 - DNA, 1077 bp, Proteus mirabilis; identical to SEQ ID NO: 106122

SEQ ID NO: 312112 - DNA, 1500 bp, Proteus mirabilis
atgctgttgatgaccgggagtgcaatggccgccggtttacaaagtaatgtggagatgaacgggctgctaacagacattcataatgcgtctgctcagtgggggccaaagttgcagggctatgccagaaacttgctgttcctgctcgctgggattcagtttgtttggacgttcggcaacctgatttggcaaagcgccgatgttggcgaaatgttccgcgagctgatcaagttcgtcatgacgataggctttttccttgccttgctgacgtactccacagagtggagcacggctatcgtgaacagcttccgcgaagcgggatcgcaagcctccgggtttgcgcaggagttgatgcccggtgacgtgttcaccttagctatcaaattggcacaaaaagtcctgtcgaacatttcgttgtttgacctcgaaactgcggttgtgattgcgctatccggcgtcatcattttgctgtgcttcgcgttcatcgccgcgtttatgttcgttacgcttgtcgagtcgtatgtgattatcaatgcggccgtgctgttcatcggtttcggcggctcacaatggacacgggaatttgcaatagccccgcttcgctatgccgttgcggtaggcgctaagctgttcgtcctgaccttgattgtcggcctgattatgtccgtatcggacaggtggttcgccaactacgacggcactattgggccaacattgacactattgggcctgtccttggtgtgcgcctatctgtctcggtctatcccggagctgattgcgggcatgatcaccggctcatcatttgggggaggcagtgcgatcggcggcatggcaatggcggccgctgcggcggctactggcttggcggcaggcaccatgatggcgggcggcgcaaacgcggccggtggtgctgcgggtgctttgggcggcggttctggtggtggcgctggcagtggactggccgacagcatcaatgccagcatggccggtggccagcagaaccccgcagcgtccgccatgccgtccatgaacagtgcggcgaccacaggaacggcaacgggcggtagcgcagcagctcagtcagccggttctcgcgtcggtggctcgcaggcgggcaaatcgccgtcaggtagcggcatcaacagccagagcgacactccgcgcagcagtggtctgagtgggccgcagcaggcggcgcaaacactgaaaaaagcggcctccggcgcgaacaacttggctagtgtggccgcccgcggcctcgggacgctcgccgctatctctgtgccgggtatggaaggcgcggcgagcatgggcggcggccccccaccgcaaatgcctgacagcgatgagggtgacgaaaaacgtccagctaacagcggtgtatccgcggatgttgccgaagaaacaaacgttattcgtcccgcacaagaaccgtccgccgccccggctcagccgaacggcgtggagaaatccaacaacccgaaacaggaaggtgaggcatga

SEQ ID NO: 312113 - DNA, 309 bp, Proteus mirabilis; identical to SEQ ID NO: 86308

SEQ ID NO: 312114 - DNA, 1065 bp, Proteus mirabilis
atggctggcgaaacagcaaatattagcgaaatggctgaactagtttcagaagaaatatttaaatggtttaaatgggagcttgttggcacaactaatcaaaactttagctgtattaaaaaagaagaacataaaaattcaacaggtaaccatccaactgacgttgtttttagatattttgatccttatttaaataggcatgtttattttaatactgatttaaaaagttatgcttctggcagcataaccccaacctcgatgagaaatgcattagtttctcttgctagaagcattgattgtgctgagagtagccgcgaatggcaagaaagatattgttacgatagtggaaattacgagattagaggattattattcgtttataaccatgatgataaatttgatcaacatttttatgatgttttttttgggaaaaagcataaaaagaaaaaaaatttgaaagaagatgagagtgaacgaggaataaatattgccaacttgcctattaaaaaaggtcaaaagatacatattatagaaccaagagtaatcaattacttaaaaagtgtaattaccgacattaaatcattatgctttgaaaaaaaaatacctcaagataattatcactattattatcctgatttaattctccataaagcaaatggcaatccaaacgatatgccagcaactatagaagcattaactggacctttttttattataaaacatggacctgttataagacaatctaagaatacagaagaaacaatatcagagagtgggtatgtaatatattataatggagaaggtagtaacgagttagagtttatatatatttttgatactttatcaaagttacagcttttagatggaaaatcgaatataagaataagactagtaaatcctaatagatatccagagattaaaagtgtctatgaaaaagccaaaaatagttatgctttagaatggggtttcgatgaatataaaaaaagtattattgactgtatagattttcatattatagatttttatagttataaatttagctcaattgaaataggttggagaatataa

SEQ ID NO: 312115 - DNA, 759 bp, Proteus mirabilis
atgaaaatcggattatatagtgttacagataaagctatttttgatgcattaaatcaaaataagataaccaatgaagaaatgagaggtttattttttagacgtggaatattaatatcaacacaaacaccaagaaaaactctagcgattgatttttcaaaatattatcatggctataaagacttccaaaatttatctgatattttgggtagcataggaagaagagaaaaaagtactaatagttttataaaaacaaacttaaataaagatgatatagaatcttgtattaaagatactcttaatgaattaaataaagaaggtgatacaacatcatattttattacatccaatagcttcgaaatcacaataaaatatgtaaaactagactataaattaagtgaatttagacaatcctcaactcgagaagctaatattcaagttgaaatattaaacaataacgaatatctacttaggtgccccccaaatccaaaagctgaagagtttacttctattctcgaagagaagataaaagaagaatctgaaggagatatatctactgatatcatcacgttagaaagtgtaaaatccgcatcagaaagaactagatttttcacaaaattaataaaagagatgaaggaccatgatctttatgacgtttctgacgtatatatatcccatcctattttaaataatctcaaaggagaagatagtgaatctgtctcttatacacatctgacgctgccgacgatactccttgtgtag

SEQ ID NO: 312116 - DNA, 1458 bp, Proteus mirabilis
gtgagtaataatttaaaacaaaaagcgacttctgggctcaaatggagtgcaattgagcggcttgcaacacaagtcgttcaattagcagtgatgctaattttagctcgaatgctaggcccccatgcatttggactaatcggaatgctagctgtatttattgctgtcagccaagtctttgtagatagtgggttaagttcagccctaataagaaaacttgatcgtacagaagacgattactcgacagcattctattttaatattgttatcgctttcatttgttatgcgatactatattttagtgcgccttatattgccgacttttataaacaaccagaattaacgtcattaacgcgtgtattatcattggtcgtaataattaatgcgttagctattatacaacgtactaaattgtccataagtatggactttaaaagccaagcaaaagcatcattagccgcagtaatcataagtagcttagtcgcattttcaatggcatattttggttttggagtatggtcactagtaggccaaacattaagttatgctgcttttaatgctcttttcctgaatatattacatcgttggctgccaatattaagttttaatactgaatcgttccgccaattatttggcttcggctcaaaactgatgttatcagggttaattgacagtatttatcaaaatatttaccaaatcgtaattggtaaaaaatttaacgtattagatgttgggtattttacgcaagcaaaccagttagtcagaacacctgcaatgacaatgactgctattattcagcgtgttacttatccgatgctgagtagtatccaaaatgatgaacagcgattgaataatgcctatctactaacattacgcttatcagcagccgttattttcccgttactttttggacttgcagttgttgctgacccacttattcctgaattattagggcatgaatggcagccagctgctttattcgcaagtatattggctacaggtttactactttaccctattcatgccatcaatttaaattatttgcaggttaaaggaagatcagatttatttttaagattagaaattataaaaaaaattattactacgattattcttgtgatcaccattccttatggaattaaagctatttgtattgggatagttatccaatcttatctcgcattatttatcaatacttactataacggaaaaataggccagctatcgggttatattcagttaaaagccttatttcctatctggctaatagcactaataacatgttctgctgcattatttattactaaattaatcgccatatcaccttggttttcaatagcattaattattttgattgcttgtattctttatatattcagcatccgtttttttcaaaaagacctctatcagtatctcatattaaatattctgccaaagaagctaacgaaaaattatgaataa

SEQ ID NO: 312117 - DNA, 864 bp, Proteus mirabilis
gtgaaaggaattattttagcgggtggctctggtacaaggctatatcccattactatgggtgtttctaaacaattactgcctatctatgacaaaccaatgatttattatccgctatcagttcttatgctagcgggtattcgtgaagtactcattatcactacccctgaagaccaaagtggttttgagcgtttattaagtgatggttctcagtttggcatttcaattcaatatgccgttcagccaaaacccgaaggcttagcacaagcttttattatcggtgaagagtttattggttccgatagtgtgtgtttggtgttaggggataatatattttatgggcaagcatttacaccaaaattaaaagaagctgcatcacgtcccgaaggtgcaactgtttttggctatcaagtcaaagatcctgaacgttttggtgttgttgaatttgataaaaataaaaaagtactctctatcgaggagaaacctaaaaatcctaaatcaacttatgcagtaacaggattatatttttatgataatcacgttgttgagctcgctaaacaagttaagccttcccatcgaggtgagttagaaattacaaccctcaatgagatgtatttaaagcgtaactcattgaatgttgaaatgctaggtcgtggctttgcttggttagatactgggacctatgaaagcctacttgaagcggcacaatttgtagaaacaatagagaaaaggcaaggctacaaagtcgcctgcttagaagaaattgcatataacaatggctggatatctaagcaagatctcatgattcgagcggaattaatggctaaaaatagctatggcgaatatttattatcgctagtgaagtaa

SEQ ID NO: 312118 - DNA, 1059 bp, Proteus mirabilis
atgaaaatattagttactggtggtgcaggctttattggttctgcggttgttcgtcatattattaataataccaatgacgctattattaatgtcgacaaactaacttatgcaggaaatttagagtcgcttaactctgtttgtgaaaataatcgctatacatttattcaagcagatatttgtgatgcaaaattaattacggatatatttaagcaacatcaacccgatgccatcatgcacttagcagccgaatcacatgttgaccgttctattgatggcccaagtgagtttatccaaaccaatatcattggtacttacacattattagaagccgcgcgccaatattggaatcaactcccaacagataaaaaagccgccttccgctttcaccatatatccactgatgaagtctatggcgaccttgaatcaacaacagatcttttcactgaaataacaccatatgcgccaagtagcccttactctgcgtcaaaagcgtctagtgatcatttagtgagagcgtggcaacgtacctatggtttaccaaccatcgtaacaaactgctctaataactatggtccattccactaccctgaaaaactgatccctttaatcatcttaaatgcattagaaggaaaagctctgcctgtttacggtaacggacaacagatcagagattggttatatgtagaagaccatgcacgagtactctataaagtcgttactgaaggtaagattggtgaaacctacaatattggcggtcacaatgaaaaagccaacattgatgtggtaaaaacaatttgtagcatccttgaagaactcgtaccaaacaaaccgaataatattgagaattatagtgacctgattacttatgtgactgataggccaggccacgacttacgttatgccattgatgctacaaaaattaaaaatgaactgaactgggcaccggacgaaacatttgaaacgggtctacgtaaaacggttgaatggtatttaaagaactcagaatggtgtgaatcagttcaaaataataactataatagagaaagactaggagcttaa

SEQ ID NO: 312119 - DNA, 240 bp, Proteus mirabilis
atgacgattcaaacacccccaaccaccagcctgctgaatgaccagttcgttgatatgaaatttatcactcatctgacaggattaacggataagtggttttataaactcattcaagacggtgagtttccgaaaccaattaaactgggacgcagctcaagatggctgaaaagtgaagttgaacagtggttacaagcgcgcattgatgaatcgagagagggcaactccgcccttggatcctaa

SEQ ID NO: 312120 - DNA, 444 bp, Proteus mirabilis
gtggtgtcagtcgtccttcagacaataacggactgctgtatttttttattgcgcctcatcgataacattcggttcagtgaggtccgtcaaccgcagcaatggagtgcgtaccaacgattcaataccctgattattcagcgcgtaatgaaaatagctgtggtcttcggtgacctgagaagcaggtatgctgtaaatcccctatctgcacttcgggcagcactttctgactggtcgctgctggctggtgtaaaaccgtcgacaccagacgcaataccattccgtgatgggctttatgggatgaagctcggagaactgttcagcttgttgagattgtcgcgtcagataactgatagccgcgtttacctcaggataatcgaggtatttcttatcaacggggtgtgcaaagaaaaaatgccgtttacggcggtccagatacaccggtaa

SEQ ID NO: 312121 - DNA, 393 bp, Proteus mirabilis
atgttaagtctctcagaatatcccggagtaataggttatgcctgggtattggaagaaagccctggtggtaaattacatgctcatgcagccatctacgtcaatggccagcggcattgtaagaaatggggctttcaggatgtaacagaacgcctgtggagagccgtgactgacggagaaggggatatctaccactgtcctgataaaagcgattatcgatacgctatacgccgtccggtacactttgatgattatgctggttgtaaggcaatgcgttacgtggtgaactatttagccaaagccgagcagaaaccctttgacccgatttaccatatctcccgtctacctgatgtgaatgataagccgataggtcgtcctcgttcccgtcatcgttaa

SEQ ID NO: 312122 - DNA, 363 bp, Proteus mirabilis
atgttggttgctgtatttggtgctcgtcagtttgcgcttaccgctcctgtttgtgagcatattgatgatcaacaaattatggatagagaattagccctcgatattgccaatggtttagtgggcaaaaccgctattcatcccaagcagatagacaaaatagaacaggcattaatggtatctcagtctgatcattccgatgcgttgcgcatcttaaattcaacacaagccgtatttaaatctcatggtgccatgtgtgaaccggcaacacatcgccgttgggcattgagtattttaactagagcaaaactgtatggcattattcccaattcaaaaaatagtgttcaacgatttaatacaccataa

SEQ ID NO: 312123 - DNA, 231 bp, Proteus mirabilis
atggaattaaccggcactaaagcgcaggaaagcggttatgtggtgacttcgctaactagccaacaacaaaatactatttgtgaacctaattccagtgatgcgttaagttatgtcggtagtaataaattagttaatgctatatgcctaaagtttttaatcaaacgttatattttaatctttgtgcaaatagtaatattcccgcagatagatactcgggcagtgtcgatgtag

SEQ ID NO: 312124 - DNA, 240 bp, Proteus mirabilis
atgaaaataaaatctataaaagttaagaatttagttattagcaaatacacctcagctaatattgaattaacatcatccaaagatgcacatttagacttaaataattactttaatgaacctaagtatatcattgacaaaataaaactcattactaatgatactacatatgaaataactactaatggatccgttattactacagaggaagacatagaaaagatatactcgttattatcctga

SEQ ID NO: 312125 - DNA, 336 bp, Proteus mirabilis; identical to SEQ ID NO: 298404

SEQ ID NO: 312126 - DNA, 138 bp, Proteus mirabilis
atggttaaaccaacaatgtcattacgctctcaacatgttaagaatttagcaaaaaagataaaaaaaatgcgtgccatagaaaaggcgattaatttttataaaatagctaagcacttggttttttatatcaaaaaatag

SEQ ID NO: 312127 - DNA, 261 bp, Proteus mirabilis; identical to SEQ ID NO: 296448

SEQ ID NO: 312128 - DNA, 306 bp, Proteus mirabilis; identical to SEQ ID NO: 299081

SEQ ID NO: 312129 - DNA, 687 bp, Proteus mirabilis; identical to SEQ ID NO: 298352

SEQ ID NO: 312130 - DNA, 363 bp, Proteus mirabilis; identical to SEQ ID NO: 312122

SEQ ID NO: 312131 - DNA, 654 bp, Proteus mirabilis
atgccaagtaaccttaaacttaactttttgactagacctcttcgcatcaccgtcctcaatgaccaaagtgattttcaagttcgattcgatttatttgagagattgaatactggaggtattatacttcatgatcaagaaattcgtaattgtgtttttcgtggacgattttccgagttcgttaaagaatgtgtaaacaatatcgattttaattcagtaattaaacgaagtgacaaaaatggtagaggtaacttagaagaattggtattgaaatttttcgcatattatgaagaaagagagttattcaaacactctgttaaagaatttctaaatgactatatggagaagaaaacaaaatcatttacaaatgagagtacgctacgggatatatttcaacaaacatttgtaacccttaacaatgctcttcctaatgggatcgtacgtgcaaatcgattaaattcaacgccattagttctattcgaagctatttccattggtgtagctgatattctttcaatgcatcaacaagttgattctcaagtactagtcgagttacttgaaaacaccacacttaaggagctaacaacaggggcaacaaatagcctgccaaaacttactggaagaataaattttgtatctcagcgagcggtaatatga

SEQ ID NO: 312132 - DNA, 381 bp, Proteus mirabilis
  misc_feature (365)..(374): n is a, c, g, or t
atgaatttttcagaagtacttgcagaaatacaaaaagaaagaagatctgttggatttgatacttacgacataacgatcaaacaactagtagatatgattgctgaaaataatataaacgtttctccagactatcaacggcgttttgtgtgggacgcagtcagacaatcacaattaattgaatcaatttttcttggcattcctatcccaaacatttttatggcaactaatttagattcttcttgggaagtaattgatggactacagcgtataacaacaattcttcgttttgtttcacatgaacacgctgttattgatggtaataatttaggtgcattaaaattaaaaggtttagataaagtttcatnnnnnnnnnnctcttaa

SEQ ID NO: 312133 - DNA, 1104 bp, Proteus mirabilis
atgaataatatcactgtaacgtcaccattattaccaccattagaagaactcactccatatctagaagatatttggtcaagaaaatggttaacgaatagcgggcattatcaccaattgctagaaaaagagttatgtgactatttaggtgtaaaatatatctcattattctctaatggaacgttagctttaatcaccgcactacaagcattagatttgaaaggtgaagtgattacaacaccttatagttttgtagcaaccagccatgctattttactcaataatttaaaacctgtatttgttgatatcgacccaaatacttttaacttagatcctaaaaaaatcgaagaagcaattactgagcatacatcagccatacttccagtacatgtttatggtaatccttgtgatcatgatgcgattcaaaaaattgcagacaaacacggattaaaagtaatttatgatgctgcgcatgcgtttggtgttactaaagatggcgtatccgttcttaattggggcgacctttcaattctcagttttcatgctaccaaggcatattccactattgaaggtggtgctattatctgtcataccaaagaaatgaaagaaaaattagacagattaaaaaactttggctatgaatcagagacagaaatatcaatgttaggctcaaatgcaaaaatgaatgaagtacaagctgtatttgggttagcgacacttaaacatattgataatgcaataagcataagaaataatatcgctaaaatatatcgggaagaaattagcaagataaaaggattaacttttttatctcaacctgaaaatgttaaattcaatgattcttattttcctatttttgttgatgaaaaagaatttggcatgagcagagatgaactatactttagatttaaagaaagtaatattttatctagaagatatttttatcctttaataacagatttttctttttataaaaatcatccaaatatcgtaaaatatgatttaaaaatatcaaaacaagtatcggataatgttatttgtttgccaatacatcataatgtagatagagatgatataacaaaaatattaaacttactaatcaactaa

SEQ ID NO: 312134 - DNA, 291 bp, Proteus mirabilis
ttgaataaagcatttgaatatagtgacggaaattttattgctcgattagatgctgatgatatagcttatccagagagattatatacacaatacaagtattataaatccaattcttttgcattaattggcactggcatagatagaatcgatgagaaaggtaattatatatccacatccactttatcaaaaaacttcttaaaactaaaaaaaacattaggttataaagctgtttgttatcatcctacatggtttatgtcgagggatatttttaaaaaatatgcaaggatatag

SEQ ID NO: 312135 - DNA, 1578 bp, Proteus mirabilis
ttgcgctttttacctgttaatttatctcacatattagttgagttgacttcattaaaagagacattggcgttttatgaagcaattaagcaagccaatattgctgagatagaagatattgttcctgcggcaaaaacactattgatccaatatgtaccttggttaattacggcgaaagagttagtggcaatattgcgcaatatcgagataaaagcgatcgcgatgcgtcaaagtcacttattaacaatccccgttcattatcaaggagaagatctgcatgaggtggcagaattattggggatcactgcgacagaggtgatccgcagacacacagaacaaacttatcaagttgcttttacggggtttgcaccgggatttgcttatttaattgctgataaaactgagctttatgttcctcgacgtaaaacaccacgtacacgtatccccgcaggctctgtaggattagcgggagaatttagcggtgtttacccacagcaaagccctggtggctggcaattaattggtactacagagataaaaatgtgggatctctcacgtgaacagccggcatttttattacctggtgatactgtacagtttgttgatgtacaaaaagcgccagtgacggtttcattacctgagaaaaaacaatctattaatgctttatcctttaacaaggataaagggctatatgttatttccgcaggtctacaaaccttatttcaagatgaagggcgtttaggtgctgcatcaatgggggttagtgcatcaggagcacttgataaatgtgcgttacatgcagcgaatcgcttagtgggaaacccgccttcattagcagcattagaaataacacaaggtggattaatactaaaagcgcaacaagactgtgtcatagcgctgtcaggtgcagattgtacgatcagcttaaaacaaacgaccggagatatagcctttttctctacctatcaaactattgatatacgtagtggagatgaaatcacagtaggaatacctacagcgggggttcgtagttatctggcagtgagagggggttttgaattaagcccagtgttaggtagttatgcgtttgatactttagctcagattggccctcgagccttacaaaatggcgatattcttcatctaaacgatgataacgcatcaacgggcattattagccaagagcaaccgagtttcagtttaccaaagcaagaggatatcgttacccttgatattgtgttagggcctcgtacggattggtttacagaagatgcgataaaaacattaacctcacaattatggcaagtgacaccacaatctaaccgtatcggattacgtctattgggggataaatcgcttgaacgtcagcaacaacaagagttatcgagtgaaggaacttgcattggcgccatacaagtaccgattaatggtcaaccggtattatttcttcatgatcaccctctcactggaggataccccgtaattggggcagttgccgaataccatctgtcattggcggggcaaatccctattaacgctaaaattcgttttaacccaattactttatttcaagaatattga

SEQ ID NO: 312136 - DNA, 1251 bp, Proteus mirabilis
atggctacacaagatcctgtgaatacaacatcaccatcatttataaaaaataggcgttcatcattaattgcagcgatttttttaatggctacatctgcaattggtccaggttttattacgcaaacagctacctttacagcgacgatgggagcagcctttgcatttgggatattagcttctatcgtcattgactttgttgtgcaacaaagtatttggcgagtcattaccgtgactaacatgcgcgcttctgatattgcgaataaggcaattcccggtagtggatacttattagctgtattggttatttttggtggtttggtattcaatgtcggtaatattgctggggctggtttagggcttaatgccatggtaggactggatcctaaatggggtggggttttaagtgctttactggcgatttatatcttctcttcacgcaaagcgagtcattttattgatcgcatgatcattgttcttggcatcgtgatgattttattaacactttttgtaatgtttgcgtccaatcctcctataggtgaagcattaaaacaaacagtactgcctaatacgattaattttgccactataacaaccatcgtcggaggtacggttggtggttatatttgttatgcaggagcacatcgtctgctcgataaaggtacaacaggtattgaaaatatcgatgcggtatctagcgcggcaactaaagggatattagtggttggattaatgcgttatatcctatttttagcaattttaggtgttgtcgcaagtggagtgacactagatatttccagccatgcggctaatcctgcttctcaagcattccaacatgcagcgggcttaactggactacgaatttttggtcttattttatgggcagctgcgttgactagtgtgattggtgctgcttatacgtctatgtcgtttataaccgtgtttaaaaagggtattacagagcgtcaacgcaatattgctaccattatttttatcgctatttcattggcaatttatatggttatgggaacagctcctgctgccttattagtctttgctggtggcttcaacggattgattttacctattggtatgacgttatttatttttgttgcatggcgtcgtcaagatcttatgaatggctataaatatccaatgtggttgcaatggtcggcaattctagtctgcgctttgacttggtatatggggatcatgtctgttggcgctattttcaattacctcaatattgcttaa

SEQ ID NO: 312137 - DNA, 660 bp, Proteus mirabilis
atgcagaaaaaaacatcaccacagatcctttgccaaaaaatcgctgatattattcgccaaaaaattactatcggcgaattacctccaggagagaggctttcagaagctactttaagcgagcagcttgaaatatctcgtaatacattaagagaagtatttcgtatattaacccaagaaggcctattaacctataaacctaatcgtggtgtgtttgtttctgtaccagatatggcatcaattatggatatttatcgcgtaagaaggctgattgaatgtgatgctttacgacatgcctatccaatgcatccagccatttcccgcatgcaagataacgttaatcaagcaaaaatgtttcaacaacaaaaagattggaatagcgttggaacctgtaatatgcatttccataccgctatcgtcgagctttctgatagccctaggttatttaaacaatatcaacttattttagcagaattacgattagcctttggtttactcaatgatccccagttattacatgctccttatattgagaagaatgagcatattttaacgctattaatgaatgggaaagcgcaagaagcggcaatcgaaatggaaagttatttagaaatatccgagcgaaccgtattagccgctttttctcgccacaacatctgttaa

SEQ ID NO: 312138 - DNA, 1206 bp, Proteus mirabilis; identical to SEQ ID NO: 297647

SEQ ID NO: 312139 - DNA, 297 bp, Proteus mirabilis
atgttagcaaatattttctttgtctctcttgctgaagaagcactatttagaggggccatacagcaaagtctatctcgctatttatctccctatcttgcgctatttattaccgctattttatttgggttagtccattttgccggaggaatattactcattatcttcgcctcattggcaggtattatttatggcttagcgtggatgtggagcggtaggctttgggttgctacactctttcattttgcattgaatctcactcacctgctttttttcacttacccttttaaaatcgcgtaa

SEQ ID NO: 312140 - DNA, 246 bp, Proteus mirabilis
atgtttttacatgacggtcatctagaggcgctttttatcgatgcatcagcacgagggttagggataggaaaacagttaatatcacacgcattaactcttcatcctaatttaagcgttgatgtcaatgaacaaaatcagcaagccgtcggtttttatcagcatatgggctttcaaatatcgggacgttcggagttggataatcaaggaagagcgtacccattattgcatctaagtagagctaagtaa

SEQ ID NO: 312141 - DNA, 336 bp, Proteus mirabilis
  misc_feature (321)..(330): n is a, c, g, or t
atgaaaatattagtaacaggtgcagcaggatttattggctaccatttaagccagcgtttgatagaaatgggttatcatgttgtcgggatagataatctcaatgattattatgatgtgcgcttaaaagaagcacgattagctaaacttaatcagttggataacttccaatttgataaaattgatattacagattcagtgagtattgcgcaattatttgctgatcaccgttttgatcgagttattcacttggcggctcagcctggcgttcgttattcaattgaaaacccaatggcatatatcgatgctaatattgtaggccannnnnnnnnntattaa

SEQ ID NO: 312142 - DNA, 228 bp, Proteus mirabilis
atgctagaacattacggggtaaaggcggtatttgttgggcatacccattatgttggtcaagataaccgttatggtggcagtgagatcttcggcgatgtcccagtttataatagtggtgcgctatttaaaggagattatttagccgtagaaatccgtggtacagaattatctatcactgtttataacggcttatcaggtacacctcaattaatagaaaaatggaattaa

SEQ ID NO: 312143 - DNA, 180 bp, Proteus mirabilis
  misc_feature (165)..(174): n is a, c, g, or t
atgtctttgaaacgtaaaattgcgctggggaaaaatgtattagaagctgctcaagagagagtccagtggatatttgatacttttgaacaaatttcactctctttttctggaggaaaagattctaccgttctttttcatcttattgctacagaagcacgaaagcgnnnnnnnnnngtttaa

SEQ ID NO: 312144 - DNA, 1224 bp, Proteus mirabilis; identical to SEQ ID NO: 297672

SEQ ID NO: 312145 - DNA, 471 bp, Proteus mirabilis; identical to SEQ ID NO: 297673

SEQ ID NO: 312146 - DNA, 186 bp, Proteus mirabilis
atgcatttaaatccgttaaaaatatcaataagtccttcgtcactcccctgcactcaacctttaacctgcattgaatatgaggacttaaaggatgggatgttagatatgattaatcgcaacagtggcaataaaagggcaatcctgctgattgtgctaaatttaatactaatggttgttgagcaataa

SEQ ID NO: 312147 - DNA, 330 bp, Proteus mirabilis
  misc_feature (18)..(27): n is a, c, g, or t
atgctgtttcttaatgtnnnnnnnnnnatattaaacttccatgatggaaaccaacacttcccagaaaaatcatctcaagaagagctgaccttctttaaatatatgctagaacattacggggtaaaggcggtatttgttgggcatacccattatgttggtcaagataaccgttatggtggcagtgagatcttcggcgatgtcccagtttataatagtggtgcgctatttaaaggagattatttagccgtagaaatccgtggtacagaattatctatcactgtttataacggcttatcaggtacacctcaattaatagaaaaatggaattaa

SEQ ID NO: 312148 - DNA, 663 bp, Proteus mirabilis; identical to SEQ ID NO: 190890

SEQ ID NO: 312149 - DNA, 741 bp, Proteus mirabilis; identical to SEQ ID NO: 190889

SEQ ID NO: 312150 - DNA, 204 bp, Proteus mirabilis
atggaaccataccgtattgcttggtttattgatacatctgataatttaaaagtcagtggtttattgccaaatttaattctgcttattaatactggatcatttttagatgtatctcctgtaaatgtcacgcctaacgcaactaccttatccattttcacgttaccgggtataagaataatgctgatactaaaatccatcttttga

SEQ ID NO: 312151 - DNA, 147 bp, Proteus mirabilis
atgaaatatgttactttaagtttagacttaatgaaattatcgaaatggaaaagaatatatatagaaaagaaaaagcgggtaaaacgttttattttagtttttggagttggtatagaactatcccctattttcttcttgcatatataa

SEQ ID NO: 312152 - DNA, 291 bp, Proteus mirabilis
gtggttattcgagttcgtcttattcatcaagttcatcaagttcatccagctcttctagttcttctagcggtggcggcggtggttcgagtggtggtgggggtgcttcagggagttggtagaggaatatgtcgctatttttatcttatgatgcaatcaccagagcgtaatctgcatgttgtgaaaaggctattagggcatgccagtattacatcgatattagaatacattgatgaaagtgttgataacttgcgagatatacttgaagcggaattgatggggcgagaatattag

SEQ ID NO: 312153 - DNA, 747 bp, Proteus mirabilis
atgaatataccaaactctacttttcctattgtggcggttattcccgctgccggcataggtagtcgaatgcaagcaacctgcccgaagcaataccttaaaattggcagattgactatccttgaacatactattaatgcgctattaaaacatccacgcatttcgcaaattattgtcgcaattaacccagaagatgactatttttatcacctagcccttgctaaagataaacgaattattgtcgttaaaggagggggacaacgtgctgattcggtattatcagggcttcgctatattacagaacatcttgcgcaaaatacatgggcgctagttcatgatgcagcaagaccctgcctgtcctttagtgatttggataatcttattcaactcattgatgataaccatcttgatcctcaattttgtggtgggatcttagcctctcctgtgcgtgatacgatgaaacgtagtcatcaacaagataaccatattgaaaaaacagtggcaagagacacgctatggcatgctttaacgccacaatttttcccagcggccttgttaaaacaaaatcttgaaaacgcattggcacaaaacgtacccattactgatgaagcatctgcgatggaatttggtggatatgaacccttattagttaaaggccgtgcggataatataaaagtcacacaaccagaagacttggctcttgcagaatttttcctctctcgacaaattaccagcataaggaacacataa

SEQ ID NO: 312154 - DNA, 1815 bp, Proteus mirabilis
atgagcaatcaacccccattattatcaatgcttccattaacacaggagcaattgaataaattacaggatgtgacgaaagacttaactccagcccaatttgcttggctttctggctatttttgggggcaattaaatcagcattcatccactaaagatgagctggtaagtgtacaaagtcaggttccccaacaagaaaccatcaccgtgatatcagcatcacaaactggcaatgcacgtcgtttagctgaacaattacgcgataaattggttggtaatcaacttaatgttgagctctatagtgcgagtgaatataaatttaagcagatccacaaaacgacaaccttaattattattacctcaacacagggggaaggtgaacctcctgaagaagccattgcattttataaatatttgcactctaaaaaagccgcgccaatgaaacaaacggcttatgctgtactgagtctcggcgatagtagctatgaacatttttgccaagcaggtaaagattttgatcatcaactggcgcaacttggcgcgaccagtctattagaaagattagatgcagatgttgattatcaagctgacgctgataaatggataactcagctgactgatattttaaaaatacgtgtacctgagcaaaacactcaagtattgcaacaaacacaatcaggaacaaccgacagtgtcgataccgcacgctaccatcgtgatgcaccttttagtgccactttattaactaatcagaagatcaccggtcgacattcagataaagatattcgtcatattgaaatcagtctagcaggctctgaattacaatatcttcccggagatgcgctagggatatggtttaagaattcggaagaaaaagtggatgagcttattaccctattatggttaacgggggatgagcaggtaaatgttaaatcacaaacattaacgttaaaagaagcattattgcaccatgttgaattaactcaaaatagtgcaccaattattaaagcatatgcccaattatcccgtcacgaagagttattatcgctggtggctgataaaagcaaacttcagcaatatgcgcaaacctacccaattaatgagatggtacgtcaatatagtgcgcaacctaatgctcaagagtttattgatatattgcgcccattaactccacgtctttactccatcgcttcatcacaacaagaagttgatgatgaagttcatcttaccttaggtgttgttcgttataacgtcgatcagcgtgcttatacaggaggtgcctcagggttcttagctgatcaacttcaagaaggcgatacagtaaacgtttttattgaacgtaatgatcattttcgtttacctgaagataatcaagtccctgtgattatgattggcccggggacggggattgcgccttttagagggtttatgcaacaacgtgaaagtgaaggtgcgacggggaaaaactggctcttttttggcaatcctcactttgtagaagatttcctttatcaagtggaatggcaacgttatgtcaaaagcgggttgttaacacgtattgatttagcatggtcgcgtgatcaagccgataaaatttatgtgcaagataaattacgggagcaaggtcaggaaatttggcaatggttacagcaaggtgcttatctctacgtttgtggtgatgcatcaagaatggctaaagatgttgaacaaacattgttagaaatagtaatgacccatggcaataaaaatattgaacaagcagatgattatttaagtgagctacgtttagcacgtcgttatcagagggatgtttattaa

SEQ ID NO: 312155 - DNA, 1182 bp, Proteus mirabilis
atgacgcaaagtaataagtgttttaatactcaagcaatacattatggctactctccgttagattatcagggggcattggtgcctcctgtttttcaaacgtccacttttgcatttcccacggctcaatatggtgctgattgttttgctgggaaagaaaaagggcatttttatactcgtatatctaaccctacattggatttattagaaaaacgattagctcagttagagcaaggagacgcttctgttgttttttcttccggtatgggagctatcacttcaacatgttggtcattattgcagccaggagatgaactcattgctgatatgaccgtttatggttgtacttttactttctttaatcatgggctggctaaatttggtatcactatcaaacatgttgatttaaccgatcctgaaaaattagcagaagcaattacagatagaacaaagcttatcttctttgaaacaccggctaatcctaatatgcgggttagtgatattgaaaagatcgctaatattgcgcaccaacatgatgttttagtcatggttgatagtacttactgttcaccttatttacaaaagccactaaccttaggcgctgatattgtcgtacattctatgactaaatatttatcaggtcatggtgatgtgatggcgggcgcaattatcactaattatcaattagcagataaaattcgcgttgagggcttaaaagatatgacgggggcttgtttatcacctcatgatgcagcactcgtcttaagagggataaaaacgcttagcattagaatggaaaaaatttgccagaatgcgcagcgtattgcgcaatttcttgaaaatcatcctaaggtggcaacgatttcatatcccggattaaactcttttcctcaatatgaacttgccaaaaagcagatggcgttacctggtggcatgataagtatggagttgaatggtggaataaaagctggcagagaatttcttaatcgcttaatgctttttactcgagcggtgagtttaggtgattgtgaatcattggctcagcatcctgcgactatgactcatgcgacatacagtgcacaagagcgtcaacgccatggtattagtgatggattaattcgtttatcaatcggtcttgaagacgttgatgatttaattgctgatttaacccaagcgctagcctaa

SEQ ID NO: 312156 - DNA, 786 bp, Proteus mirabilis
atggcgaaaaaaccgacttattcagtacgttttgtagcaggtcaacctgtagaaaggattgaacctagtctacctttaggccaaatagaagagatgctaccgattgggatgccactatatacagaaggcactttaaaaattgctgtttggaatatttacaaacagcaacgggtcaattggcgtagtatgctggaaacgcttgccaccgatactcaactattacttttacaagaagcgcaaacaacacctgaattagttcgttttgcgggtaaaaaccatttaattgctgatcaagttcctgctttagcctttcaacagcaccctgcgggtgttatgaccttatcaagttctcatcctatctattgttgcccattaagagaaaaagagccttttttaaggcttgctaaatctgcattaattacggtttatccacttattactggtgagcatttaatggtgataaatgtacacgcgatcaattttagtttcggtgttgatgtttatcaaagacaattaaacagcttatcgactcatatcatcgatcataaagggcctgttattttggcgggggattttaacgcctggagtcgtccaagagttaatgtgttaaagcgttttgctagaagattaaaacttaaagaagtgatctttgaaaaggatttacgcactcgcgcttttggtaagccacttgattatatattttatcgtggattatcactaaataaagcggaaatcttaatcacagatgcatctgatcataatcctttggtggcgacattttcttaa

SEQ ID NO: 312157 - DNA, 438 bp, Proteus mirabilis; identical to SEQ ID NO: 309057

SEQ ID NO: 312158 - DNA, 927 bp, Proteus mirabilis
  misc_feature (882)..(891): n is a, c, g, or t
atgaaatcaaaaaactttaaactttcaccctccgggcgacttgctgcgtctttagcaataatttttgtctctcttaatgcttatggcaatggcatcgtgcccgatgcaggccatcaagggccggatgtctctgctgttaatggtggtacgcaagtgattaatatagtcacgccaaataacgaagggatttctcataaccaataccaagacttcaatgttggcaagcctggggctgtatttaataacgcattagaagcgggacaatctcaacttgcgggtcatttaaacgctaacagcaatttaaatggtcaagctgcctctttaattttgaatgaagttgttagccgcaacccatcattcttattaggtcagcaagaggtctttggtatcgctgctgaatatgtgctttctaacccaaatggtatcacatgtgatggttgtggttttataaataccagccgctcttcattagttgttggtaatccgctctttgaaaatggtcagctaaaaggctatagcaccctcaacaacaccaatttactatcgcttggtaaaaatggcttaaatacaacagggttgttagacttaattgctcctcgtattgatagtagagggaaaatcactgccgctgaaatttcagcctttactggacaaaacaccttctcacaacattttgatattctctcttcacaaaaacccgtttcagcattagatagctatttctttggtagtatgcaatcgggtcgtatccgcattattaatacggctgaaggtagtggagttaaattagcaggtaaatttaccgcagataacgacctaagtgttaaagccgataatattcaaacagatagtcaagtccgttatgacagttacgataaagannnnnnnnnnaaattaccaaaactatcgtggcgggatcacggttaa

SEQ ID NO: 312159 - DNA, 348 bp, Proteus mirabilis; identical to SEQ ID NO: 295830

SEQ ID NO: 312160 - DNA, 3822 bp, Proteus mirabilis; identical to SEQ ID NO: 306168

SEQ ID NO: 312161 - DNA, 627 bp, Proteus mirabilis; identical to SEQ ID NO: 307473

SEQ ID NO: 312162 - DNA, 1374 bp, Proteus mirabilis
atgcttaatagtttactcattgtgcttttgctgtgtgccattagcgcctttttttcgctgtctgaaatatcactggcggcctcccgtcgaattaaactcaaacagttggttgacgaaggaaatatcaacgccgctcgtgtattaaaaatgcaagaaacccccggtatgttttttaccgtggtacaaattggtcttaacgccgttgccattttggcgggtattgtcggtgaatctgctttttctcccgcattaaaagatctcttttcccgctttttagaagcacctctcgcgcaacaattaggatcggtctgttcatttattatcgtcacatcgatgtttattctgcttgccgatttaactcctaaacgtatcggcatgatcaagccagaagtcattgcactgaaaattgttaatcctatgcgtttttgtctcgccttattccgccctttagtttggttgtttaatggcatggcagatcttatctttaaactatttaaaatcccaatggtaagaaatgaagatattacatctgatgatatctttgcgattgtcgaagccggtgcagtagcgggggtattacgtaaacaagagcacgaattaattgaaaatgtgtttgaattagaatcacgtaccgtaccatcagccatgacaccacgtgaagatgttgtctactttgatcgcgaagagacagaagaagatattaagcataaaattgccactcagccccactctaaattcttagtttgtgaaggggatatagaccatattattggttatgtagattcaaaagagctactcaaccgtgtgatcaatgggcaaagtcttaacctcaaagaaggtgtgcatatccgtaaagcccttattattccggataccttaactttatctgacatgctagaaagctttaaaacctcaggggaagattttgccattattctcaatgaatatgcgatggtgatgggcgttatcaccttaaatgacgtgatgaccactttaatgggcgatctgattggcccgggtcaagaagagcaaatcgtcagtcgtgatgagcattcatggttggttgaaggtggaacacctattgatgatgttatgcgtgcattagatattgatgatttcccggattctagcaattacgaaaccattgctgggtttatgatgttccgtttgcgtaagatccccaaacgtactgactatgtgaagtttgcaggttataaatttgaagtggtggatattgataactataaaattgatcaactgcttgtcactaaaattgatgatattccgccagtaaaaccggttttgcaagaagcaatacctgctcctcaaacaacggcagaagtgccttttgagcacgaagagcataaagcctaa

SEQ ID NO: 312163 - DNA, 207 bp, Proteus mirabilis
atgaagatcttcaatcgctataacccagaaaaaattgctctctacgttaagacgttatttcgtggacgattttatatcaaaggaatgggcgcatttgagttcgattacggtaaaattttattgccgaaaataaaagataagctgcattttaatgtgatgagtgaagttaaccagcaggtggttttactcaaagctgaaatgggctaa

SEQ ID NO: 312164 - DNA, 741 bp, Proteus mirabilis; identical to SEQ ID NO: 295823

SEQ ID NO: 312165 - DNA, 621 bp, Proteus mirabilis
atgtcaaaaccatcatttgattctattgaatcgcaggcaagttacggtattggtctgcaagtcggccaacaactgactgaatcaggtcttcaaggattagagccagcagcactacttgccggcttgactgacgcgttagaaggcaatactccttctgtacctgttgaaacgttacacaatgctttacgtactatgcatgagcgtgctgaagctgttcgtcaagagcgtcaagcggcactggcagaagcaggtaaagtattcttagcagaaaatgtaaaaaaagaaggcgtgcaggttactgaatctggtttacagtacaaagtactgaaagctggagatggcgctattccagctcgtactgatcatgttcgtgtgcattatactggtcgtttaatcgatggtacggtatttgatagctcagtacagcgtggtcagccagcagaattccctgttaatggggtgattgcaggatggattgaagcattaactttgatgccagtaggttctaaatgggaattatatattccttaccaattagcttatggtgaacgtggtgcgggggcggctattcctccttttgcaacattagttttcgaagtagaactattagaaattttataa

SEQ ID NO: 312166 - DNA, 243 bp, Proteus mirabilis
atggcaccttcaggattaattgccattttagcgggttggtttactacagaagtaggtcgacaaccttgggttgtgtatgggatacaacgaacacgagatgcggtatctgctcatggtgaaatgcatatgagcattagcctactgattttctttatcgtttatggatctgtattcggaattggatatgcctatatgttaaaacttatccgcaaaggtgcgccggaggttcaagatgggaattga

SEQ ID NO: 312167 - DNA, 303 bp, Proteus mirabilis
  misc_feature (290)..(299): n is a, c, g, or t
gtggctaaagattttcgtgatattacccttgcactggcaggtatctgccaggcaagtcgtcttgttcagcaaattgcttatcaagggaatgcagacgagaaatatgttgaagtcatggttaacagcatttttaatatcaacccaacttcaaccttggatgtttatggtaatcaaataagtcatttgaaattaggttttcaaaccataaaagctatccatcaagcggtaagaagagaaaaactcacgtttgagttgatgacttatcaacaaggcctgattaaccttgaacnnnnnnnnnnttga

SEQ ID NO: 312168 - DNA, 948 bp, Proteus mirabilis
atgcataaaaaacaacgttcgcccttctctttacgaacaagatttttacttgccaccagcgccattattttagcactgacactctcttatggtttggttgccatagtcggttctattgtcagttttgataaaacgacttttatgctaatgcgtagccaaagtaatctctactatagcttagcgcaatggaaagatgggcaattgcagattgaatttccgactaacctcaataacaacaacacatcgctggtggttattttcgacgagaaaggcaatgtgctatggacgccaacggatttacctcaggtgatcccaaacagtatcgcgccaaaatggcgcaataaagaaggcttatttgaaattagtgtgaatgttaaaacgacacgttttatgttacagcaactgcctcaatatcgagcctatctaaaaaaactcaacgaatattcaagtaatgataccttaacgcattccgtggttattaatcactatcctgcggcggataatatgccttatctatccattgcggttatcgatcctattcctcaaagtctgcaaaatgtaagtagagtctgggattggtttctctatatattactagctaattttcttttggtgatcccattaatttggttagcagcccattggagtttaaggccgattaaatccattattgagcagatcagcgcgttggaaaaaggcactcgcgataatttagatgaaaatcctcctaaagagctcaaaggattagtttataatctcaacattttattgcgtaatgaacgcaaccgttatagtaaataccgtaccagtttatctgatctgacccatagcttaaaaaccccccttgctgttttacaatcaacattacgtgctctacgtgctggcaaacaaatgtctatagaacaagctgagccaattatgcaaagtcaaattgaacgaatttcatag

SEQ ID NO: 312169 - DNA, 960 bp, Proteus mirabilis
  misc_feature (912)..(921): n is a, c, g, or t
atggatatatttattagcgcattagcttatattgattacacgacaatacttgttgtcataggcgcttgcttatttggtttatttgttggagcaattccggggttaacatcaaccatggcaattgctttaatggtgccttttactttctttcttgatctaattcctgcattagcactgatgatctccgtaggtgcatcctcgatatttgccggcgatattccaggggcattattaaatattcccggaacacccgcctctgcagcttatactaacgatgcccatacattggttaaagaaggtaaaactaatcgtgtattagggatgtcattaacaagctccgttattggtggggtgatcggcacaattattttagcgtcaaccgctccgttgttagccgagtttgcacttaaatttagctcttacgaatatatgtggcttactttaattggattaagctgcgccactattgtttctggcgctcaaattagaaaaagtttgctagcactgtttttcggtattgctttagccactattggctacgatgaatttacaggacaagcccgttttacctttggtgaagtctctttaatgcaaggtgtcagttttattcccgccatgatagggctatttgctatctctggtgcgattaaatattacgtcgatcgctggaaagaaaagcaaattaaattagcagttaatacagataatagctcatataatatttttaaaggggtgggaaaggttgtttgccaacgtaaagggggcattttccgtagtggtattattggtacattgataggtgctttacccggtgctggtgccgatatcgctgcgtggatctcttatgcagtatctaaaaaattatcaaaaaaaccgcaaaagtatgggcaaggctcagaagaaggtattgtnnnnnnnnnngtattgttgatgcatcagcaagtaataatgctagtttag

SEQ ID NO: 312170 - DNA, 342 bp, Proteus mirabilis
  misc_feature (172)..(181): n is a, c, g, or t
atgagtatgcttctcatggcaaaagccatgcaattacaggtggggagtacagcacaaaaaatggtgctactgaaacttgctgataatgccaatgataaaggtgagtgttttccttcttatgaaactattgcacgtcattgcgaaattagccgtcaaagtgcgataaaccacnnnnnnnnnncattaaaagtttatgtaaaaaagggtttgttcgtaaagttacgcgaaaaactgataaggtgcatacttccaatttatatattctggatttggaggctaaatctcttgatgacggtagtcaaaatacagtaccacctagtcaaaattctgtaccagaggtag

SEQ ID NO: 312171 - DNA, 699 bp, Proteus mirabilis; identical to SEQ ID NO: 305500

SEQ ID NO: 312172 - DNA, 552 bp, Proteus mirabilis
atggataatgttatcgaaaccatgtcatcgatttctgaaagtgcaaaaaagatctcagatattaatgacatcattaacagtattgccaatcaaaccaatattctctcattgaatgccgcggttgaagcggctagagcgggtgaacaaggtcgcggatttaccgttgttgcagccgaagtgcgtaacttagctagtcgtagtgcagaggcagccaaagagatcaatgaacttattacccattcggtaaataaagtacaggttggatcacaacaagtgagcgaagcaggacgctccatgtcggaaattgtgaccaccattagtcaagttaatgattttatgcaacagattgccttagcctctaatgaacaaagtatggggattaatcaaattgctatggccgtaagtgagatggataccgtgactcaacaaaatgcggcacttgtggaagagtctgccactattactgccaatatggatgatgaagctcatcagcttgccaacttagtctgtcaatttaaagtagatgagaaagaaaatactaggcatgcataa

SEQ ID NO: 312173 - DNA, 183 bp, Proteus mirabilis
atgatgagaaaaattgaagaactgttagccaacaataaacaatggtcaagttctgttacagaagaaaacccgcaattttttaaagagctgagtaaaggccaaaaacctcatttcttatggattggttgttcagacagccgcgtccccgctgaaaaattaattaatgccgcccctggtgattga

SEQ ID NO: 312174 - DNA, 147 bp, Proteus mirabilis
atgtctgacaaaatgaaaggtcaagttaagtggttcaacgagtctaaaggctttggttttattactccagcagacggaagcaaagtagaattcacaattgaaaacggtgcaaaaggtccagcagctgctaacgtaacagctctgtaa

SEQ ID NO: 312175 - DNA, 678 bp, Proteus mirabilis
atgatgatatcagaaattaccaaaccgaaacgaggacgtccccccaaaaatcatagtcctaatacagatgtaaaaaatatagttattcaaagtggtatagaaatgtttgctgaaaaaggctatatcagttcagacatttgtaagatattagaaaaagttggtatcccgaaaggatcattttattattactttggtagtaaagaaaaatttggtttagtcgtcatccaacattatgacaactttatttctaagcaactagataactatttgtcttatactgcattacctttccccaaaagactattagcattttgtcacatgataaaatcagaaatggaaaagtatcattggcaacgaggatgcttagtaagtaatctcatacaagatattgttaatttacccattagctattataaaatactgaataatgtgatttctggatggcagaaaaaggtagaaaattatcttctagaagcacaaaaatataagtttatatctaaaaacattgattgtagacaaatggctatttttttctggatgggttggcaaggagcaataatgcaagcaaaactaacccgctctaatcagccactagatatatttatctctatttttatggcgcagatgtttgatattcctcaacatgaactagaaattactaaaaatagaataatttaa

SEQ ID NO: 312176 - DNA, 1305 bp, Proteus mirabilis
atgaagtcatcagcgagcagtaccataaaagatcgtgttgcgattgtcagtggattgcgtctcccatttgctaaacaagcaaccgcttatcgggggatccctgcggttgagctggggcgctcggttgtacaagaattagtgatccgtaatgaaattcctcctgaaattattgatcaactggtgtttggtcaagtagtacaaatgcctgccgcaccgaatattgcccgcgaaattgtacttggcgcagggctaagtgtaaaaacagatgcttatagtgtaacccgtgcttgtgcaacgagttttcaggctattgctaatgtggctgaaagtatgttggcaggtcacgtttcagtgggtattgctggtggcgcagattcatcttctgtattaccgattggcgtgagtaaaaaattagccgatgtcttactcagtttaagtaaagcgaaaacattagggcaacggcttagttatttaagtcaactacgctttggtgatctgctacccgttgcacccgcagtggctgagtattccacaggattgcgtatgggggatactgctgagcagatggctaagacttatcatatttcaagagttgcgcaagatgaattagcgcatcgctctcatcaattagcggccaaagcgtgggaaatgggaaaattaaatgacgaagttatgacggcatttttcccaccttataaatcaggttttcatcaagataataatatccgcaaaaattctgtacttgattcttacgcaaaactgaagcctgcctttgataggcgccacggtagtgtgacagcggctaatagtacgccccttacggatggtgctgctgctgtgctaatgatgaaagagtctgttgccaaaagtttaggctatcaacctttaggttatctacgtagttatgcttttaccgccattgatgtctggaaagatatgttgctggggccttcttatgcgactccgttagcactatcaagagccggccttactttgagtgatttaacactaatagatatgcatgaagctttcgctgctcaaacgttgagtaacttaaccttatttgcaagtgataaatttgctcaagagcaacttggactgtcaaaagcaataggtgaagttgatatggataaattcaatgttcttggtggctctattgcttatggacacccctttgctgcaacaggggcgagaatggtgactcaaacattacatgaactgaaacgccgaggtggtggctttggtttaacaacagcttgtgctgcgggcggattgggtgcagcgatgattttggaggtggaataa

SEQ ID NO: 312177 - DNA, 2169 bp, Proteus mirabilis
atggcgactcaacaaaggatacaaacctcatcagagaaatcaccggtattccagttttcagtgcgtcccgataaggtcggaattatcactattaatgttgtagatgaaaaggtcaatacactgaaagctgcttttgttgaacagtttcaaaatgtattaaaacaggctcagcaacattcaggtgtaaaaggattaattatcacctcaggtaaacctgataattttattgctggtgctgatatatcaatgattgcagattgcaaaaccaaagaagaggccaccgcattagcaaaagcaggacaagatctttttactcaattagaaaattatcctttgcctgtcgtcgcagccatcaatggcgcctgtttaggtggaggattagaactagcattagcctgccatgggcgaatttgctccgataacagtaaaacacgtttaggccttccggaagttcaattaggattactaccaggttcggggggaacccaaagattaccacgtttaataggggttacgaccgccttagatatgatcttaactgggcgacaaattaatgccaaacgggctttcaagcttggcttagtcgatgacgttgtgccacaagctattttattagatgttgcagcccaatggattttaacagctaaaaaagctgctaaaaaacagactattatggagcgtttttgggcaaataccacattaggaagaaatatcctctttgatcaagctaaaaagcgcactttagctaaaaccaaaggtcattacccagcggcagagcgtattcttcacgttattgaacgaggcttagagaaagatattcaaacaggttttaaagaagaagctaatgcgtttggtgaattaaccatgaccccggtttcatctgcattacggcatctcttttttgcctcaacagcattgaaaaatgaaacaggatcatctgcaaagccagataacttacaccatataggtattttaggtggggggttaatggggggcggtattgcttttgtgacagcaacaaaaggtaatttacccgttagaattaaagatattagtgataaaggtattgcgcaggcacttaactatagttggaaagcgttatcaactaaggtcaagaaaaaacggctctctgctcgtgaacgccaaagacaaatggggttattatcagggacattggattatagcggtttccatcaaactaaccttattgtcgaagctgtttttgaagatttggctttaaagcaaaaaatggtggctgatattgaagccttaggtgaaggcaagatcatctttgcttcaaatacttcttctcttcctatccataaaattgctgaaaaagcacaatatccagaaaaaataattgggctgcactattttagtcccgttgaaaaaatgcccttagttgaagtgatccctcatgaaaaaacggatgctaagacaatcgccacaaccgttgcttttgctaaaaaacaaggcaaagttgccattgtggtaggagataaacccggtttttatgtcaatcgaattctcgccccttatattagtgaagccttaacctgtttggttgaaggggaaacgatagagaatattgacaaagcattagttcaatttggctttccagtcggccccattcaacttttagatgaagtgggaattgatattggtactaaaataacgcctattttagtcaatgagtttggtgagcgttttgcatctcctcctgcggtggatgcgattattgcggatgacagaaaagggcgtaaaaacggtcgtggtttttatctctataatcagcatgccttacctttctctttaggaaaaaataaaaagcatgcagacccgatgatttatcgcttattacaggttaaacctaaaaatcagttatcggcttcagaaataaccgaacgttgtttattgcttatgcttaatgaagctgttcgttgtttagatgaaaacattattcaacaacctagggatggtgatattggtgctgttttcggtattggttttcctcccttttttggtggaccattccggtatatagatagtatgggaacaacaaaaatagtcgataagcttaatcaattaactgaaaaatacggtgaaaagttccagccatgtgagcgattagcagcaatggccaagttaaatgaacgattctatagctaa

SEQ ID NO: 312178 - DNA, 1677 bp, Proteus mirabilis; identical to SEQ ID NO: 294628

SEQ ID NO: 312179 - DNA, 252 bp, Proteus mirabilis
  misc_feature (227)..(236): n is a, c, g, or t
atgtcttttaaattgcccatcgaagccgctatttttgatatggatggtttgctaatcgactcagagccgttttgggcacaagcagaacatgaggtctttgcacaattaggtgtcgatttatcacttgctgacagcatgcccgacaccgtcggcttaagaatagatcaagttatcgaactttggtatcaagtatcaccttggcaaggcgtaacacaacaagaagctannnnnnnnnngctaaagagagaatga

SEQ ID NO: 312180 - DNA, 939 bp, Proteus mirabilis
gtgagctgtgtcagtggttgtaatgcgaatgaatattccacgcttagtggacaactatcaaagacggaaaataaagtcggtgttactaaagatgcttctgatattactttgtccaatcgaattacattaagatggaatgcggggcaagcgcaaacatgggcgacatattccaatggtaatattcctagtgcaaataccagcaataatgattggatttattctaagatagatgactatatttctgttgcgttaagaatgactaataattgtagaacaatttatgttccttataatgtacctacgctaagctctacttgtggtgcccgtacttatactgaaaacgaagaaagcgtcgtttctgtaagaaagtatcaaaccagaataaaaattgacaaggctattatttctggtacctatgtaaaaaatatttttgtaggcgaatttggtttttgccaaccacagaattgtgcgactaaacaaactatcattacaaagctatttttaaatctttcaatgacagttccacaatcttgcgttattaattcagggcaagtgttgaatattgattttgacaatattcctgcatcaagttttaaagtagcagggaaaaaagccgaaggagttaatacggtttctagaaacttaagtattcaatgtgacaatatagatgccagtgctgatttaacaatgcgattacaagcagattcagttcaaggtaatgctattgtttctaataataaaagtgttggctttgtggttgctaattcaagtggatctgaattaacacctaatgatttatcaagttttattcctttcagactcaaccaaaatgctgatgctaatgtcacgattaatgtttatcccgtaagtattgatggaaaaacaccaactgaaggcgctgtcacatcaagtggctttctaagagttgatttcccttaa

SEQ ID NO: 312181 - DNA, 126 bp, Proteus mirabilis
atgcaaaataattatgtgttacgcagtgtgcgttatatgttagatcttagcgatggtcatattgttgatataatgaaactggcggatttcacagcaagtcaatcagtggttaaaaaaagacgatga

SEQ ID NO: 312182 - DNA, 135 bp, Proteus mirabilis; identical to SEQ ID NO: 296591

SEQ ID NO: 312183 - DNA, 336 bp, Proteus mirabilis; identical to SEQ ID NO: 305878

SEQ ID NO: 312184 - DNA, 993 bp, Proteus mirabilis
gtggattttcaccacgacgatcaagaaataacaccagaaacatcacttgtattggcggaaaaacaaccattattagatctcaatgcaactttcacctctccgacacaaactaaccctgcactggcttatttacgcagtttaggctctaaacgtagtcgccaaacgatgggatcgtttttaacgatcgtggcaaaaatgattggcttctcttcaataaagcattgccaatggggagcacttcgccgccaccatattcaagcaattatcgacatgttatctgatgcggataaagcacccgccacgattaacacttatttagctgcactaaaaggtgtcgctttagaagcatgggcgatgaagttgatggatacagaaagctatcaacatattcgccaagtaaaatcggtaagaggcagtcgattacctaaaggtcgagcgcttactggacatgaaattcgcgcactttttcgctgttgtgaaaaagaccactcctcaaaaggtttaagagatgcggccatattaagtgtactacttggctgtggattacgccgttcagaaattgttgcgcttaattacgagcatattcaatttcgtgatcaagcttttattgttagaggaaaaggcaataaagaaagaatatcctatatgccagaagatacttgggagcgtgttcaattatggatcgatgaaataaggggatcacaagatggcgcccttttcacacgtattcgccgctttgatgatgtaacggatgaacgaataacagaccaagccatttattatattttagagacacgccaacaagaaagtggcattgataaatttgctcctcatgatctgcgacgcacttttgcctctgcaatgttagataatggcgaagatattgtaaccgtaaaagatgccatgggtcatgccagtattatgactacacagcgctatgatagacgtggtgatgatcgtcttagaaaagcggctcgacatttacgtttttag

SEQ ID NO: 312185 - DNA, 489 bp, Proteus mirabilis
  misc_feature (454)..(463): n is a, c, g, or t
atgaatgagagtagcagctccacaaaccagcattttattcgtaagttagaaggtattgtcggtaaaaaacatgtattaacccaagagcataaaacagagcgatatcgtaaagggtttcgttccggacagggaaaagcgctggcagtggtattccccggctctttattagaacagtggcgtatttttaaaacctgtgttgaagccgataaaattattattatgcaagcggcaaatactgggttaacagaaggttcaacccccagtggtgatgactatgatcgtgatattgttatcatcagtaccttgcgccaagataaaatacaagttctttctgaatataaccaagttattgcctttcctggcagtacattatggcacttagaaaaagtattaaagccattaggaagagagccacattcagtgataggctcttcttgtattggtgcttcggtannnnnnnnnngcttcggtaattggaggcatttgtaa

SEQ ID NO: 312186 - DNA, 1281 bp, Proteus mirabilis
gtgcgccgcggccctgcttatactgagttatcactttacgcccgtgttaatgaacaaggtgaagcagagcttatcaaccatttgggaattgatttaggtgacactccggaagagatattaaccaatctggataatcgacattatcatgcgaaacaaattcatgcgacggataaactggcatctgatcatgaatatagtgagcgagtacgtgatattgatgcagatacaccatctcgatttaataatgacgaaagacgtctctttgaagcggcgggaagcgccggtaagctctctgtttttgccgtgagattagatactttcccagcagatcatcgcacacaagttttctatattgggaccaatgatcctgatgagttagaagatatccgtcgccatattctcagtcaatttaaggtattacccgttgcgggtgagtatatgcatcgaagttactacaagatggcagaagtttatggcaaagatacctttttaattattgataagttaggtacagataagatgccagcattatttgctattaaagggcgtgttgatgctgttcttaataaagtgccatttttacctaagaatctaactgatagaacaatgcaattgatgagtaagttatggcctgctcatttacctgctcgtatgacagaatatcgcgataaatatgagcatcatttaatgctaagaatggcggatagtggtatagaagaagcctcaacttatttaaaagaatattttaaacatgccacgggggattatttcgaatgtacagaagaagaaggtaataaagcctttttacatcgttttgccgccgcgggtgctgcggtgcgttatcatgccgttcatattaacgatgtggaagatgtgctacctttggatattgcattgcgtcgtaatgatcgggattggtttgaaaaactgcctcctgaaatagaaaaccaattgctctataaattgtactgtggtcactttatgtgtcacgttatgcatcaagattatattattaaaaaaggtgttgacgctaaggcacttaaagcacagatgttagccttactagacaaacgtggtgcggaatatccagcagagcataatgtagggcatctctattatgcaaaaccgcaattaaaagcgttttataaacataacgatccgacaaatagcatgaacccaggcattggtaaaacctccaaattaaaatattggggagaagagtgtggttgcgggcataatcatcatcaagctgaagttaatcatatagaaaacaaagaataa

SEQ ID NO: 312187 - DNA, 381 bp, Proteus mirabilis
atgttatttggtgaaacggtttatgacaatcttaaatttccttatttactacgcaaaatcgccgttgatgagaagaaattagcgaaagatttagattactttaatttgcccaatgagattttaaataaaggtattaatgaactttctggtggtgaaaaacagcgtatctcacttatccgtaacctacagtttttgcctaaagtgttattgcttgatgaaattactagtgctcttgatgaagacaataaaataaaagtcaatgagcttatccatcattatgtcaaagagcaaaaaatcgctgcattatgggtaactcacgatcaaaatgaaatcaaacatgccgatgatgtgctccacttaccgagtcatatgaacaattaa

SEQ ID NO: 312188 - DNA, 261 bp, Proteus mirabilis; identical to SEQ ID NO: 299898

SEQ ID NO: 312189 - DNA, 567 bp, Proteus mirabilis
atgagcgacaccaaagaaaacaccggatggaccacccctgacgctgcaccgggcggctggaacaaggccgacaccgagcggctggccgaatacgagcagggctatcgggaacggtcagaggccaagctggcgaaacgtgaatccacggccgagcgcgtggaagtgttcgaggaacgcgacgtgaccgaccccagccgggtctatacgccgcgggagccgggcgaggttgcgcaggaacgcgaagcagacgtgcccgagctggcaggcggcggagaagccgcaggctatgacgaggtgcagacggccgaagtggtggaggaagacccggcgcgtgcggcggcaatagccgaggtcgagcaggcttttgccggggacagctacggccatgagagcgaggcccagcttaaagcggccgagatcgaggccgaggccgtccagttcaccggcatgtcgcaggccacacagaccgccgaggtggtggaggaagacccggcgcgtgcggcggccatagccgaggtcgaacgggcgttcagcaatcccggccacgaccaagagattgagcggtga

SEQ ID NO: 312190 - DNA, 3177 bp, Proteus mirabilis
atggcaatctaccattgcagcgttaaagcggtatcccgcagcaccgggcgcagcgcgccgggtgcggccgcttatcgtgctggtgaattgctgaccgacaaccgcacgggcgaggtgttcgactacaccaaaaagagcggcgttctgtccgccgatatcgtcctgccggaaggtgcgccggagtgggccaaagaccgcaaccagctatggaacgccgccgaggctgccgagcgccgtaaagatgcttgcgtggcgcgtgaatatgaggtggccttgccgcatgagctgacgcacgaacaacggcgcgagcttgcgctaactttcgccaaagagctgtcggagcgccacggcgtggcggttgatgtttgtctgcatgagccgagccgcgacggcaacgataagaactatcacgcacacattctgacgacgacgcgcgtgatgggaaaagacgggttagagggcaaggcggaaattgaaaaagccgggcgcaagcgaaccgacgatctcaaggaaacacgcgccttatggggcgcactttgcaatgatgcgctggagcgtgccgggcacgtcgagcgcgtggaccatcgcagctataaagagcaaggcgttgacctgacgccgaccaagcatatcggcgtttctgccgtggcgatggaccgcaaggggatggacgccgaacggctggaaattcacgccgagacacgcgccgaaaacgccgagaaaatcgaggcaaatccgtcgctcatcctcgataaaatcaccaccacgcaggccgttttcgaccgcagggatatggcgcgcgagcttaaccggtacatagacgatccccagcagttccagaacatcatggcccgtctggagagcgcgccggagcttgtacagcttgcaccagaaatgacagacggccgtcgcacggtcccggccaagttcacgacacgcgaaatggtcatgacggaacgggcgatgattgacagcgccgagcgtctggccggggcggaatcgcacggtgttgcggcgggcacggtagcccgcaccgttgaccgctacgataccctttcggacgagcaacgcaccgctgtcgagcacgttaccggagagggccgcctgtccgtcattatcggggatgcaggcaccggcaaatccttcgcaatgcgcgtggcgaaagaggcatgggaggccgaaggattccgcgtccgtggatgcgcgctggccggtaaggcggccgatgaattgcaggccgggagcggcatcgacagccgcacgattcacagccttgaagcatcgtggaatcggggcgttgacatgctgaccgcgcgtgacgttctggtaatagacgaggcgggcatggttggcagtcggcagctcggccgggtgctcgaagcggccgagaaggcaggcgcaaaagtcgtcatgctgggcgatgacaagcagcttgccgccatcgaggccggggccggtttccgggccattaccgagcgtgtcggcgcggccgaaatcacgcaaattcgccgccagacggaaagctgggcgcgggaggccagcacagagctggcacgcggtgacgttcgcaccggtctggacgcctatcatgagcgcggccatgtgcggatcgaggacacccgagaggaagcccgcacagcccttgcggccgactggctggccgaccgggagaaaggcgggaccagcatcattctggcccacacgaacaaggacgtggcgagccttaacgataccgtgcgaacggcgctgaaagcgtccggcgagctgggcgctgaaaccgagttcctgaccgaacgcggggcgcgcagctttgccgagggcgatcgccttgtgttcctcaagaacgacagcgcactaggcgtgaaaaacggcacccttggcaccgtcgaaaaggccgaggacggccgcttgtcggttcgtctggacagtggccgggaggtggactttgacgcaggcacctacggccacgttgaccacggttatgccgttaccatccacaaatcacaaggcgttaccgtagaccgtgcctatgtgctggcgacgggcggcatggaccgcaatctggcctatgtcggcatgacgcggcaccgcgacagcgcgaccctgtacgccggggccgaagacttcaccgatcgccgttccgggcgactggtggcccacggcgccgccccttatgagaacgacccggcgaacagccagagctatttcgtgacgctggaatcggacagcggcaagcagcgcaccgtctggggcgtggatctggcgcgggccgttgccgaatctggcgcacagttgggcgaccggattggccttgagcacaccggcagcgaagccgtgcagctcccggacggagggattgccgagcgcaatcactggcaggtcaacggcagcgccgagctggcctatacgaagctggccgaacggctgggccgtcagcagccgaaggcgagcacgctggactttgccgaaagcgcctatggctttgccgagcagcgcgatttcgacggtgcgggcgttgtgcgccagtgggtcgagcgcggccgcgagaagctggccgggcttgccgaccgggccgaaaaagccctttcccgcgtactggaacgcgccggaatccgccgcgacgtgcccggtatggaacaggccaccccggaagccattgcggccctgcgtgagccgcaggcgcggccagagctgacgccggaggacgccgcgcgcgcagcggccatagccgaggtcgagcgggctttcggtggcggccagcccgtgcgccaggtcgatcctctggacgtgtaccgcaagggcgtggagcaggcgcggcaggcaggtgacgggctggatattcagattgcagaacgccgcttgcagcttgccgaagacgcacaggcggccgggcataacccggcccacatggccgcgaaaatcaacgcgcaggcgcaggccgacgtgattgccggtttgcagggccagcagccgcaggcgcggccagaaccaacgccggaggacgccgcccgtgcggcggcccgtgccgaggtcgaacgggctttgggcggcggcaaggtcgaacggccagcgccgcagcagcaggaaccgggcatgtcggagcgggataaagcccgcgccgaggttgagaaggcaatgggccacggtcgcaaacgtgatcgtggaattgagctgtaa

SEQ ID NO: 312191 - DNA, 252 bp, Proteus mirabilis
atggctaagcccaccctcaaagaacgccgtgccaaggcactggcagaagtcgaagcggcaaaaagcaagctggctcaacttgaaaccgctgcggctgaacgcatcggccgtttagccctcaaggccgggttggttgatttggacctgagcgacgagcagcttagtgcggagttcgacgctatcgcgtctaagtttcgcaaccgcccggcggtcgccagtagcacgaacccgacaacaactagtgagggctga

SEQ ID NO: 312192 - DNA, 222 bp, Proteus mirabilis
atggccctttccagaacacgcgagcagctacgtaaggaggacacaaggcacaaaattgagctgggcggattggtcgtcaaagccgggttaggcgatgaagaccgggccgtcatattgggcgcgttgacggaagcaatgaacgccctgcaaggcccgaacggtcccgccgaaaggaggcgattacaggagatcggaagccgggtatttacaacgggagaataa

SEQ ID NO: 312193 - DNA, 2661 bp, Proteus mirabilis
atgaaatgctacattctggcgcttgctctggcccttccttgggccaccgcgaacgcgcaaggtatggcaccagaaacatgccaagatacctttgttgattccatccgtcaggcggccgctgcgcgcgacgctgatactctccacaagctgtacgatcagaccgacatccgcgagtacgcgaaagccagcgatgagcggctggatgcgcggtttatcaatgagccgacatgcgccaacatccagcacactgtgcaggaaattaagacgctctggaagtcgctggatgaggtcgagagtgccgagagaacagaacagcagcagcggcaggccgagaaccttttgaacggcgcgcaggcgcaaattttgagccgcaaccgtgcgcaggttcttgctggaatggaaacggtgaaaacctaccttttggacaccgagcgcgcctttgttggcaaggggcttgccgcctgctctacggcgggcggaagcgtccagaatgtgcagcaagcatgtgacccggttccgcatttcaagcggaccattgaccgcgaatttaatcgcctcaactggcccgtcccggcgtccccaagcgccgcttatgcatggttgatagaccagtataaaaacggtccgcaaagcatccagaagcccattgaaaatttcctgcaactgaacgtgaccgacctgcgcgcggaagactttggcggacgtgttgcgcaattgcagggcaaggaacgggcggtgcagtctcaacaggcccgaaccgtagcccgtgagacgcgcaaggaacacgacgcgacggtgatcggcaacatcacgtcgatgggcgaccggctcaaggaatcgctgtggaacattctcggcggtcttctgctcgttttcctgttcccggtggtctttgctattccgattgtcggcccgctgatccgtgtgttcatgcccgccgaaaaagcggcccgtggcctgtttctgctgtgggtgacaacgctgccgttttacgcggcctatgtcgtgctcggcggcttcatcgcgccactggcggcgatggtgccgggttggttccgcctgcccctgcttctgctgcttttcgtcccggcctgcgttctggtgcagcggtcccggtggtatgcggcgttgtatgcccgtttaccggctcgcctgcgcggcattgcggccgctccaaggggcacacaggccgccgcgcctgctccctcgaatggcctgcatgggtccgcacactggacgacaacggaacaggcaattcagaagggccattatcagcctgtcgggcacgttctggctgacagccacggctttgctttgggtcgcccgctcgatgccgataacaaggccatgcagggctacgatgcccggttccgctacatgggccatgtgctgaccattgcccccaatggctccggtaagggtatcggctcggtcatcccgaacctgctggactatcccggctcgacggtggtgctcgacgtgaagggcgagaactacgccgcaacggcccgattccgccgcgaacagctcggccatgacgtctatctggtggacccgttcggcgtcaccgggcagccgtcgcaccggttcaactggattgaccgcctcgacccggacagcccggccgtggtggaggaagccggggcactggctgacctaatgattgtctcggaaggccacgcttccgatgcgtcggcgcacttcaacgaaacggccaaaatcttcctgcgcggcctgctggttcacgtcgctacgctggccccggccagccgcaacatgagtgaagttcgccgcctgctgtcgcttggcgaggacgaaaccaaggcactgctggccgatatgatcacgaacacgcgcggttttgacctgccgccccgtgccgcgcgggccttcatgaataccccggacaaggaacgcggctcgctgcgctccacgctgaaccggcatctggccttcctcgatgatccgcgcctgatttcgacgctggccgctacggattttgcctttgatgacctcaagcgcaagccgatgacggtctatctggtgatgccgccccactcgctgcacgcttaccggggctatgtgcgcggcttcttcggtcaggccatcatgtcggttctggcaaccgggttgcagaagccgggcgacctgcgggtgctgttcctgctcgatgagttcgcccagctcggccacatgagcatcattgccgaaaagctctcggtcatccggggttatggcgcggccatgtggttcatcctgcaaaacctcggccagctcaaggaaacctatccgcgctggcaggactttttcgccaactgcaacgccaaacagtggttcggcacctcggacgtggacacggccaagtacatcagcgaaagcctcggcaagctgacggtcgaatacaacacggccaacagctcgtcggggtcttcgttcggctcaggcgtcagctccaacagtggcgcgggtgtgtcccagcagttcaccgggcgggatctgctgacgcctgacgaagtgatgcggctgccgaacgatgtggagatcgtgcaggtgcagggggaagcgccctacacgctgcgccgcctcaactacctgacggacccggaatatgcgggccggtttgattccgcgttccctgagcgcgaccgggcaacggtctag

SEQ ID NO: 312194 - DNA, 1002 bp, Proteus mirabilis
atgacgagcaagaaaaacgggccgcaggctatcggtgatctgctgggcgggctgattccgcgcgaggttaagcggacggccgacgccgtagcgtcgaaagggaagggtaaaggggaggcgagccgggcgcttacgcgctccgattccgcgctgatcgatgcggccgccgacattgccacaagcctgccaaccggcgaggacatggcgtttacgcacgccgtgctttgtcaggtcggcttgccccgcgccaaggtcgagggccgcgagttcatgcgccagtccggggccgcgtgggtgaatgtgcaggccggttatctggatgaaggcaacgggccggtgctgcaaccgatcccctatggcgtcatgccgcgtctggcactggcgtgggtatccacctttgccgtgcgcaacaaggagcgcgaaatcaagattggtgacagcgcggccgagttccttagcctgatgggcttggatgaccaaggggcgcgctatgcgaccctgcgcaagcagatgcacgcgctggcggcctgccgtctccaactcggctttaagggccgcactttcaacgggcagccggttgagcagttcgacgcatggctggcgaaccgcgacaccaaacagcggccgctatggccgggcacgatggtgttgtccgaaggctatttcacatcactgatgcaaagcgccgtgccgctcgacaaccgcgccctgatggccctgaaaggctcggcgctggcgctcgacgtgtacgcatggcttgcccaccggctgcaccgcatcgaagggcgcggcgtcacgctgcactggaaggcgctgcgcgagcagttcgcgcaggaatacaaggggaaggaccccgacaaggactttaagaaggagttcatgccagctctcaagaaggtgctggccgtctacccgcaggccaaggtgaagccggtcacgggcggtgtcctgctgcttggttccgctccccctatcccctacaagggcgggccgaccgagtaa

SEQ ID NO: 312195 - DNA, 651 bp, Proteus mirabilis
gtgattattgcgattggcaacaccaagggcggcgtcggcaagaccacgcttgccgtgcaactcgctattgcccgtgccatcactggccgggaagtgtggttgatcgacggcgaccggcaaggcaccgcttccgccgccattgctgcccgcgccgaggcgggcaagctaccgggcatcgcctgcgctcagtacccggacggccccacgttgcgggcgcaggtgcagcagcagcgcgacaaatgggcagacatcatcatcgacgtgggcggccgcgattccaccgccctgcgcgccgcactcattctcgcggatgccctcgtcgtgcctttcgccccgcgcagctatgacgtgtgggcgttggacgacatggcggccttggttgacgaggctcacagcgtccgcgacggcctgcgcgccttcgccgtgatgaatcaagccgatcccggcgagcactcgaccgacaacgccgaggccgtcgctgccgtggctgacgttccgcagttcacttacctgcctacaccaatccggcgtcggaaggcattcagcaacgctagtggggccgggctggccgtggccgagctgacgccgcgcgaccccaaggcgattgctgaaatcgacgccctcgcattagcactttttagtgctgtttga

SEQ ID NO: 312196 - DNA, 213 bp, Proteus mirabilis
atgaaagaccgatcccacgatcaggcaatggccgagcagttccgcgcggacccggcctatgccgccgagctgctggccgaagtacgccgcgacggcgacccggccgaactggccgctaccttgcgccagatggccaaagcgttcggccgcgccgggccgtggtgggacggccttaccgacgcagaacgggccatgcttgaagtcattaaatga

SEQ ID NO: 312197 - DNA, 426 bp, Proteus mirabilis
atgctggaccaccttcggccgggcgacgtggtgacggtgacgcggcttgaccgcctcgcacgcaacacccgcgacctgctggacattgccgagcagttgcaggcgaagggcgctggcctgcggtcgctggccgagccgtgggccgatacgaccagcccggccgggcgcatggtcctgacggtgtttgcaggcatcgccgagtttgagcggtccctgatcgtggaacgcacccgcaacggacgcacagcggccaaagcgcggggcgttcgtttcggtcgccgccctgccctcagtcccgcgcaaatagcccacgcgcgccgcctgattgacgaagacgggcacaccgcaaacgaggcggccgccctgctgggcgtccaccgggcgaccctctaccgggcgctgaccagagaggagagcaccaaatga

SEQ ID NO: 312198 - DNA, 687 bp, Proteus mirabilis
  misc_feature (641)..(650): n is a, c, g, or t
atggcatcaaatcaacctgctttatttcatatgatggcaaagccgacaagctaccactgtaatattaaatgtgaatattgcttttatctggaaaaagaaaatatttttcaagatgagacaaaagaaacaggccatacagtgatgcctgatggtgtacttcgtcgttatattaaagactatattcagtcacacagtggcgatcaggttgattttgcttggcaaggtggtgaaccaacgcttgcaggattagctttctttgagaaagtggtcaaataccaaaagcaatttgctaacggcaagacaattaccaatagtgtacaaaccaatgcgattgccattaatcgccaatgggcacaattctttgctgataaccactttctattaggcgtttcaattgatggcattgaagccgttcacgataaatatcgtatttcagtcaatggtagcccaacatttgaacgcgtaaaacgcgccatcaatttactaaatgagtatggtgttgaatttaatacattaaccgttgtaaatgatcaaaactggaataaaggaaaagagacttatcaagctttaaaaaatttaggttcaactttttttcaatttattcccatagtcgaagtggatagacgtttcccacacactcnnnnnnnnnncacacactcatggcggacattatgctcccggtcctaa

SEQ ID NO: 312199 - DNA, 294 bp, Proteus mirabilis; identical to SEQ ID NO: 307858

SEQ ID NO: 312200 - DNA, 699 bp, Proteus mirabilis
atggtaaacaaaatacgcttttttcaatatatttcgttgtgtgttttaggagtattatttttatcatttcaggttcaagccggtgtcggtttaagccagactcgtattattattaatggggatactaatacagcctctattagcgctagaaataataatgcacaaccttatttagtctctaactttataaccgaaaaactggatacctcatcaccacctttgagcggtatgtttgttgttactccaaacattttcaggttagctccggaaagtgaaaatacaataaaaattcaaataattccaacaaatcttcctaaagatagagaatcactttattacttccactctcgaaatattccatcaacaaataaaaatgaagatgggataaaaatagcgatggaaaatattatcaaggtattttatcgccctattaatttagcgataaacccaaaagaagccggtgataaattagttgtaaaagcaacgcctaatgggatcagtattgagaaccctacgccttattatattaatctttttaagattaccgttaaaaatgaaacgataaaattaaataaaattaataatatgatagaaccattttcttctaaaaactatgtggtaagtaataaaacaggtgctgttaatattcatattatcaacgatttaggcggagaaagtgtctacaataaaaaactttaa

SEQ ID NO: 312201 - DNA, 627 bp, Proteus mirabilis
atgtatgatggctcattagtagaaagtgtatcttcttctgaatttgttatttggaattcgggtaactctgttataacaaaaagtgcattagctactaaagaacctctaagaattgagtttagcagggaaattcaattattgcgttatcaagtcgtagcatcaaacaatcctattaataatatagcgctaaagactgacagtgaatatcctaattgtattcttattgattttgattttattgaaaaaaatgaaggtgctagaatagaaattctccatactggggataaaaacgatgttagggagaaaggaaaactaataggtgtaaaatctatctttagtaaacagaaaaaactatcaagaaaaaagaaaaaatcccaaaaaacttttagtaaaaaagcattagatgtaattcttttattgttgtcactattgtttccaataatgatcctattaatgattatttactcattcgcctctccagaggcttttatttctacaccccgccccgttagagatagtagttctccatgggtgatgcgtattatgggcttttccgtgatatgtgtatttatttttcaatatattaaccagcgtcccccttacccatcaagtttaaaaaagccttaa

SEQ ID NO: 312202 - DNA, 297 bp, Proteus mirabilis
atgagaaaccttgcgaacttatctcaagaaaaaaaagacaaaatcaatgtcgatttagccgcctcaggtgccgcttataaagaacgcctcaatatgccagttgttacgtccgaagttgaacgacaacaaccagcaccgaaacctgcagcccggatcatcccgctaccaacgaaagtcggtcaggccaagctaggtaaaggcgcttcttttcgctggactagccccgataggcggggcttggggtgtggcaacaatttccgctgtggccatagaaaaatcgccaaaggtggtatctga

SEQ ID NO: 312203 - DNA, 669 bp, Proteus mirabilis; identical to SEQ ID NO: 312079

SEQ ID NO: 312204 - DNA, 423 bp, Proteus mirabilis
atgttagtttctggcaattggtcagtgccttatcttcttgatattcggtattttgaaaaacctgttttaggatattggatcaattgtattgctcagtggctatttggtgaaagccattttgcggtgcgtattgttgtagtaacatcaaccttattaacaggatggcttatttataaagcggcaatggtagtttggcgcaatagcgctcttgcttttaatgctatgaccgtttttttatcttcttttctggtattagcaataggtacttataatatattagatcctattgtgacgctgtttgtgaccgctgcaatgtactcatttttagttgcgttatcgaccccgaataaaaagggcaaaataattgcttatatgggtattggctttttttgcgcacttggttttttaacaaaaggcaattag

SEQ ID NO: 312205 - DNA, 1026 bp, Proteus mirabilis
gtggtttgctattcctctattgcattgttagctctcgctattacagctggaccttgggtgattactgttgcattacaagcaccggattattggaattattttttctgggttgaacatgtacagcgttttattgctaaagagtctgctcgctcacaaccaacgtggttctatatcccgatagttatattgggtgtattgccttggttaggttttttatttggtgcattaaaatcagctttctctttaaaaaaaggtacactctattttctgctgtggtttgctctcttttttgcttttttctcagcctcaaaaggaaaactattaacctatatgctaccgtgctttgtgccattatctattttaattgcacactatatcgaagagttaaaagatagacctgatgagaaaattagcaaagtgaatgcatctattaatattgcttttgggctaatgggtatatcagccgttatctattctttatacagtgccaaatttgcgctttatgatacgaatgaaacgttaaaaatagtgttagcaataagtgggtttttattttggagtgtgattggtgcgggggcgctgtttagacaaacacagtttttaacgatgttttgctctatcggactaagtttagttattggctatgcaatcccagaaaagatagaaagtaggagtacaccagaaaatattatccaacgttattatgagcctttgagtaataaatcgtatcttttaacggacgaagttggtattggtacatcacttgcttggggactaaaacgtactgatattcgtttaacagagacgaaaggtgagttggcttatggtttaaattacccagatgtaaaaaataaatactatagccttgaacagctattagcattaattgaagcaaaccaatataaaggggtagcgattgttttagtcagacctgatagaaagcagattttgactaaattgactacattaaaggaaaagccgatagtagaaaaagagggcgatttaacgctggtgttctttaattag

SEQ ID NO: 312206 - DNA, 1206 bp, Proteus mirabilis; identical to SEQ ID NO: 305366

SEQ ID NO: 312207 - DNA, 225 bp, Proteus mirabilis
atggctgtcctgagtgatagtttttatagttattttctccaaccattgaataaaaagataacggtggctcttgagttaaacgagatatttttattttattacctttatcaaccacaagttggattttatttaacaccggttttatcgctaatattttatcttttgattttaatggcaattttatttcattttttttactcttaccatctacgtcatcctctttag

SEQ ID NO: 312208 - DNA, 252 bp, Proteus mirabilis
atgagccgtctgactatcgacataacggatcagcagcaccaaagcctgaaggcgctggccgccttgcagggcaagaccatcaagcaatacgcgctggaacggctgttccccggcgatgctgatggcgaacaggcatggcatgagctgaaaaacctgctcggcacgcgcatcaatgaagggcttgcgggcaaggtgtctaccaagagcgtgagcgaaatcctcgatgaagaactgaccgagggccgggcttga

SEQ ID NO: 312209 - DNA, 252 bp, Proteus mirabilis; identical to SEQ ID NO: 312208

SEQ ID NO: 312210 - DNA, 171 bp, Proteus mirabilis; identical to SEQ ID NO: 300357

SEQ ID NO: 312211 - DNA, 252 bp, Proteus mirabilis; identical to SEQ ID NO: 312208

SEQ ID NO: 312212 - DNA, 480 bp, Proteus mirabilis; identical to SEQ ID NO: 292562

SEQ ID NO: 312213 - DNA, 492 bp, Proteus mirabilis
atgaggtcagtcccggtaacggcggaaaagacagcggtttttatggggttcagtatccctgcacagccgaccagcaacagatgcagactctcgacaatcgccgtctgccaggcgggtatcccgtcatccgcatatatccagtgtctgagtgccggcatatctacattgtgtaaagtaatatcaagtcaatcgggtagcagtgttgtattactgaatcaccgccccctaagaacagtacgtgcctgtttccccggaatacggctcaagcgtaagcactgcatcaactcgccgtatgatgtgatgaacctgccactgggaatcagctgtaatcctccaccacatatggggcatcggcccccctatttaaatcaaatttggatgagctttcccaccttcttctacccatatagccaacagttccccttgcggttaacctgcctcacgagacaacgatacgggcttactatgttccaccagaataacaactgttaa

SEQ ID NO: 312214 - DNA, 144 bp, Proteus mirabilis; identical to SEQ ID NO: 292563

SEQ ID NO: 312215 - DNA, 393 bp, Proteus mirabilis; identical to SEQ ID NO: 292565

SEQ ID NO: 312216 - DNA, 900 bp, Proteus mirabilis; identical to SEQ ID NO: 292566

SEQ ID NO: 312217 - DNA, 333 bp, Proteus mirabilis; identical to SEQ ID NO: 292567

SEQ ID NO: 312218 - DNA, 1602 bp, Proteus mirabilis; identical to SEQ ID NO: 292568

SEQ ID NO: 312219 - DNA, 270 bp, Proteus mirabilis; identical to SEQ ID NO: 292569

SEQ ID NO: 312220 - DNA, 534 bp, Proteus mirabilis; identical to SEQ ID NO: 81810

SEQ ID NO: 312221 - DNA, 444 bp, Proteus mirabilis; identical to SEQ ID NO: 292571

SEQ ID NO: 312222 - DNA, 597 bp, Proteus mirabilis
gtggcgaacgcagcccaggcagggaaaacaaccgttgagaataatacatttggccccaatacattttttggacaaatggcaaactccgtaaatccagatgcaactttagcatttgatttaatgggtaagggaaccgcagttgatgaaattaataaggctatagaatatagtcatcagcggccatcgtggggagttgagtataaggtgaaaccttatgtgaagggtgaagcagctttgggaataggaccagggtatttttatgatgccagtgttgacccatctcagtttgcgattaatggaggagaaactctggcgattggggggcgtgtttcaggacaagtaggcattcaatttggtccatattttcctgatataggtggaactgagcgaaatacttcttttggtgtgggatttggtgtgggtaacatagaaatttcccatggaaaagatggtgttggattaagtttaggggccgggccttcttggggatggagtggtatatctaagagtataggcggcgaatctattgatataaatggttcttcaggaactgaaaaatacaagtatgaatttaataatagtggggctgataaatga

SEQ ID NO: 312223 - DNA, 174 bp, Proteus mirabilis; identical to SEQ ID NO: 305843

SEQ ID NO: 312224 - DNA, 339 bp, Proteus mirabilis
gtgaataaatacaccgaactatctgactttgagattaatttagctgttgctcacattgcacttggcaagggtagctatgattggtgccctgataaaaaagaggtttactttgcaggaattgatggtggtgaatttttacatcatggatacttcgacccatgcaacaatccatccgacgcaatgccaattattaacgaatatggcattagccttatatatcaagatagaaaattccaatttgcaactaatgacgggaatatagagtgctgtattgccaacccattaaaagcagcaatgattattttcttgtgtatgaaggatgcggagaatgaaggctga

SEQ ID NO: 312225 - DNA, 252 bp, Proteus mirabilis
  misc_feature (190)..(199): n is a, c, g, or t
atggatgcacaactgtataaagagtttaaaattatagaaaaagcgttttggtcagagatatgtgaaaacaatattcgtattggtgatcatacccactgctttatgacaccgatggacgcgcctatttttaattttatctatcttcgtcaaggcgctagcgaaaatactttccaacaagcaagtacgctgnnnnnnnnnnaggtcacatgctggttctgccggaatctctgttgcctgaatttgaagagataa

SEQ ID NO: 312226 - DNA, 468 bp, Proteus mirabilis
atgaccagcaaaaataatgcaacatctgaaaataaatactttaatctgcatgtgaacgggattgggtatttatcgaatatccgtcaggttaacggccctaaagggcagtttttaaccgcagtgattaatgcactcagtggaccggctgataaccctgtgtacgttcgtttcgatacgacggtcgtcggggagaatacggtctcactggtcagacggtgtatcaaagctgtggatgaggacaaaaaagtcctgaccgggtttacattaagtaatctggcctctgatattttcaccctgacaaaaggtgagcatgccggagaacagcgggtcagcctgaaagccagactgctgaatattgactggattaaagttggtaaagaggtggtatataaagccgagaaacaccagtcaacaccaccagagactgaacagccggtatccagagagtatgtggctgattctttttag

SEQ ID NO: 312227 - DNA, 285 bp, Proteus mirabilis
  misc_feature (262)..(271): n is a, c, g, or t
atgcaaaataattatgtgttacgcagtgtgcgttatatgttagatcttagcgatggtcatattgttgatataatgaaactggcggatttcactgcgactaaagagcaagtcaatcagtggttaaaaaaagacgatgatcctgcctttgttgagtgtgatgatatggccttgggacattttttaaatgggcttatcttttatcgtcgtggtaaagatgaaaaatatcctactccagaagtcgaaaaacggataaccaacaatnnnnnnnnnncaatattattttaa

SEQ ID NO: 312228 - DNA, 312 bp, Proteus mirabilis
atgaaaagttataaagttgcagtcagctatgatatgtctgactctatttcaactcatcgtaaatatgttaatattctacatactgacttctcttatattgccgcaattattatttcacttgataatattcaagatggaaggctcgattttattgaacaaaatagctttggacagcctgtattcgctattattaataaagatgaagtcattccgactaatattattaatcgattaacaggtgtaattgatttaaataaaaagaatacagaccggattcagccggctgttcccagactgaccggtaatatctga

SEQ ID NO: 312229 - DNA, 903 bp, Proteus mirabilis
atgcccgtccaggctaccgccggcaacaatctggctgtcatggttaaacagacgggcggtatcaaaccggatatttccccccgcaagtattttccccggatcagtggatgctatctgtgtctccgtgacggtccgggtatagttatattcataaaaacgatcattttcgctgccatccggcattcttgctgtatggacgccatatttattcttcttactgagatcaacatctgcccagttataacgggtggtactgccgttaagaacgccctcatgatgctgacttctctccacctgaaccgtatgtgtttccagtttccggttggtattattcaccgtctgcataccgataaatgcatcactgccggcctcaataaatgcaccgtcattattcaggacatcgccccggacggttgcacgataatcgttatccagatgacggccaaaaaccatattaccgagactggtgatcagtgcatgcccacggttattaaccgttccggccgcaatatccagacgatcacgggatgcgattaccggagctttgtcaccatcccggtcattattcagaacgccggcttcgacagcgagatgatcaccaaaaatccgcccgctgccggtgttgttcagcacaccggtcgtcaggtgtgtcagttcaccgtcaatcagcccgcgattctccagtgttccagccacgttcagatgcgtttctttcgccgtgatatccccctgaacagtattgaccagattatccgcacggatctccagcccctgttgtccggcaatcaccccgtcattaatcagccggcggtcggtcagcagcttcagatcaccgttcgctttaaccgagccggtattacggaaatcgtcggtcacatgaaccgtcaggcgatcccgggataa

SEQ ID NO: 312230 - DNA, 249 bp, Proteus mirabilis
atgcagcacggtattcccgtcagacacaatacgtccgttccggttatccgtcgccccggccgtaatgatcgtctcaccggcagcagaaataccaccacgggaaaccgtatcacggttgatcaggctgttcccctgtgtgtcaatcgtcagcccggcgccggagagaatactgccggtggtattgtccagttgcccgccggtgattgccagcccccgcagggcagtgatcagcccggcagtgttatctga

SEQ ID NO: 312231 - DNA, 417 bp, Proteus mirabilis
atgttgccgccggtggctgaaatcagcccttcccggctggtcagcgctgccgtatccagcaggatatgccgcccggcaatcagacgccctttatcattcagcacctctcccggtgtggtcagggataaactccctttatcagcggcaagcagtgtcccggcagaattatccagtttcgcgctgctcagcgtgatgtccccggcactttccgcccggccgttccggttactcagtgttccggagactgtcagttgcatcccttcctgtccgagagcagacaacacggcatcatcattcgtcagtatcccggcttctgcggtgatttttccggcctgcgtagagccaccggataaatccgcctgcccggctttcagccggagagcaccggatgacagtaacgcgccctgctgtccctga

SEQ ID NO: 312232 - DNA, 420 bp, Proteus mirabilis
atgaccggtggtgatccgcagttcaccgccgacctgcatccgggcattcacattcaccgcccgggcaatcagcgcagtgtagtcactgtcctccgccagcagtccgcgtccctcaatactgagccgtcctttgtcaacatcgaaacctttcagtctgccgccgtccatcagcgctttcccggcggccagggtcgttctttccgcattgataaaaccacagccattgcaggtaataccggacggattagcgatcaccacttccgcacggcgtccggcaacctcaataaaaccattcagccggctgggatcacggctgttgacttcattgagaatgatcctggcctcaccctttgccagccaggggttaccggtaatattgccggccagacgggtctgtgtattactgtgactgttatttaa

SEQ ID NO: 312233 - DNA, 207 bp, Proteus mirabilis
gtgtataattgtacgatagggaatattcctaaagagagttttaaagagattatttcctcaggaggtaatgttgattcattagtgaaatcattcttaggtaccaagcaacatggtattattgagttttgtctgttagttttttctaatttagccgtagcaagctctttctttggcgtcattcttggattatttgatttatctagctga

SEQ ID NO: 312234 - DNA, 303 bp, Proteus mirabilis
atgatcctcgttccttatttcctggttggtgctttcttatttaaagttgccatagaacgcagtagccgaggattattactgatagcaatacctgcaagcctctatggtttatggttactttatgcatcaggtgtaattaatttattactttccgtcgttctctatgcacccggtgtattaatatttttatattcacgaaaacaatataaagataaacagtcattaaatactagtgaaaaaatactactgatgatggtattaattggcgcaattcctgcttgtggctatttagtatttaattaa

SEQ ID NO: 312235 - DNA, 420 bp, Proteus mirabilis
  misc_feature (408)..(417): n is a, c, g, or t
atgtcatcagtggtgcgtaaagtaagaaaagcggtgatccctgttgcagggctaggaacaagaatgttgcctgccaccaaggctatcccaaaagagatgctacctgttgttgataaacctttaattcaatatgttgttaatgaatgtattgcagctggcatcaatgaaattgtgctagttacacactcttcaaaaaattctattgaaaaccattttgataccagttttgaattagaagctattttagaaaaacgagttaaacgtcagttgttggaagaagtacaaggtatttgtccaagtcacgttactattatgcaaactcgccaaggaatagcaaaaggattaggccatgccattttatgtgcaaaacctttggtgggtgatgagcctttcgctgttatcttgccnnnnnnnnnntga

SEQ ID NO: 312236 - DNA, 327 bp, Proteus mirabilis
atgaagggaggacaatatcaactggttatcggtaatgatgttgataaagtatttaatgaactaacaaaaatgataaaaacaaataatactcctcatgataataataaagaccagaagaaacagtctatcgtaaataaagtattatcagcaattactggctctatcgctccggttatccctctgttagcgggtgccggtatggggaaagtgttacttattgtattaacgatgctaggttggttggataaaagtgaccaaacctattatatccttaactttatctttaatacggccatttattggtttctcggcggcgaaaatatttaa

SEQ ID NO: 312237 - DNA, 354 bp, Proteus mirabilis; identical to SEQ ID NO: 292574

SEQ ID NO: 312238 - DNA, 372 bp, Proteus mirabilis; identical to SEQ ID NO: 292573

SEQ ID NO: 312239 - DNA, 336 bp, Proteus mirabilis
atgtcaatagtagatacaaataacgtagatatgatcggtataccaaaagagaatgccggtcttgtccgactaggtataactgaccatctaagttggaatgatgataaatttgaacatttatacttactgcaagaaaagattaatagttatatccattttattgaaagtaaagagatttatgaagtattccctgaatcgaaaggaattaataattttttgatagaaatgttttttctttatgaaatacccactgagtgtattgaatttctggataaaataaaagatgagctgattaacattaatacatcattaagatatgaagtagatagtgaatag

SEQ ID NO: 312240 - DNA, 378 bp, Proteus mirabilis
ttgacatttcggctactaacgtcgcatccactaattggcattgtaacatcatatttagacactatttcccacgtaaaatatttaggattaccaccatcccaatccgctattttatacatattaatagttgcaatagtttcacccgatctaatgagtactcctcctgcaggtgagttatttataggcgttaaatacaacatcattggcatcggcataggggtaagatcaccgatatgtaaaactttagtcgcactatttaaaggtaatgaatatgtatttccataccaatatactgaaccactaaaattaaatagtggcccagataagcccgtccctggttctaaattgatatggtcaacatcttgccatccaccataa

SEQ ID NO: 312241 - DNA, 564 bp, Proteus mirabilis
atggagttagggtggaaatggcacagttttaataacaatcatcaggccgaaattactctataccaaatagatagtaaagacgttcaaggatatgtgggtgtcataggttatcaggcattatctaatatgggagattcaagaagtcgaggaatagagtacctttggaaatcaaagattaactctaatcatagtatttcactaggggggatgttcaatcaatctgaatttactagtggagaatataaaaacaaaagacccgcttatactcctcgttatagttcattaatagcatgggatggttcatatggagctgagcaaaagtggtcgtctcggattgcagtcaggtttaatggaccattttattttaatgagcaaaacgatctagaacagcgtcactatactattgttgatgcatctatatcatggcatccaacaaaacaatatgaattaggtgtttatgccaagaatattggagatgctttgtatagaacttatgcttttggtaataaagctcaactaggtgaaccaagagaaataggcgttcaagctaaactccttttttga

SEQ ID NO: 312242 - DNA, 432 bp, Proteus mirabilis
atgtatttcttcaatgatagtttttttgatagattatatgctgttgctaccggtagcgatggatcttctaataacagaattatagggtctatcagtagaacaattatgtctttgtatgagagcccgtttggttttggtattggaaattcaataagtggaattgatttttatagtgagaaatttggtataaacattgagtcgtcagtatcaacgcagaatgggttttctgaagctataatatcatgtggaattatcttgggtatcgcctacttaattcctattttttatttgatttttgggaaatattctttggtgttatttataacgatatcactcgttttttttactactagttctatattcatttctccaatgtggtttttgatatcagcagctattttcttaaaaaaatacatgattaatggtcaataa

SEQ ID NO: 312243 - DNA, 216 bp, Proteus mirabilis
ttgttattggagatcatcgaatcgctatggcgagggatggaaaaaccgataaaaatcaataaagaaaaaacaatcgttccttctattagcttaggtattgctgaataccctaaggatggcaagacattatctgaactattaaagtcagcagataaacagctttatgcaataaaagaaaaaggaggaaataaatacggtttttattcagagtattaa

SEQ ID NO: 312244 - DNA, 1005 bp, Proteus mirabilis
atgaaaaaaatcacattaggtctaatttgttatcctgggtttgaaatagataaaatgaagcaagcatgtatagataatgatgtcaattatatagaaatagatttcttatctactgactggcttaatcaatgtagaaacccaacaattgacggttttattattaggcctccttgtaccttacaagaacataaaaatatatttgatgaaagggtctatttcattaataatatattaaaaaaaatgacttatccttcatttaaagaactttatatatatgaaaacaaaagaaatatggctctatatctagaggggataggtgctccacaccctaaaactaaagtattcttagataaaaaatcagcattacaaagaactcctaattttccagttgtaatgaaaagtaatataggtgctagtggaagtgcagtaaaaattataaaaaataattatcaatataaaaaaatgataaaaaaaattttcggatatattcatcctgagtttagtttagggtggataccttttgtcaaatataaaaatattcccttacctagaattggaagaagtcaaaagcattacgctattttacaagaatacctagatataaaatgggaatggcgaatgatcaggattggtaatagctacttaggtcatcaaaaattattaggtgacaatggttatgccagcggttctgaattagttggatgggaagaaccaccaaaagaactcttactccttttacatagtgtaacagaaaagctaaattctaggtgtatggtactagatatctttgaaacaaaagaaggtaaattttttatcaacgaaatgcaaacaattattggtgcctatagaccgtatcaaatgaaaataaacaataaaccgggaaggtttattttaaaagaaaataactttatttttgaagaaggtatacattttcaaaatgcatgttggaatccaagagttgaagatttcaaaaaaatattattagaagagaaatattatgcataa

SEQ ID NO: 312245 - DNA, 765 bp, Proteus mirabilis
atgctgaaaatattagtgagtaatgacgatggtgttatggcaaaagggatacagacactcgcaaaagccttacgccagcgttatgatgtacaaattgtcgcaccggatcgcaatcgtagtgcagcatccaattcattaactattgatagaccgttacgtaaacagcgacatgaaaatggtgatattgcgatagttgaaggtacacccacggattgtgtctatctcggtgttaatcatctcgtcagaccgcgtccagatattgtggtgtctggcattaatcatggccctaatttaggggatgatgtgctttactcaggtacggttgctgccgctactgagggccggttcttaggtttacctgcgattgcggtatcacttgatggcgaaacgcattttgacaccgcagcccaagtgacttgtgatgttttagctatgctacaacgagtacctttaagagctgggaatattttaaatattaatgtgcctgatattccgttagcggagatcaaaggttttcgtataacacgttgtggaagtcgtcatgcttcacaacatgtttatacacaaacagatccaaaaggaaataccctttattggatcgggcctcctggcgaaaaaaatgatgtggggccggatacagattttgcagcggttgatgcaggttatgtctccatcacaccattacatgttgattcaacagcgtataaagcgcttgagttattaaaagattggttaaataaagcagaggtcgaaaaaacatgttaa

SEQ ID NO: 312246 - DNA, 483 bp, Proteus mirabilis
atgagaattggacacggttatgatgtacataaatttggcggagaaggcccaattattattggtggtgtgagaattccttatgaacaaggtctactagcccattcagatggcgatgttgtactacatgcggtgacagatgccattttaggtgctgttgcgatgggcgatattggtacattatttcctgatacagatccggcttataaaggtgcggatagccgagtattattgcgcgaagctttttcaagagtgatggctaaaggttaccgtattggtaatcttgatgtcactattattgctcaggcacctaaaatgctacctcatactccacaaatgcgtgtcaatattgctgaagatctccattgtcatgttgatgatatcaatgttaaagcgaccactactgagaaattaggttttgtaggacgcaaagaaggtatcgcttgtgaagcggtggtgttattaatcaaagagtctttatcttaa

SEQ ID NO: 312247 - DNA, 747 bp, Proteus mirabilis
atgaatataccaaactctacttttcctattgtggcggttattcccgctgccggcataggtagtcgaatgcaagcaacctgcccgaagcaataccttaaaattggcagattgactatccttgaacatactattaatgcgctattaaaacatccacgcatttcgcaaattattgtcgcaattaacccagaagatgactatttttatcacctagcccttgctaaagataaacgaattattgtcgttaaaggagggggacaacgtgctgattcggtattatcagggcttcgctatattacagaacatcttgcgcaaaatacatgggcgctagttcatgatgcggcaagaccttgcctgtcctttagtgatttggataatcttattcaactcattgatgataaccatcttgatcctcaattttgtggcgggatcttagcctctcctgtgcgtgatacgatgaaacgtagtcatcaacaagataaccatattgaaaaaacagtggcaagagacacgctatggcatgctttaacgccacaatttttcccagcggccttgttaaaacaaaatcttgaaaacgcattggcacaaaacgtacccattactgatgaagcatctgcgatggaatttggtggatatgaacccttattagttaaaggccgtgcggataatataaaagtcacacaaccagaagacttggctcttgcagaatttttcctctctcgacaaattaccagcataaggaacacataa

SEQ ID NO: 312248 - DNA, 909 bp, Proteus mirabilis
atgaatgaaacacaattaacccatcttcagcaattagaagcagaaagcatttatatactgcgtgaagttgtcgctgaatttgaaaatcccgtcatgctttactcaataggcaaagattcttcggtgatgttgcatctagcacgtaaggctttttatccggcgaaattaccttttcctcttttacatgttgatacgggttggaaatttcgtgagatgtatgagtttcgcgataaaacggccaaagagtatggttttgatctcaaagtttatcgtaatccccaaggggcacaattggggatcaatccctttattcatggtagcgccaagcatacagatatcatgaaaacagaaggtcttaagcaagctctggataaatatggttttgatgccgcatttggtggggcgcgtcgtgatgaagaaaaatcgcgtgctaaagagcgtatttactcatttagagatagatctcatcgttgggatccgaaaaatcaacgtccagaattatggcaaaactacaacggccaaattaataaaggggaaagtattcgcgtttttccattatcaaattggacggagctagatatttggcaatatatctatttagaaaatatcgatattgtgccgctctatttcgctaaacaccgtccagtcattgagcgggatggtaccttgattatggttgacgatgatcgaatcgacctaaaagctggagaggtgatcacacaacaaaaagtacgctttagaacattaggttgctggccattaacgggtgctattccttcacaagcagacacattacccgccattattgaagagatgttaatttccaccagtagcgagcgacaagggcgtttaattgacagtgatcagtctgcttcaatggaacttaaaaaacgtcagggttatttttaa

SEQ ID NO: 312249 - DNA, 1731 bp, Proteus mirabilis
atgaaatcacaaactcaagcgcccttagtggttgaaggaaaactatctgatagtgaacgtatgaaaaaagagagtaatttcttacgaggcactattagtgatgatctacaaaatggtctaaccggtggttttgagggcgataattttttattaattcgttttcacggtatgtaccaacaagatgatagagatattcgtgccgagcgtgcccaacagctactagagcctcgtcatgccatgatgttacgttgtcgtttaccgggcggtgtcatcacaccaaagcagtggctaagtatcgataagtttgctagtgaaaatacgctctatggcagtattcgtattactaatcgtcaaacttttcaatttcatggcattttaaaaggtcatgttaaaccggctcaccaaatgctagcgtcaacaggccttgatgctcttgcaaccgccaatgatgttaatcgaaatgtgctatgtacctcaaaccctgaacaatcttcattgcatcaagaagcttatgaatgggccaaaaaactatccgagcatttattgccacgcacccatgcctatgcagaaatttggttagataaagagaaagtggcgacaacggatgaggagcctattttaggtgaaacctatttacctcggaaatttaaaacatcggtggtgatccccccttataacgatgttgacttgcatgccaatgacatgaattttattgccatcgcagaaaatgggcatttggttggttttaatgtgctagtcggtggcggccttgcgatgacccatggtgataaaaaaacctttccgcgtttagctagtgaatttggttatattcctattgataaaacattagcagtcgctgaagcgattgtgacgacgcaacgagattggggcaatcgtactgaacgtaaaaatgctaaaaccaaatacaccttagagcgtgttggtattgaaacatttaaacaggaagttgaacgtcgctcaggcgttatgtttgatatgatccgaccgtatcaatttactcaccgtggtgatcaaattggttggttaaaaggggttgataacaaatggtatctaaccttatttattgaaagtggtcgattaatcgataaacctaatgcgccgttaaaaacgggggttgctgaaattgccaaagtgcatcttggtgactttcgtttaacagctaatcaaaatttgattgttgctggtgtaccagaggcacagaaagagcagattgaggcgatagcgcgtcaatatggtttaattaatgatgaggttacaccgctgcgtaaacatgccatggcgtgtgtttcatttccaacttgcccattagccatggcagaagcggagcgtttccttcccgcatttaccgatacccttgataatatcatggctaaatacggagtcagtgatgagcatattgttgtacgtgtaacagggtgtcctaacggttgtggtcgtgcgatgttggcggaagtcggactggtgggtaaagcccccgatcgctataacttacatctaggaggaaaccgcatgggtactcgcattcctagaatgtatcgtgaaaatatttcatcacaagaaatcattgaaattcttgatactttaattggtcagtgggctatttcacgtgaattaaatgaaggttttggtgattttcttattcgcactgatgttatcaaacccgttgttaattcagccattgatttttatgaagtgcaggaggtgatatga

SEQ ID NO: 312250 - DNA, 399 bp, Proteus mirabilis
atgagtgaaaataatttaagcccaaatgaaaaaccgttgttatctaatgaagataaaattcatttagaacatttactagaaaaaataaggcctttattagcattaaagcgcctagacaatattgttgatttattatctttagcctcagataccgtcgatattatggataacgcaacggtagaaaaattggcggttgcttttgaagaaacattaattccggtttgggaattaactacggcctttaatatggctaaaaaagaatctctttatcaggataaaaaatataccttaggtgcgactttttcattattaaaaaatcctgacaccttaaaaggattaactattgtattaaggacattacaaattattggggaaaataatcagaaaatagaagtttaa

SEQ ID NO: 312251 - DNA, 342 bp, Proteus mirabilis
atgaataaatacaccgaactatctgacttcgagattaatttattagtagctcaatctgttttacctgaaacgcaatacgatgtaattaaacaaacaatggatattatccaattccttgttgatggctcgtttggttatcgctttttcgacccctgcaataacccagcggatgcaatgccgattgttattgagaatggcatcagccttatttcagactggaacgagattggtgtgtggggtgcgacctatcagccgtggtatacatcagaaaataaaaacccactacgcgccgctatggaagtgttcttaatgatgaaggatgcggagaatgaaaaagtatga

SEQ ID NO: 312252 - DNA, 534 bp, Proteus mirabilis
atgaaagttgaacaatctcaagttactaagttagtaataacagatgttgagcgacacgaccctatccatgtttaccttgaggactacggtgataaccgtcaaggccgagtgactattagtgagtttggcaaatcatggtcatgttactggggcggtatgggtatgtcgctcattgagtttctattgtggataacaaaccaatattggattggttatttagatgcaagcttagaaagggagattgacgctgataatgaagaaaatattgcatttgtcagaaagcaaataatcaagttaagaaagaataaggatattaatgagtttgaagctcgtagcatgtttgatgatgctgagtatagggatgatataaaacaggatgtacttagttgtgaaccatttaataaatatggtggtcttcttggtgatgacccatggttggctccatggcctaaacaagaaaaccccgactattggcgaatggaatcacgattaaacgctgttcgtgaggcattaaaacaaataaaggtggagtga

SEQ ID NO: 312253 - DNA, 276 bp, Proteus mirabilis
atggaaatatggtttaaggagtttgagtcacatggacgtcagattctagttaaaaaagcccacaacgccgaagaatcaaaggttggaattcaatattgctggcctgaagaaatatttgaggtcgaagttggtccgtggatagcttatgacgaagatgatgatgaaagttgcgaacaagcaaataaagctcgcgacgaactatttgaggctaccaatcaagaggttgtagataacgcagttagtgaaataattcaaatgcttaaactgggtgattag

SEQ ID NO: 312254 - DNA, 348 bp, Proteus mirabilis
atggaatgtgcaaaaaatatcaaagtagagtgctcatcaaacgaattgatgacgttttacattcaacaaatgtattcagtcggtaataacggactcgctaaggcgctaggaatacacccatcaaaatccagtcgagataaagccagaatattcgatttagcttgccagttggtaagtaagttcggattaccccctgactctgtaaatatcagtgataagccaacgaaagttgtccttgaaggtgattatgcagaaagggttattcaggctcttgagggaaagggaaaggttaaaagaaaagccccagcggtaactgaggcttctcaacaaatggacttaaccatttag

SEQ ID NO: 312255 - DNA, 669 bp, Proteus mirabilis
atgagcgttggtcacttaggtgaaatgaaattcaaccgtgaagtatccaagaccgaatctcttccaactaacttcagggttgaaggctgggtttatattctgagcaatgagtatatgccgggcatatataaagtcggaatgacaactatctcgccagaaaacagagccaaagagctatcctccgcaactggcgttccagataaatttaaagttgaagcatctttttactctgaatttcctagtaatgatgagtccactgttcatgactacttggataaatacagaataaatgagtctcgagagttctttaaatgtgatttagaagaaattattgaaacttgtgaggaagtctgcattgcgagagtcggggataaagttgaagtgttagctgactcatacgacatcatatgcaccgaaagtctagataaattacatcttggcgagttatttgactctcttaacgttagcgtttttggttgcaaagttgccacagcagaaagattaataagacttgctgttcacctttgctcgaagagatttaacacctctcacgccctctactttaaagaagatacagcttatttagtgcaaagcgtaataggtcaaaacttagaggaatggaagaaacataaccctgaattagcaaacagatcggaggtgcctttctaa

SEQ ID NO: 312256 - DNA, 2283 bp, Proteus mirabilis
atgtctacaattccaacacaaaatccagttccaagtgaagcagcgaaagacctgaaatttaacgcagggaaaattgacgagttcgcgacgtcaatgaaaaacaaatatatcgatagattcgggcaagagcattttacaattgaagggttgcgctggattgctcagcaagcgatatctaaatttggatatattaccttggactcgttccaaaaaggtgcagaaataacactcccaaaccaagctttgcgtgatgaattgactggggagtattatcgttgggatggtggtttgccaaaattagtacctgtgggctcaactcctgataactccggaggtgtgggcgttggtagatggttgagcatagggagtgcatcattaagggctgatctagctacagataatggagtagatttagttggcggtgcggtaaaacagaaagagttatcatcaaaagacggcgcgtgtttagttggtattaatgaatatgagacactatgcgatagattaaaacagacatttaatgctgcagaatatgggcttaaaagcgaaaatagcgccgaagaaaacacgctttcattacaaaaactatctcaagatgttatgagtgctggcggtggaattatttttatcccagcgggtgaatatcgcatcggagttcagcacagaaatacaccagcagagcacgatccaagtgtcgtcagggcttacggtgttgaatttaacttaaatctacaaaatttatctggtgacttaattattattggatacggagctaagtttaaacttgcagataatttgagatttggtgcattcaacccagaaaccggagagccaagaccatactcaccaactagcaatgattattccactcgagcagatgctggttttatttttaatatcgttgaaaatccacaatcaaatattgtaattaaaggcgtttcatttgacgggaatatgtcaaatcttatattgggtggtcagtggggtgatgtcggtcgacaatgtgacggatacggaataagggttcgtaattacaaatcactctacattgagagtgtgacgatagataagatgccattggatgggctttacactggagatggatggtttgcaaaccaattcaaaagaccaaagccaacaatattaaatgcagtaaaaattaaaggttgcggcagagataattggtctataactggaaatggcttataccatgcaatagggtgtgatatatcagaggcttcaacatatgaaataaattcaaacccttcatctggagttaacatagagactgaggctggcagggtttatcaagttatatttgataactgcgcaatatataacaatatggacgctaatatattaacgacatccaaatcagttgaaggagtgaaggctaataattgcctcatatatcacgatgatgattacctattaacaaccaaagccaatggtgtttggatgaggggcagtattgttgatttgtacggttgtacaattaggaactccaaagtccttaatcaagtatctaacccaggcattaatttcgatttatttaaattaccagttattgactcatgttatattacaaataagggtgtcaacgggatagagtcatcaaacccagttccgttaattaactcagtagatcacatgatagaaataaaaaactccattattgatatacttaaccccttagttggaattcaatatatacaaatatccaacggtgctagtatctcaaattccaaaattttaattaatggtgagataaaagatagatcagcattttcatcaatcattggttacattagagatagccgtattctaaactcgtccataattaacctaacaaaagacacagttagaacatacatttttgacttttctagagtaactgaaaccactggaactttatttaaatttggtaaaatatcaggttttaatctaaccaaaaataattcgaaaatggaaaggatctatctatctgctaattatagtaatatccccacttatcatagatttttcattgggcaagaagttgtttttcttgattctgttaaaaccgtttcgaaatctggtgtaaatgatgattattctatctcatcgatagtgacaaatggggtgttttcagatagttcaggcaagttcaaggttggagatatacttctattcaacgatagtaatgcgacaactgtgatcagtgttagtggcaatagcatatctacgtcatcaacaacctcaggtacatacaccataaaattccaaaaagtagaattccagtaa

SEQ ID NO: 312257 - DNA, 1071 bp, Proteus mirabilis
atgcaggataacaaaaagagaatatacggtcttgatcttattagatttatagctgctatcatggttgttattttccattactcttatagagggtttcaagccgacaacttgactctgatgcatattgatgacatttcaatgatagggaaatatggacaccttggcgttcagttgttctttatgattagtggttttgtcataatgatgagcgctcatcatggatctgttgctaagttttttatatctagagcttcaagactttatcctgcttttatattatgttgcacaattacctttgttgttatttcattttttaatgacaatccatctttatctgtatcaacaaaagactacattataaatttaagcatgttagctggatttgtaggagttccgtccgttgatggggtatattggagcctttatgttgaaatatatttctactttttagtggcgattattcttatattaggacaaattaaaagagctgaatatttactgtacatgtggatgtttatttctcttcttgcttggtactctgattacggaattttaaagaagctcacaatttcaaattattcagtatattttgttgcaggagggttcctttattattcatggagcatgggctttaatttaaggaggttgctaagtataattgcatgctgcttaatttcttccttttcggcaattcaatataatggatatatgagaagttattataatgacaacttcagcgatatgataacagtatcaatagttgtgtcattttatctattaatgatttttatgatatttttcaatataaaatggctaagcaatccgatatttatgaagcttggcgcagccacatatccactttatctactgcaccaaaaaatagggtatgtagtatttgacaatttatatggagaattaaataaatatattttatttacatttgttattttctttatggttttaatttcttacattattggtaataaaatagaaccagcaatgacaaatttaatgaaaggattcttaacaagaattatttcaccaaaaagaagtgacgcagttaaagagtaa

SEQ ID NO: 312258 - DNA, 528 bp, Proteus mirabilis
atggccgttattcttacttatgtcaatatttcccctattgtagtgatgcaacaaatgaattattcaacaggagagtattcaatattaatgacatcattagcaatgataagtatgaccatttcttttttaatgccaaaaatattaatgaaataccgctataagcatattttatcagtagggtttatatgttttggaataggtattattttcctttttatagggaaaaagagtgacatgcgttggttttttattacctttgcattatgcggctcaggatttgcgttattatttgggattattatgagccaagcactttctccatttagccaacgagccggcgttgcgagctctgtgctgggtatttcacaattaagtttttcttcactttatatttgggtaatggggtggattgaagtatcctcaataaatatgttggtggttattttatttatcagttgtattgtaggtactctttttctatgctttcctcggttcacagaacaaaaaaaggttaaatataatgtctaa

SEQ ID NO: 312259 - DNA, 279 bp, Proteus mirabilis
atgagaacttctagagaaatccttttagatatgcctgatgatatgagaaaaagagcggaagaagctctctcatacctagataatatatgtgatgcatatgacagctataaaaaaccacctaccgcaatagttggtttggatagttattctcattgtgatgatgttttatatttgtgtgaaagcgattcaaatgtaacgatagagagtgaagacggttgcgcaatagagagtgattctgaacttgctgaaataaaagagaattacttgatatatagataa

SEQ ID NO: 312260 - DNA, 576 bp, Proteus mirabilis
gtgactgaccaacaatttaagttagctacagagcttgttttgtcagcaacatctgaaacattaactaaattgagtctaaagcttaatttaaattttcttactgacgagcaacggttagctattgaattaacatcaggagtagttctcgattgggagtcgtggtttgttgaatacgaaaaaaaggtagaaaagctattctctattgctattacttccccggggaaaccacctgttgtgataggagcagcagtatactcttatgatattaataatggggttgtttcaatacacatgcttgaacattttgccaatgtaataaaacacactgacttgaatgatagaatgggatttattgccttcacaatggcatgtacatttgcaaaaacagtcgatgcgaaaaagataagaatagcaaacccactaaagtcggtgtatgattattatacacactgggggttttcaatggataataaggacagttgtttctattgtgaacgcgatagtttattagataaactaggcattctcagtagagagtataatggaactcatgattacgaatacattgatgactag

SEQ ID NO: 312261 - DNA, 462 bp, Proteus mirabilis
atgaagcattggaaactttacattgtcattatgatagtggggattgttgctggtggttgcgtgctgattaatgcacaggcgaaaagaattaacgcactgacagaaaacaacaaagaacttacagtcacgctcgaagagcagaaagctatcaatactgactatcaagcacgcatagagcgactaaatcaacttgatacaaggcacacacaggagcttgttaatgcaaagaatgaaattagtcgcttgcgtgatattagtgagcgtaatcctaagcgggtgtatatcaaagccgagtgtccaaagagcatcagtaatcccaccaccagcatggatgatgcaaccaccgccagacctactgacaccgctatcagaaattattggttactcagagagcgaattgcacagacagagcaaatgatattagggttacaagattacattaaaacagagtgtgtgcaatga

SEQ ID NO: 312262 - DNA, 330 bp, Proteus mirabilis
atgagtgatcgttcgcctcctcaggctggtgttggagctgggagcacagtgactacttctttgattggtgtgttcacaagtatgattcctcttctacctgatgatttacaagaatcctcaaggttgataatcccttatatttgtccatttttaggatgggctatgatatggatttacaatagatacgcagttccaccaggaatggcgagtgttgaaggaaagcttaaaagggatatcaaacaacttaaagaatgcttgaacgacagaaacttgtctgatgaagaaaaagcctcatttaaagacgattatattgaaactaaaaaaagctag

SEQ ID NO: 312263 - DNA, 240 bp, Proteus mirabilis
atgacagataaaatcattcatattgttcaagatgctagttggctggtactgactagtatgtgtatgatattaatttatactgttgtcagatgggtattaagcacttattttcctcatagatttgtaatcattaatcatttccataataacaaattggttgttagtcataagattgatttaaaaagttcagagttgcttgttaatcagttgaaaaacaataaagaggtggcaaatgagtga

SEQ ID NO: 312264 - DNA, 888 bp, Proteus mirabilis
atgcaagagagtaatagcatagcttcattggaagttgagcgttttagtgtttcttatgatgcagatgatgatgaactatctattcataaaatggatgcattctatcttgggcaagctattcagcaggttgcaacaatggttaaacaggcaggaaaaatccttaatgaggaagagcctgatgttaaagtgacaactccagcagcagaaggttcttttattgttgaatttgctgtttatgcagttgcacacccaagagaattattaacaactttaggtttttttgggagtggtgctttagctgttgctcatcatattcgtgataaaaaagttataaacattaatacatctgacgataacgatgaggcagtgatcacagttgaatcaagaggccgtactgaagaagttcgttgtaataaaaatgaggctcttttggctacagattctgttattagaaaaagctacaatgaaatcattactcagcctttatctcaaaagaattctcctgtttttaaagtcatagtagatggtagagatacacttcggttagatggaagtgaaaatatagaattcccccctttaccaagaaaatcaatgacatttgaaaatgttgaacatgttgatgcaacagtttccttgactcaagtaaattttacatctgttagtggatggaaaatgatctatcacggagaagaattctctgtaaaaatggaagatgctatatttatggagagggtattgagtaatcagcaatcttttgaaaaaggcgatttatttagtgttaggctaagaataaaaacaatagaaaaaccggactcaagacctagtgttacatatgctatcgagtatgtttatcgccatttagccgatgaaagtaggcgtatacagtag

SEQ ID NO: 312265 - DNA, 696 bp, Proteus mirabilis
atgaatggtcaatataaaatatttaataattgcgatgagtcagtgttgtcttttaatggtttagtcgaatgttacgactacacaggcatgaaggataaatgttcttatacttttatggatgtgaatgaattaaatataaatttaaataaaaatggatactattcacttaagtgtgatttattcgatggtagattggattttgatttttatttaaatgatttttacgtgtgtaatggtaatttagtagttgatgtgaatatttcgtcaggaatgtatgaatttggcgcattatcaacgctagagttctctttaaatgataataaacgaatctggctagatatgagaggatgtgcaaaaaaaaaatatatttcagctagttatttaaagaatggattccaaaaaaaaatcaaaaatgaagtaattgtaattgagggtaaatacatacatgactattactcattttactgtgagttgggctattctattttcggtaactatggctatataggaagcaatttaaatgccgtctatgatatactaaatgatactatagagaaaaaaataaatcttatttggaaagatagctttatttcttttaaggccattgataacactgtacctgaagattattatcaatcctcttcagaggatatattagcattgttaaatgattattttaatatcatactagaataa

SEQ ID NO: 312266 - DNA, 702 bp, Proteus mirabilis; identical to SEQ ID NO: 305899

SEQ ID NO: 312267 - DNA, 1791 bp, Proteus mirabilis
atgggacgtaagggaattgggaagctagctccattcggtattgctcaaaagttaacactttttactataagtcgtgactcaaaattatgttattggtttgaaatagatttacaaggcttactttctgagtccgatgaaaatacagatcaagaattcaaatataaaccgaatattatctgtgatggagtagatattaacgagctacctttagataaagatagtcatgggtatgtaagaaaatttctcggcctaattgataatgatgtaggtggaacattaataataatggataacctttctttgaaaagaaaaatatctgaagaaagaatatcacaagcgatagggcaaaggtttacggtaactttattacgagatgatttttctgtatttattaatggagataaagtaacagaaaaacaagctttaccagatttttcattcagaattcctgattctggatttatagatgaaaccgttaatttaaatggtcatgaacgttctgttaggtattgggttggttttgtagaggaggcagattggcctcaagaccaagctggtgttggtgtttatgcacatggaaagattgcacaagataggccgtttgtatttgggctaaaagggagagaaatatctactcgttatatgtatggtgtaatagaagctgattggttagatgaattaagtgaagatgtagtttctactgacagaacaagtataaattgggaaaatgatgaaactgagccaatgtatgaatggggacgaaatttaatcgctggttggatcaatgagtatagaaagcaccaaaaaaataagaatgaaggaaaggtaataaagaaattaaaagagttaccgcatattccgcaagtaacggaagaagaacgaaatacaatcaaagatatgatatgtagcatgagtcctaaaatatataaagatgagcagctgcaaaatgaagtattgtttcaattaacttcagcatggactcatcgaccgacaaggaacataataaagtctctttgggatagaattaaaagatctgaaggcaatgaacaagaattcatcaatacattgaatgatattcataagcatctagttcccgagtcattatcattatctgttagtgtatcgcaaagaatttacgcattaacgaaattgtatgaattaagcataaatggcaatgaaaatcagcttcaagcattattggaaagttttccatggattcttggatctgataaaggaaaagtatatgcaaatattccattaaaaaaattagcgcgccaagcagctttagatggggttttacctgcacatgctgatactctaaaggagttgtcaaagcaaccaaattcaggaacgaggcccgattttgctttttttagtgatacgaataagtctattataatagtggtcgaattgaagagtccacaattaccattagaaaatgtacatttacttcaattgcttacatattattattggttaactgctaattaccctaacgcgaaggtatcagggtatttgataggtaaaaataatggaaatgctgtacattgtgctgaccctaatataaatgttatgacatgggatcaagtttgtttgcagtcaagaaaagattatttagagctactagctacaatgcttacaggtgtagctgattattctggtgattcacgttttgatgatgtaattgaatttggtggcgatgaaacaaaagagctactaaaacgtatggctgatgctaattctcctctaggtgagttttttgatagcgttgatagtaagttgagcaagtaa

SEQ ID NO: 312268 - DNA, 1071 bp, Proteus mirabilis
atgttgaatacaatagatttgttttctggtgggggcggtttatcagaaggaatgagacaagctggctttagaattttatcagccgtagagcttgaccatatagctgcggagacttttaaaactaatcataaagaatcagttgttattgaaagagatattaggcatgtttcagcatctgaattactgaaacaaagtggaatatccatgggacagttagatcttctggcaggatgcccaccttgccaaggtttttcctccttaactcgcaaatataatagaaatgatgaaagaaatactttaataaaagaagtttctaggttagttaaagacttaaagcccaaagctataatgattgaaaatgttcctggaattatggctaagggaaaagcatatttagcatcatttattgatgaattagtttctatgggctatatcgtcaattatgatgttttgcaagtggctgattatggtgttcctcaaaatcgacgtcgatttgttttattagcgggattaaactttgaaataaaaatacctgttgggactcattctagaaatggtgacaatggtttgccaaaatggattacagtaaaagaagctcttaaaggtgtagaagcaccaatatctctgaaaaatgcatcatcgtttggtggtccacaaaagctaaattggaatgtcataagagatctttctgatttaaatattgagcgtttaaaatatgttaaatcaggtggtcatcgatatgatatacctgatcatttacgaccgaagtgtcaccaaggtaataacactggctttggcaatgtttatgcgagaatgagctgggatgagccttcaccgacaattacaggaggatgtactgtattaagtaaaggtagatatgggcatccttctgaacttcgcacgatttctgttagagaggcggcgagattacaaacatttcctgattcatataagttcgcaacagatcttattgatcaagcctgccaaattataggaaatgcattaccatgtgaatttgctagagttatgagccaagcttgttatgatgcgctttcgaatttagataagtaa

SEQ ID NO: 312269 - DNA, 774 bp, Proteus mirabilis
atggactgcccaaaaactttcaactataaccaatatataacatggcacaaccttgaagttgagcctgggctaaatattataaccgaattaacaaacataattaattcattgaaagcaaatagagatagatttgtaaaactcgcgagactattagatcaacttaataccgttttgttaagagctaaacagactgctgatgtaaacgtttcttcatataagtgtgaaatacttttaaatacccaactatcaacaggaagatacaacgacatattcaagccgattgaatcaataattgataaattatggagaaagaacaaagatgcgtcagaatacgtcacatcaaccaacattaaacacaatataaaagacttagcaagaagttcagtaattttaagcactcacaagtttgcaaatgacttcagcaaggcattaccaaaatggagagaaaagcttcaaatgaatcaaatatcattagatgattacaatgacatatcagaaataaaagtggagcaagaggcaaagatggcgagcggttattttgcgtaccatgcagatattatctacaccgatgattttcatatagagattcaaatctactcccaattaaatgagatatggagaggtctatcacataagttatatgaaaaaactcgccttttgcaggatgtcgaatatgggcatggcactagcgcatctcggcttgtatccttaggtcatttactacatttagcagagtgtgaagcagaacggttacaaatagatctaggacaataa

SEQ ID NO: 312270 - DNA, 327 bp, Proteus mirabilis
atgactgatattggaattaagaacctttgtgaaaaatataatttccctgattatcccaaatgggatgcacttgatgcagtatggtggaaaacatttggtggtagtaattatttaaccaagtataaagatgggtacattatttatcataaagatagaattaaagaaatttctgctgaatacaatatacctccagaattattggctggagtagctaggaatgaagttggtgggatgcctgactttgtaaaacctgatgtggtactcaaaataagatggttggattatagcggtaacgattggattgaccaatggttgctatacatctga

SEQ ID NO: 312271 - DNA, 246 bp, Proteus mirabilis
atggttgctatacatctgagagacttaattgaatttgattatccaggtatagatacttcaaatttaaatgatattcagcttgttattgcaggttctagatataatagaggaacaactagaaagctagatgattttattaaatcctactatgcaaaaaaaggagatccaattagagagtggacatcttacggtaggagaattttagagaatagagatagaattagaaagcttctaggtgcaatataa

SEQ ID NO: 312272 - DNA, 1350 bp, Proteus mirabilis
atggggagtaaatggcaacaaatacctttaggtcaattgatctccttacaaagaggtcatgatctacccacacaaaatagagtcaatggtcaaatacctgtcatgggttcctctggattaactggatggcacaatgtgtcaaaatgtacaggccctggggttgtgattggccgtagtgggaattcaatgggggtagtaagttattctgattcggatttttggcctctgaatacgtgcttatatgtaacagatttcaaagggaatgatgaaaaatatatttattatatgcttcaacagattgattttgataaatttaattcaggtagtgcacaaaaatctctaaatagaaatgcagtttatccatacaatgtgatggcaaccattgatatagaagaacaaaaaagtataggtaagatccttgctaattttgaagacaaaatcaccctcaaccgccaaatcaaccaaaccctagaacaaatggcgcaaaccctatttaaatcatggtttgtagattttgatcctgtggttgataacgcactagatgctggtttttttgagcaggatttaggcttttctgaagaattactgcatcgagttgaagtgcgcaaagcagtgcgtgaaagtgataattttaaaccgttatcagaggatattcggcggttatttcctaatgcgtttgaagaatgtgctgagcctgcattgggacttggggggtgggtgccgaaggcttggaaagtaaaaatgctgggtgagataactgatgaattacgaagaggaatttctccaaaatatattgaggatggtggtgttcaggttattaatcaaaaatgtatccgaaatcatgaaatttcatacgaattaactcgccgacataatcaagagataagatcaatttcaggaagagagcttaatattggagatgttttagtcaattcaactggtgttggaactttaggtcgtatagcacaagtaactagtttgcctgaaactacagtagtagattcgcatgttactgttgtaagagctagtgatgagatgtgtcccattttcactttcggtcaattaatgatctccatggagaaaaatattgagcgattgggggaaggaagcaccggacaaactgaattaagccgtaaaattctctcagagcaattggtaattctaccccctcgaaatatagcagttaaggcagaagtttcatttaaatcattttcagagatgcaaaccgcaaatcgtaatcagaatacggaattaaccaaactccgagacacactcctcccaaaacttatctccggcgagttgtctctgagtgatataaaaatagacattccagaagaaacactcatctaa

SEQ ID NO: 312273 - DNA, 306 bp, Proteus mirabilis
atgtttttttctcgtaaattagaggcctttatggccgtcgttgaaaatggatccttaagtaaagctgctcgtgtgatgaaccgaacgacaccacctgtagcgaaatcaatcaaagattttgaagccgtgctagggaagcgcttgtttaagcgggaaaagtttggtatgagtttaacgcaagaagggttagaactctataatgatttaaaatcactttatctgcaagaaaaagagataacaaaaaaacacacatcgggcgttattaataagttcacatataaatatgatgagattttcgaaagataa

SEQ ID NO: 312274 - DNA, 189 bp, Proteus mirabilis
atggaatcagcaaaaacaatttctatttttccctcaccctcaaaatattctgcttcttcttggatccagcgaatacgtcgtctttcattattgttttgtatatatatccaacgttcagcgagcttatctatagcttcttttaaatgtcgttctgcattgctttttcccatatcaggaaatgctagatag

SEQ ID NO: 312275 - DNA, 258 bp, Proteus mirabilis
atgagaatgtacaaaccacctcacgtaggtgaattaatcactgaaactttgaatgaactgaacctaagcattgatattttagctgaaaagttagaaatgaatgtatttgaaactgaacagctcgttaatggtaatctaatcattacattaccaattgcgaaacgtctatcaatgactctcggtagcagttcatcattttggttaaatattcaaaaaaattattataaacgctcctctattgaaaacgaatttttttga

SEQ ID NO: 312276 - DNA, 456 bp, Proteus mirabilis; identical to SEQ ID NO: 281506

SEQ ID NO: 312277 - DNA, 171 bp, Proteus mirabilis
atgcgatacggaatacgcgctaatttaaaagcgatagccactagcactaaatcaatcccttacgggttgatttggttaaatagtgcgctaaacgtacaagattttccgatctccaaactgacccccaatagtgtaggcttaaattccattgcttttttcttagttggatga

SEQ ID NO: 312278 - DNA, 660 bp, Proteus mirabilis
atggtattctcacaaacttatccaactagagtatataagttggttattttcgattttgatggaaccttagcagattcctttcctttctttgtttcaactataaatcatctagctgacatgcattctttcaagaagatttatttagatgaggttgaatcttttagggaaatatcttcccgagagataatgaaaaatcttgggataccagtatggaaactacctgcgattactcagagttttataaaacttatgaaggtaaattcttcaaagattcctctatttgatcatacagatgaaatgcttgcacaccttaatgaacatggaattacagtaggattagtttcttcaaatggatacgaaaatgtgaccagtgttcttggttcaagctgccgatactttagttactttgaatgcggtgcatctttttttggaaaagcatctaggttaaagcagcttttaaaaaaagcagactttaaaccatcagaaactatctatattggtgatcagattaccgattatgaagcagctagaacggtaggaattgctttcggtgcagttttatggggttacagttcagaaaaacttttaaagaaactgtcacctgatgagatatttgaaaatgtgtctgccataaagaggattactgtcagcaaaaaataa

SEQ ID NO: 312279 - DNA, 1029 bp, Proteus mirabilis
atgttattacaagtcggtgaactggctaagcggacagggttaactattcgcacccttcatcactatgatgatatcggtttacttcagccttcggcccgctccgacgccggttaccgactttacagccgtcaagatattactcgcttataccaaattcaggcattgcgagggcttggaatgacattggcagaaattggcgcggttcttaatagtccaaacttggcactcgccccattaattgatcggcagattcaggcaatcgatcagatgatcattaagcagactcaactgcgctatcgtttgagcagtctcaaaaatcaactgatgaatggtgaagagctggaactggacaattggctaaaaacactggagcttatgtctatgtacgaacaatattttacaaaagaggaacttgcagatctgacttttttacaggcagacagtaaacaacaaaaagaatgggaagcgcttgtcgtcgaagcgaatgcactctttaaggccggagaatcttctagtagtgaaactgcccaaaacctggcttcacgctggatgctgactctcgaacagaatacggctgctaatcctgaatggttggttaaattgaatagcatgcattcagctgaatcggcatttcaggaaaaattgggtgtgcatccggaagtggttgagtttctacttgaagcatttgccgagagtaagctgaacgtttttgcacgttatttatccgagcaggaatttgcttttatgaagcaaaattatgcacgtgagatgaaaaattggccccagttattgatcggattggagaaggccattcatgctgggattgaacctgacagtgaacaagcaaaatgtttagcacagcaatggctctccatgttgcaaggttacgcaggcaaaaatccggcgacacatgcgaagattcgcaatgccatgcaaaatgaaccaagtcttgccgagggaacctggctcaaacctaccactttgcaatttttagaaaaagcagtatcagctttaatgcgttgtgcttag

SEQ ID NO: 312280 - DNA, 429 bp, Proteus mirabilis
atggctttggtatcaatcagtgaagcggcaaggctgacaggaaaagcaagaagcacactacacaagtacataaaacaagggaaactgtctacgactacagatcaaaatacaggaaataaaagcattgaaacatctgagttaattagagtatttggtaaaataagcaattctccaactacagactgtgacggtgtcactaatgtatcaaaactacagcaagaaacacccaacactacacagtcactacagattaaacttcaacttcttgaacaagaaaatgcacacttaaaagctgaaaaagagttactttcaaaaaatttagatgatatacgtcaagctatgctattaatcgaatccaagctgccgacaacacccgaacaagctagacctgtgcccgccaaaaaatcatggcaattctggaaaaaatag

SEQ ID NO: 312281 - DNA, 951 bp, Proteus mirabilis
gtggatgttaatcttgagactgccaaaaatcaaataaataaactcgctgatgcagttaggaatggaagctcaaaagatttggattatttagtaaatatcatgtttcatgatgatataaaaataagcttatatgcaactaatcagctctacttgatttatccaaaattaaataactcgataagagaagatattaaagaattagtcaaattactctatgaaataaaaataaaagaggatcaagagtattttaaagaacgacctttattaagtgcaatggcttgtgaggaagcgattgctagacaaaagggaaaaggggagaatgtttttatctcagcggttgataattatttaaatataaaatgtaatgatagcgtattggccaatagtaatgaaagcgtaagtaataataatcgatatatatcttcatctgaattagagtcttgggcgtcatttcaaccctatcagtgtgatatttgttcctatgaatcaatacttaaaaaaatagaaaatagcaaaggatccgcggagttaaaaaattatgtggttttagtcaataataaccattgggttgcgttattgacttataaagatagctgttttttatgtgattcattgccctcaagcaaaaaagatgaacgtcataacttattaattgaactagaagaaaaaggatttaatactatcaatatagaatataatctacaagaaaatgtacctaatggatgtggtcttttggcgcttaattatattgatagtttacataatgaatggaataaatttaatcatgaaaaagaagatgatttaatatccacaatagaaacagtattacaaaaaacaggaaaagactttctaaacctaagttgtggtgagcaaaccacatttaatcatgatgttaggaaaaaattgcttatggatacacttgttattgatataaaagctattttttattaa

SEQ ID NO: 312282 - DNA, 306 bp, Proteus mirabilis
  misc_feature (291)..(300): n is a, c, g, or t
atgaatattttagctttaaaagaattgcttcgctctgaagtaggaaacttgaaaggttattgtactcaccagaagctacctgacttttgtcgccaattaggattaccgatacctgaggatagtggagataagcgtgaacgattacattctgctttcgactcacttgatgatgcagctctaccgagatttgcagaaaatttattaacacaacaaattttaaattcaggagttcgtaaccaaatccaagatttgttgtgggaggatgaactaaatattgaaatctctaagagnnnnnnnnnngcctga

SEQ ID NO: 312283 - DNA, 1200 bp, Proteus mirabilis
atggttattggtgccgttattggtatccgtttagccaaaaaagttgaaatgacgcaaatgccagagttggtggctattttgcatagttttgtgggtttagcagcggttctggttggttttaatagttatctagatcacaatcctgccattgatcctgtaatggccaacattcatctcacagaagtctttttaggtatctttatcggtgcggttacttttaccggctctattgtcgcttatggcaaactaagtggcaaaatgtcatccaaacctatgatgttgcctaatcgccataaacttaatttagcggctttagttatttcatttttattaatgatctggtttgtcaaaactgacagtgttggtttacaagtctttttaatgattgtgatgacagtcattgcattagcatttggttggcatttagttgcctccattggtggtgcggatatgcctgttgttgtgtcaatgttgaactcttattcgggttgggccgccgccgctgctggttttatgttaagcaacgatttgttaattgtgacaggggcattagtgggttcatcgggcgctattctttcttatatcatgtgtaaagcaatgaaccgctcatttattagcgtgattgccggtggttttggtacagatggtagcagctccagtgacgaaggagagatgggggaatatcgtgaaacaaccgcagaagaagttgctgaactattgaaaaactcaacttcagtgattattacgccgggttatggcttagcagtggcacaagcacaatacccagtacatgatataacagaaaagcttcgtcagcgtggtataaaagtacgctttggtattcacccagttgcgggtcgtctaccggggcatatgaatgtattgttagcagaagcgaaagtaccttacgatattgtcttagaaatggatgaaatcaatgatgattttgctgatacagataccgttttagttattggtgcaaatgatactgttaacccagccgcacaagacgatcctaatagtccaatagcaggtatgccggtattagaggtatggaaagctcaaaacgtgatcgtgtttaaacgctctatgaatactggctatgcgggggtacaaaatccattattctttaaagaaaatacccaaatgttatttggtgatgctaaagccagtgtcgatgcgattttaaaagccttgtga

SEQ ID NO: 312284 - DNA, 369 bp, Proteus mirabilis
atgaaatattatgcagaagtagtttcattaaatccaaatgttgaagaagaagtaacgatttcacttggtgacattacacttacgtgttttatttgtaacctaaataatccaataaagttaaatgaaatttatttagttgagcttgaactcgaaattttcgatgaagtaagagctaagttggccactgatatattaccaaaacaaataggtgattcttttgcatacgaattaaatggttatttgctagaaaataaaattattatatctaatataattcttcaagatgatttattatatgaagtttcattttatgaaaataaatatgtttgtatttatatagatagaattaacatttcatttttcaattaa

SEQ ID NO: 312285 - DNA, 696 bp, Proteus mirabilis; identical to SEQ ID NO: 312265

SEQ ID NO: 312286 - DNA, 150 bp, Proteus mirabilis
gtgaaaaaagcccgttttactgaaaatcaaatcgttaatattttaaaactcgctgattctggtatgaaagtggaagatatttgtcgccaaaatgagatcagcaatgccacttattatatctatggactacctccgttttgcaagtactga

SEQ ID NO: 312287 - DNA, 153 bp, Proteus mirabilis; identical to SEQ ID NO: 305983

SEQ ID NO: 312288 - DNA, 1395 bp, Proteus mirabilis
ttgaataaaaaacttggtttaatgtcactaacagcgttagtgctaagctcaatggttggtgcaggtgtattcagtttgcctcagaatatggctgaggttgcaagccctgcggcactgattatcggttggataataacaggggttggcatcctttttctcgccctatcattgttattgctttctcgcttaagacctgatcttgatggcggtatttttacctatgcgaaagaaggatttggtgaatttattggcttttgttctgcttggggctattgggtctgtgcggtagttgccaatgtctcttatttagtcatcgttttcgctgctgtgagttttttcaccgatagccctaataatattatttttggtgatggtaatacatggcaggcattgctgggtgaatcaatcttactttgggttgtgcactttttagttctacgaggtgtacaaacagccgctagtatcaatttaatggccacgatggcaaaattaataccattggggttatttattattgttgccctacttgcctttaatatggatatttttacccttgatttcgaagggataaaaatgggcgtgcccgtttgggaacaagtaaaaaataccatgttaattactttatgggtatttattggtattgaaggggccgttgtcgtatctgcaagagcaaaaaatagaagagatgttggtttagcgacaatatttgcggttgtgatcgcgctgattatttatattctcgttaccctattatctcaaggattagttagccaaccagagcttgctatgatgaaaaacccatctatggcacctttactggttcaactaattggaaatataggtgagatagttattgccgccggccttattctatcggtatgtggcgcttatttaagctggacaattatggctgctgaagtcccttatattgcagcattacaccactcttttcccaaacaactgagtaaacaaaatcacaatgatgcgccttcctcttccttgtggtttactaatttagctgttcaattatcactagtattaatttggcttactggtagtaattacaataccctactgaccatcgcgtcagaaatgatcctcgttccttatttcctggttggtgctttcttatttaaagttgccatagaacgcagtagccgaggattattactgatagcaatacctgcaagcctctatggtttatggttactttatgcatcaggtgtaattaatttattactttccgtcgttctctatgcacccggtgtattaatatttttatattcacgaaaacaatataaagataaacagtcattaaatactagtgaaaaaatactactgatgatggtattaattggcgcaattcctgcttgtggctatttagtatttaattaa

SEQ ID NO: 312289 - DNA, 207 bp, Proteus mirabilis
atgcctaatattaaacctttttcattattcccaactttatctgacaatctactttcaaaccgttttgatcagatagatcgcctgtttagtcagttaacaggcagtaaaccaatttcatcaccgactcagacttataatctgaaacagattgatgataaccattatgaactaacagtgagtgtgcctggatatcaagaagattattga

SEQ ID NO: 312290 - DNA, 405 bp, Proteus mirabilis
atgttggtacaagaattttctcacgtggtgacggttccgactgatccgcaatcaggccaaccttctggccaacgtgcgcataaaccgtttcgttttaccgtggcattaaacaaagccgttcctctgctgtataacgcactggcttccggcgaaatgttgccaaaagttgagttaaaatggtatcgcacgtctgttgaaggtaaacaagagcacttctttaccaccacactgactgacgcgacgatcgtgaacatcgattgccaaatgcctcattgtcaagatccggctaaagccgacttcacgcaacttatcgaagtctccctctcttaccgcaaaattgactgggagcacactgttgctggaacgtctggtgcggatgactggcgtgcgcctctcgaagcgtaa

SEQ ID NO: 312291 - DNA, 405 bp, Proteus mirabilis
atgttggtacaagaattttctcacgtggtgacggttccgactgatccgcaatcaggccaaccttctggccaacgtgcgcataaaccgtttcgttttaccgtggcattaaacaaagccgttcctctgctgtataacgcactggcttccggcgaaatgctgccaaaagttgagttaaaatggtatcgcacctcggtagaaggtaaacaagagcacttctttaccaccacactgactgacgcgacgatcgtgaacatcgattgccaaatgcctcattgccaagatccggctaaagccgacttcacgcaacttatcgaagtctccctctcttaccgcaaaattgactgggagcacactgttgctggaacgtctggtgcggatgactggcgtgcgcctctcgaagcgtaa

SEQ ID NO: 312292 - DNA, 582 bp, Proteus mirabilis
atgtctagttctcaactgaagaaacaatatattggcgaacatcaattatctccagaaacgttaatgatgagctatggatacgatccattgttatcggaaggctctgtcaaacctcctgtatttttaacatcgacatttatttttaaaagtgcagaagaagggaaaaatttttttgatacggtaagtggaagaaaaccccttccagaaggagaaaaagcaggtttagtctattctcgttttaaccaacctaatagtgagatcgttgaggatagattagcagtttatgaaaacacagcatcatgtgtcctcttttcatcaggaatgtcagctattacaacgacattaatggcttttacacaacctggcgatgttattttacattctcaaccactttatggtggaacagaaacattaatagccaaaacattcgctaagttcggtattcaagcaacaccatttacagatggtttaaatttagcagatatccaatcgcaagctgaaatagctagccaaaaagggagagtcgcggtgatatttgccgaaactcctgccaatccaactaattcactggttgatatttaa

SEQ ID NO: 312293 - DNA, 558 bp, Proteus mirabilis
gtgggtggacattctgatttagtcgccggtgctgcaatgggatcacgcgagcttattaatcaagttcgcctattaagaggtgcaatagggacacaacttgatgcgcattcttgctggatgttaggccgctctttagaaacattgcaaattcgcatggaaaaagccaatcaaaatgcgctattagttgcacaatttctacgtgaccatgaaaaagttaaagtgatccactatttaccttttgtagatgaaaatagtattgaaggtcaagtatttgctagacaatgcacaggcgcgggatcaacattctcctttgatattgttggtggtgaagcagaagcttttcgttttctcaatgcgatgaaaatatttaaattagcggtgagtttgggaggaaccgagtcattggcatgtcatcctggctctaccacacattcaggtgttcctatggaattacgccacaatataggtattcaagaaacaaccattcgtttatctattggtattgaaaatccttatgatcttattgctgatttatctcaagcattagatcatgtttaa

SEQ ID NO: 312294 - DNA, 225 bp, Proteus mirabilis
atgtcttttcctttatatcccaaatctatatgtgtttttttagcttcactagcacaacaaattattttacaagggataaaaaagctaaatttagagcaaatcttagcaattaaaattgttgttttttttgatttcccttttatcaagttcgtttgtcttatattccaatatattttttttacaccagcaagttttgctattattcctccaatcagatctgcatga

SEQ ID NO: 312295 - DNA, 360 bp, Proteus mirabilis
atgaataaatacaccgaactatctgatttcgagattaataaggctgtggctatcaaactaaatctactgccatatatggtggtagtaaatgacaatgaaagtggaaaagtcatttggaatgttgcatcaaattataattacggtggctttattagtaaaaaagggtgggaattcgatccatgcaacaaccctactgacgcaatgccgattattaacgaatatggcattagccttatatatcaagatagaaaattccaatttgcaactaatgacgggaatatagagtgtagtgtcagcaatccattaaaagcagcaatgattattttcatgtgtattaaggatgcggagaatgaaggctga

SEQ ID NO: 312296 - DNA, 294 bp, Proteus mirabilis
atggataaatcaagacagcaatttgaagagtttattaagtttcatcttggcgacaaagtggatgagaatacatttgaaacagcaaataacgggttaaattattcttacccgtacaccgaccttatgtggattacatggcaagcatcacgcgagagtttggaaattgaattgccagataagtatacacttgaatatatgcaagatgatttatcagattctgagtgtgatttctttaaatgtggcgatataaaaaatgaattattgagtaatggagttaaaataaaaaatgaataa

SEQ ID NO: 312297 - DNA, 855 bp, Proteus mirabilis
atggttttatttaatgagaggccatcctttgataaggcatggttcgctacctcattccgcgtagtcatgggtggaatgagtgatgatacagcaatgctcattgctgaaatgtacaagcgaggttacgagcctgacgaaattgtattttgtgataccggctcggagttcgaacacacctaccacttcatcggctggctaagaagttggtgtaatgagaaaaaatggtcaaaagtcgtcgtcctacgcaagtgggacaaagatggaaatccgcttagcgttattgagagcgcagagaaaaacaacactctgccagccgccgcgtttggcagtaaatcatgctcgcttcgctttaaagttgagacggctgataagtatttcaataaccatccaaaatgccataaggcatgggggatcaagggaaaaggagagccacttgattcccatacaggaagtattttacggattattggtattaatgccgatgaaccgcaacgtgcagataaatggaaaccagagcataaatggacgcaagttttccctcttgtagattggaatattggtgaaaaagagtcgctcgcagttgaggaagttggcttgtattatcccggtaaatcttcatgtatttgctgccctcatttgactggctctgagttagtcatgctgcgagatacttacccaagtgattttggtcgaattatagcaatggaaaataactatattcgccacgaactccgacccgattcaacgacaaagggaatgtgtcgcaggaaaacaatcacccaaaaaatcgaagagtatgagcaagaccagctggatattgcagaaggtcaatgccaactatgcttattacagtaa

SEQ ID NO: 312298 - DNA, 450 bp, Proteus mirabilis
atgaacacgctaactaaggtattagctggactactggcaatatctgcattctggctttggtgggtaatagatgattacgacaaattaagcaaagattacaacacagcaaccactcaattatcacaacaagtcgaaatcaacaaagactatcaagcccgtatcactcgactaaaccaactcgatattcgtcactcacaggagttagccagtgcaaagaatgaaatcaacactcttcgtgatgctgttagctctggcaataagcgggtgtacgtcaaagccgagtgtcccaaagtcaaaaccactccctccaccagcttggcttatgcagccaccgcccgacctactgacaccgctctccgaaattattggttactcagagagcgaattgcagagtcagaacagatgattaaagggttgcaggattatatcaaacaagaatgcatggaataa

SEQ ID NO: 312299 - DNA, 1209 bp, Proteus mirabilis
atgtctacaattccaacgcaaaacccagttccaagtgaagcagcgaaagacctgaaatttaactcaggtaaaattgacgagttcgttacgtcaatgaaaaataaatatatcgatagatttgggcaagagcattttacaatcgaagggttgcgatgggttgctcaacaagcaatatctcaattcggctatatcacattagactcattccaaaaaggtgcagaaataacactacctaatcaagttttgcgtgatgaagtaacgggggagtattaccgttgggatggtgaacttccaaagtctgttcctgttaattcaactcctgacagttctggtggcgttggagttggttcatggttgagtgttggcgatgcgacactaagaggcgctctatcacaggctgaaggttacaaattaattggtggcttattcaacttgataaacccatatgatctaaccatagagaatataaacaaaacgccacttgatagcgctatagaattaagaaataaatctaagaagatattaaggtttgctacaaataacttatggacgcattattcaacagaaacatggtttaatggagatttaacttctccaagaaaaaccatgttattaaagaagttatggttaatggtcagcgctgatgtatggggttttcaagaggtattcacaagcccaatcaaagatatttcaatgtttctaattcctccttataacaacgcttttttcacagagaccatatcacccataaaaaacttggggtttagttatggggttggttgtatgacgcgtcttaactgcactcattcaggtggtgtttacttatctccaccatctgatttagatagtgaggttagagggtttaatgtgctttttttggataatgatattttgtttataaacactcacttaagcacagacccatctcgtagtaaacagatgattattgaactcgctgatctggtcactagtttttcaaaaaataaggttgttatcgttggtgattttaatacaagaaatattgatgatttcaagccactagaaaacataggttttgagatagttaataaagatacatggttagatatagataaaatattaattaggaatctaaatattgttaatactggcatgatagatattattggtagtagcgcatggaatcacctatcagaccataatttatattttgtagacgtggaggtttag

SEQ ID NO: 312300 - DNA, 1158 bp, Proteus mirabilis
atgaaagtatctatcgaaaagcgacagccagaccgcgaaggaaaacgctctttgcgcttggtatattactacggttccaacgttgaagacgggcaacgtaaactgaaacgttcacacgagccactagacatcttcatctatgacaaaccgcgctctccagcagagcgagagcacaataaagaagctttaaggatcgctgaagctgtgcgatctaagagactgcttgaaagcgagacatcaaagcataagctggaggatcgaactaaactctctgccagtttcttcgattattacgattcagttaccgatagcaaagcttctggcagtaaatccaattattcaatttgggtctcagccggacatcatctgagacgctaccatgggcgagcagaactcacattcgaagatattgatagagcctttcttgagggttttaaaacttatcttttgaaaagtgcaacgacgaaatctgatcaactgctgtcaagaaatacagtaagcagttacttcaataaaataagggcggccctgaatcaggcataccaagaggggattatcagagataaccctgttcggacggtgaaaagcgttaaaccagaaacaaaccaaagggtttatctgactctggaagagataaaagctatggcaaaagctgaatgtcgctatgacgtgcttaaacgagcctttctgtttagctgcacaacaggactgcgctggtctgacatacagaagctagtttggtcagaagtggaagaatttgagcaaggccattttcgaatcatttttaagcagaaaaaaatccagaatagaggaacggcacttcaatacctcgacttaccagattcagcggtaaggttgatgggagagcgcaaggataacgatgaacgcgtgtttaaagcattgcgatacagcagctataccaacgtagcgctacttcattgggcaatgcttgctggaataaccaagcatgtaactttccatgccggtcgccactcgtttgcagttaaccagcttgcgcggggcttagatatttattcattatcacgcttgctgggccacagtgaactgaaaacaactgagatttatgctgatatcttagatcaaagaagaagggacgcaatgcggagctttcctgatatttttgccgacagtctttaa

SEQ ID NO: 312301 - DNA, 954 bp, Proteus mirabilis
atgaagccatttagccaactacttgctcagtatcagactgatattgaaataaaacataatggtaaatcacaagtcttgagtcgggctgattctgaattaatagatgcttctgtaaggattaattcagatccaccctcacccaatgatttcacttttatgcactcaattatgtgccagatcggtttacctcgttcaagagtaaatggagttgagtttgaaaggcgctgcggtgctgctggtctctacgttcgagcgggtaaaatatgggatggaaaacagtttgttcagcagccggttccctatgggccaatgccccgtttggtaatggcatatctgaacactcaggccttacgctctaagtcaccggagattgatgtcggcagtagcgctagaggcttccttaaacaactgggcaaggattcatcaggagggaaaaacggaagctatacaaacttccgtaaacaggttatggcgttgtctgcttgtagtattacgcttggttttagtactgctgacaaagcgatcacttacgatggtaagccaatccaaaaatttgaggcttggattggtaacaatgataatcaaggtgctttatggcccggtgttattacattttctcaggagtacttcgcgacgttaagcgaacatgcagtgccgcttgatttaagagctttaaatcagcttaatagcagtgcactggcaatggatatttatgccatgcttgcggatcgtttacatcgaattagtggtaggcctgttgtattgtactggcgtaatttacgtgagcagtttggtcaagaatacaccggagacgacgctgacaggaattttaaaaaggtattccttcctgctttaaagagagttctttctgtttacccggatgcaaaagttaagagagtgactggcggaattttgatgatgtccagccccccaccgattccataccgtaattaa

SEQ ID NO: 312302 - DNA, 228 bp, Proteus mirabilis
atgcagcaaactttaaatgaaaaagattacagtcacctgcagatgatctctgtctatgaggtgacagccttacttaaaatatctgtgccaacgcttcagcgaatccgcacaaacgacccctcatttcccaaaccatataagatcagtggcgataaaacattaagatacagattagatcagttggaggtatggcttgattcccgcagggtaagtaatgaagccatttag

SEQ ID NO: 312303 - DNA, 2760 bp, Proteus mirabilis
atgtccactatgccgcccatcatgacgaggtttgttgcctcgctcctatgtttaaccatctcagttcttccgatacattcttatgctggtaatcaggaacctaacatcggagctgttggtcgtgatgccaaacaatttggtttatctattgcgaacggagttaagcaaaactctgctcagattcaagatggtaaaatttctctaccagtcggtaatggtcaatcaacatccataaacataaatgaactgtttcctggagttcaacctggtcaaaataccgcagagtatttccctgatgcagcatctccagaggagctagaacagatatttagtgatgctgatgctatggatcagtttggtaatgaggcaaaagccaatttattccaagacgccaacagctccaatccctcaatatcaggttctgcatatcaagttctcatggatgcggccaatcgctcacgccctgatttcagtaatgacccggtattaaatctaagcaaaaagacctatgaggatatggacctcatcgcaggtggctttggggattgttctgccgaaacaaccattaatcagaatactatcaacgcccacattccagagtatgaacggtgtcagcgtgttgtagatcaaagcgcggactgtgaggttgtccatgactacgacgcctcagttgtgaagcactatgatggtccatataacctcaaatcttgtggagatggctgtactgagttgtggattggccgagtgggtaacgactactggagtggcaactgttcgatttatgaggaatacacgcgggtccaagtcagtaatccagacgccatagtgtctgcaacgcttgagtacgccaagtgggatgactacatgcaagtttgggttggtaaatcaggtcaggaaactaaagtatggtccggccctgacggcaatttccctccagaaacggctggccgatgtgaattgtcaacaagttgggagcgaaaccctaatgttgatgtcactccctatttcaagaatgtgaaagatggtgatgttgttacgtttaagatccgcgtttcagtaactggcgcaggtgagggttttggccgcataaagctacactatgacccatcaaaagccattaccaaggatgagtgggctccacagagctgcatggattcagccaaaggggttgtagatggttttgcggaaggcgagatcacttgtatagatgacccgactgatgctacaggctgcacagtcatcaacgggatcaaagtttgcgaatcccaactgaaaccgtcacctttccctggcattccaaagctgtgcaaaaaggttcgagttaaagccgactatgacttttataaggggcaaatggactgctggacagatcctcaaggtgaaacacactgccctgtaaatactggtggaaatctaaacagttgccagatgtacgaggataatcctcagtgtggatttattagttctgaatgtattgatggagcagagggttcctcgggtaagtgttatgtgtttaaagatacctacgactgcggaacggacatatcaatacctactttagagaaagaaacgacgtatcaatgtggtggacccattaggtgtatgggggatgattgtctcgatataacaaagtcacaaagcactgatttcgctcgtgcatctgcattgttgaatgcagctcagttcatgactcaggatatgagttgtactggtcaaaatgatgatgataaccccactggtgaagaaaatgtgatgtgttcagcttttgccggtgaggctggggaatgcaagattgctgtgggtggtgtctcagattgttgtgaaaagccgacgaatatttcgtttgctgattatctcaatttgattatggccgtgcctaagctagacggtgccgttatgggactctctgatggcagtgccgtgaaaggagcataccaagtattaagagaccccgtaatgtctggctggaccgaaataacacagccttttgcaagttatatagaaaatattagtggagcggttgatagttttctccagcctgttcaacagtttgcccaagatactattggcgcattaaaggagcaaattaccaagctgacttctgaagctctagggaatgcttctgcgacgggggccgcaggcgtacctgccggggctcctgaatcaatgactgaacaaatcctcggccaacaaggtgccgccatgctaagcaccgttatgactgtttacactgtctatgtagtgtcgatggtcatgatccaaatgatttggaagtgtgaggaaaaggaattcactatgaatgctaaacgagcactgaatagctgcacatacgttggatcttactgcaagtccaaagtgctgggagcatgtgtggaggagagagagtcctattgctgtttcaactcgccactatccagaattatccaggagcaagttcggccacaattgggtcttaactttggtgatgtgcgcgcacctcaatgcggcggaattccattggatcgaatagcagatattgattggagtaaggtcaacctagacgaatggttggggatacttcagcaaaatggaaaacttcctgatcccgcatcgttaaacttggatgctttaacgggagctggaagtgattttaatattgatggtactcgacaagacgcctcagaacgtatcatggagcggctgaaagggattaatgtggacaaaattagaaacgacaaagcgcgtgaaatctttcctgacttggatggcaatggtggttga

SEQ ID NO: 312304 - DNA, 534 bp, Proteus mirabilis
atgagtgaatgttttacatctggttcgttatctcgctgggtaaaggcaaggcacatggcattggcgggttatatcacaaagataattatcctagagactggtttgacttataagcaagttcgcaggctgtacgctgagcttgaatattgcagatatgatgtgaaggataagaaatccaggacattccgtggtggagcgacgctgatccacagtcagacatctaaaattcaagcatcgcttttaatgcagctctattcaaatcttggaggggaaaaggttaagcgttctgtagatattagcgctctgaataaagcgtttaggatgtatcacgctatccgtaaagaagtaccaggtatgaagggaggaaaatgggagcccttcgacattacagatgcctggtgtcttgcctctgaactgcgcaatggagaggcaatgatagagcattgcgagcaatgccaatgcactttttttacgtcaattaatcagcgaacatgtgttgaatgcccattctgccgggtctcaaaagctgcctga

SEQ ID NO: 312305 - DNA, 612 bp, Proteus mirabilis
atgtatgccttagagccgttagaacgtgatgttattggtagctttgacaagtttgccgttcaattgagtgaagagaagccagaccaagatatttttgagtttgatttgactctgtggacactactgaagcttttatcagccaatgcgccatcccaggttagcaatcatttttctcttccagaagatcttgttaataaattggcgtcaactcctgacagttatctttcacaattagcgagtggagttcttcttagctttaaacttgaaacagatcaaatggaagtgatcgatactcttgccggtagctacgattctgtcatatgccttaaaaatgttgtggacgactttgacgcagcgtactggctattgcttaataagttagctagtagaaacttggacatggcgatgcaaagttttggtgtatcttctggtcttgcttcctcagtcgccgcctcctcaaacagccagttaaggtcgttatcgcatagggtcgttattagattttcattgagatttgatattggcgtactcgatcaattcttatcagcagctcttgccgatacaacgccgattttattaaaaaagattcagcaatctttggtgtggagataa

SEQ ID NO: 312306 - DNA, 291 bp, Proteus mirabilis; identical to SEQ ID NO: 67542

SEQ ID NO: 312307 - DNA, 255 bp, Proteus mirabilis; identical to SEQ ID NO: 67543

SEQ ID NO: 312308 - DNA, 3405 bp, Proteus mirabilis; identical to SEQ ID NO: 67544

SEQ ID NO: 312309 - DNA, 1293 bp, Proteus mirabilis
atgagagtctctcccccttacattagaacactatctgcctcttgtttaatcatcttctctgtcgtcgccactcatgcctcggctgaagggcttcagtccgagatggatagactattcaacgaaatgagtaatacaaccagaccgggtattcatcagacacaacgccgtggagttattgcgggtgggcgtgtgaccaccaaagcgcgtatttttgatgaaaacctagttagctttgtccctccatcctggaaagctgggtgtggtggcgttgatctattcggtggttctttatcgtttgtgaatgcagatcagattgttcaactgatgcgagctgtggcagcaaatgcaaagggctatgcttttcaactagctctggataatgtttttcctgatggtgccaaatggatagaaaactttcagaagaaagttcaggctttgaaccagcatttaggcaattcttgtcagttagctcagggtattgttaacgattcactaagtgcttttgacacaaaactaaagaacgatactcgtacaaaagcatcgaccaaaggcttatttgaagacatgttttctgcaacgcaggaaacggatggacaaacggcaatcaagacgctgaaagacaactcgcaacaggcctaccaagagatgataggtaatattgtctggaagcaactcaaaaagaatagtgtaagctcatggttcctgtacggggataacagcctgcttgaagccatgatgtctataactggtgccgttgtcattggtgatttaattaatgatccaaatcttgctggagcagacaacagtactaatcccatcgtcaccttaccggggaatcgaattacccttggagatctcatttcaggtggctctgttaaagtttattcatgtgacagtgatacggttaactgtatttctgctggttctgagctgaagagtgttcagctcaggggtattggcaatcaaatgtcagatttacttcttggttctgattcttcacctggattgatttataaatatgcaaacaatgttggggcgttaagttctgccgagatagcttttgtatcaaatctccccagtagctttggctcactcttccgaaatcttgctgctgtttccagtgatacagcagagcagtttgctcagcaagcacagaccatcatagcgctagatataacctacaggtttattgaggagatataccgggcaacaactattgcgttagctaacagtgataatgcctatcaacaaaaagctgttgatgtacttgatgcttctcgggctgttgtctga

SEQ ID NO: 312310 - DNA, 858 bp, Proteus mirabilis; identical to SEQ ID NO: 67546

SEQ ID NO: 312311 - DNA, 396 bp, Proteus mirabilis; identical to SEQ ID NO: 67547

SEQ ID NO: 312312 - DNA, 186 bp, Proteus mirabilis; identical to SEQ ID NO: 67549

SEQ ID NO: 312313 - DNA, 318 bp, Proteus mirabilis; identical to SEQ ID NO: 67550

SEQ ID NO: 312314 - DNA, 462 bp, Proteus mirabilis; identical to SEQ ID NO: 67552

SEQ ID NO: 312315 - DNA, 936 bp, Proteus mirabilis; identical to SEQ ID NO: 67553

SEQ ID NO: 312316 - DNA, 537 bp, Proteus mirabilis; identical to SEQ ID NO: 67554

SEQ ID NO: 312317 - DNA, 1092 bp, Proteus mirabilis; identical to SEQ ID NO: 67555

SEQ ID NO: 312318 - DNA, 1830 bp, Proteus mirabilis; identical to SEQ ID NO: 67556

SEQ ID NO: 312319 - DNA, 588 bp, Proteus mirabilis; identical to SEQ ID NO: 67557

SEQ ID NO: 312320 - DNA, 1035 bp, Proteus mirabilis; identical to SEQ ID NO: 67558

SEQ ID NO: 312321 - DNA, 432 bp, Proteus mirabilis
gtgcttgtttatcaaaaagatcaacctaagaattattattactttagtacgcgtatatttgagtttatgttaggggcttgtgttgcttatttacccgtaaaagtaatcattaatcaaagagttaatagtgttattagtctcatcgccttaggggttatcttttggatagccgttcaaaaagatgtgattgctggttatccgaatttcaatacgttatatgtttgtcttagtgttgcactaattatttatacaggacaacatggcagtattattcaaaaagtgttgtcattaaagccaatagtgatcattggattattatcttattcactttatttatggcactggcccttatttgctattgcgcgttatataggcgtatttaacaccgagatacaaaaagggttatttttgaagaaagcgtttgaactttaa

SEQ ID NO: 312322 - DNA, 435 bp, Proteus mirabilis
atgagtccaaagcagatcttaattaatcgtcgcggtactaccattgcaatagtgatggcaataagtgcccttgcaggtggtgcattagcagcttatttactcggattacccacaaaaatgggattagcgatagcctctggttatggttggtattctttatcggggatcgtattaaccgatgcgtttggcccggtaattggtagtaccgctttctttaatgacttaatgcgtgaattagccgctatcatgctaatccccattattgttaatcgttatagaaatacggcattaggtatttgtggttcaacttctatggactttacgctacctgtattacaacgcagtggaggggttgccatagttcctgctgcaattgtgcatggtttcgtattaagtttggtcacaccaatcttaatggcgttctttacttcatag

SEQ ID NO: 312323 - DNA, 384 bp, Proteus mirabilis
atgagtcttaattttctggattttgaacagccaattgccgagttagaagcgaaaatcgattcgctaaccgcagttagccaacatgatgaaaaaattgatattaatattgatgaagaagttgcacgcttaagagaaaaaagtttagaacttactcgaaaaattttctctgatcttggtgcatggcaagtggcacaacttgctcgtcatccattaagaccttatacccttgattatattaatcgtgtttttactgattttcaggagttggcgggtgatcgcgcttatgctgatgataaagcgattgtcggtggtattgctcgtttagacggtcgtccggtgatgatcatctgtctcttatacacatctccgagcccacgagactaa

SEQ ID NO: 312324 - DNA, 828 bp, Proteus mirabilis
atgaaaatgatttttaatctagatggctcaaaaatacggctctcatctttacagtataaaagtaaattgaagcagatcgagataatgcgcaactggtttttcgataactatgaggatcctgcagattcttgccctcatgaaagccgtgagggtggatattattatgtttatggtggcccatatgatgcaagtgaagaactagaagcggtatttggggaacatgtaaagtttgagtatatccaagaattagtagatgagttacaagagatatgttgggattggtctggccggccagataatattgatgattggtatgatgaagatttgtacaacgcggtaatatcttctaagcatcctttcagtaagtttcttgataatattgagaaaataaaaattctagcagagagcaagcatactaatactcaaaaagaacatctacttggtattttatttaccaacgttattacagccttagaattcaaaggagaatctattggaaaaataagagaggaactaataaaagcaataaaagagcatttaattagtacaagttggcataatacaaacatagttgttaaacgatataaggcaacgtttggtattaatatccagagagattggccaatagagaatattgaaatagcaacgataacacgtaaccatttagtacatcgtggcggtaaggataaagatggtaacctggtagaggttacgaagcaaaatttagataatttgataaacgatgctgtatcaataggtgaaaaattaaacgatagcctcaaagatgcattgcaaaagaaaactagcctaaccgaatacgaattttga

SEQ ID NO: 312325 - DNA, 531 bp, Proteus mirabilis
  misc_feature (6)..(15): n is a, c, g, or t
atgatnnnnnnnnnnatatgcaattcttctattgatgatcttatcaatcataagttagatttggcgatacgccttggcgcattaaaagacagtaattatcgctatcgcaaattagcagattacacaatcaaattagtggtatcaccacatttattgaaaaaatatcctatccaagaaattgcagatttagcggcagttccctatcttgcaaacagcaatttacgccatagcaaactcagccaacaagaaaaaatcaatcaactattttcacaattgcactcaatggcacttttcgaaacgaatactattagtgcattaaaacagatggcactcaaacaaatgggaatgactatattaccagagtggtacattcaacaagaaataacacagggtgaacttgttagccctattcctgaacttaccttattaaatcaatctattaatgtcatttttccacatggtgaacatatgccaagaaaaacccgtctatttattgattttttaaaagagagaattaattctatgccctaa

SEQ ID NO: 312326 - DNA, 3276 bp, Proteus mirabilis
atgatgtggcgcatttgttatcaatatcgccaatatctccttgctcttggtttgctggcaggcatattgcctgtcacgcaagccgcagatgatccgactgaaacttttttatatgagcaagttagactaggcaactcgaaaagtaacgatgttttagtttctcaatcactgtatcgtttatcacttataaaaccgaacgatcctagtgtgttgttaatacgtatccaatttgctgtaaaacaaaaagaaacagcaaaagcacaacaactggttgagcaattacgtatgcatggcgaaaatactgaacaatatcaacgtgcgattaagctactatcattaacccatgaagataaccgccaaatcctacaaaaagcctacctttatcagactgcggggcgttatgatgaagccttgcaattatatgatgatatttaccaaggcacgccccccgatgaagggttagcccttgagtatctcaatgtattaattgctgcaaaccatgcaaacaaaatggcacgtattaagcagatttatcacacttaccccaataaccaacagatagctaatatctatcagcaatatcatcttaccccagcattatctactccctcagcagcctctgcttccaataacacattatctattcgcgcattaaaacagcagttacgccagcagcctgataatgcagacataataggaacattaggcgtgcgctattcgcgcgcaaatcaacgggcactcgcgatttattatctttctcaagcactcacattggctcccaaacacaacgatagtgatttgtggcgtacgctgttgcaatcaaatcaatattggcatttacttgccaaggctgatgaagcgttattaaatcaagagtactctaccgctaagcgctattttacccaagtacgtcaactcagcccctataaaagtgaagcttatattggtttaggggatatcgagttagcgcaacatcaattagagcaagctgaacgttattatcaacaagcgctacaatatcagcctaatgatgcggcgactttgcatagcctgaccaggctctatcgtcaacaatcgcatcaaaaagccgcccaatttatggctaacttaacatcacagcaatacaaaaatttagcccaagactatgggtatatcatttcaggtatacaacaagacttagctgctgatgatgaacagcaacaacactatctcagtgcgattgagaaacgtaaggctatcgctaaagcgtatcccgatgaagtctggaatatttatcgtctggcggatgatttacttatcactcaacaaccccaacttgctgaggattactttaatcaacttaatcaacgacgacctaatgatccctctcgacgatatgcctatgcgttatatctcaataaaacagggcgagcacaacaagcacttaacaccttaaagacgatccctttatcgcagcgcagtgaaagtatgaacgccttagatagccaattacgttttggtcaaattatggcgcatgcacaatcactaagagaacataaccaacaacagcaagctgtcgaatatcttttcacccatattcctcctgagcaaaaaatagaaagctatctgttgttagcgcaatgggccgaagaagatgaccaactcaatcaagcattaaattattatcatacagtattaaatttagcgcctaataatgaaacagcactattaggtgcaacagagatatctttagcgcaacatcaaatagatcaagctcgttattacttagctcagatagaacaattatctcctgaaaaatttaaccactattcactaagacgtttagcaaacgctgaaaaaacggcgggaaatattgataaagccaaacactattttatctatttagctcgccaagttgacaaggagccagatagtgctgatggattaattttacgtgatattggtcgtttttatcgtgatagccaacaagttcaatccgctcatcactattatcaacaagcgatgctaaaagagggtatcacgcatacactgccaacaaacaatattgaatacaccacacttatgcgtaacaacccaaatgataattggctatcacgtagtgtacgtgatgatgcaagtaccctttatcgtcaacaagagtggcgttttgccctagagcatgattattggggatcaaatggcagtgagggatactctaaattacgcgctcataccaccatgttacaactggatcatcctatttatcatggccgtttcttttggcgtactgattttgtgcacttaaatagtggcacattaggtacagcgccatacgatgctaaatttggtaattgttatcgcataggttgtttccctctaaagcaaaaagcctttggtgttagtcctgctatcggttgggaaaatgagcaatggcaatgggatttaggtaccacgccactcggttttaatgtgactgattgggtaggtaaaattgcttataacgatagtttttatcatctcggttggagtgtagatcttcaccgtcgcccggtaaatagctcactacttgcctttgctggccaacgtgatagttggaccaatcaaatttgggggggcgttagaaaaacggggcttcgtttaagtggcagttatgatctgggaggcaaggatgggtattggggagaaatatcgcttgatagattaacaggaaaaaatgttaaaaataacagcagtgtaaaagccatgggtggttattactataagttaatcaatgaaaatgatcgccgcatttctgttggcttaaatagcatgctttggcattacaataaagatcttagtggctacaccttggggcaagggggttattatagcccacaacaatatctctcattctcactgcccgttaattaccgtcaacgtactgaaaattggtcatgggaagtatctggctctctctcttggtcttattcaaaaaccgatgatagcagacgttatccattacaaaatctcgtttcaagcgataaatttaattctgctcccataaaagaaatatttaagcatgagagaaatatcattgataagggggattcgggtcatggttttggttatacagcaagagcattaattgaacatcgaataacaccacattggtttataggtgccgctatcgatattcagcaagcgaaaaactatacgccaagccatgcactaatgtatttacgctattcatttgatggatggaatggtgatttagatcttccgcctaacccgcttattccttacgcagattttaaataa

SEQ ID NO: 312327 - DNA, 1116 bp, Proteus mirabilis
  misc_feature (1071)..(1080): n is a, c, g, or t
atgatgtctttcttattgatcttgaatagtctttttattatttactcgatattactttctcgtggtgtttatcttgattgggaaatacacggttttgctgactggctaaaatcgttaggtatattgaaattacttgatattcctaaagtgatgttagcgagtgcacttattttgctctctttctttatgtatatgggggcgcggattgcgtggtgcgtttcattaatattattagtgacgatcgtttttttagatgtcgcggtttatcaccaagctggtactcaagcctatacttcattagcattagccattgtattggttatcagccggcgtgcttttcctcatcatagcttaaccagtgccggttttgttgcttttatctgtacgatttcgctactgtgtttctctatgttaggcagcctctatattggtgatgaatttaaaccacatatcacaacgttaatggatgctttctacttttccattgtctgtatgacaacacttggttttggcgatatcgttcctatctcaagtaatgcgagaatgtttaccctaacagtggttattttggggatcactgtttttacgacttctattgtttatgtgatgggatttttggctcgtggtactcgcgatattgtgaagaaaaggatcgctaaaatgcatgatcattttattattattggctcttcaatgttggcagcacaattagagaaagggcttagagagcaaggtaaaccggttattgcgatttgttcggataaaaagcaagccatgtatgataaagaagccaatattattgaaggtgatccaaccaatgtaaaaacattacaaacggcaaatattcgccaagcgagttgggtggcgacgttatctgaaagtgatgcggaaaatacctttattttattaactattcaagagtgtccagaccttcaagcgaaattaatcactatcattaataaagatgagaatagagaaaaaataagtcgattacgtccagatatgctgttgtctttagcttcgttaggcaaagaaattatgatgaaagtcctttgtggtgaatctattaannnnnnnnnngttactgatttattaatcaataaatatttaaaataa

SEQ ID NO: 312328 - DNA, 4458 bp, Proteus mirabilis
atgctctatcaaaaaacagcggaaaaagagaattgtggttttgggttaatagcccatattgaggggaaagccagccataaaattgtcagaaatgcgatccatggccttgcccgtatgcaacatcgtggcgcgatcctttctgatggaaaaaccggcgatggttgtgggttattattacaaaaaccaacgcgtttttttcagttaattgccgaggaaaatggctggcatttagcgaacaattacgcagtaggcatgctgtttctaagccaagataatgctatcgctgcacagtgccgtcaaattgttgaagaagaattgcaacgagaaacactctctatcgttggctggcgtaaagtaccaactaacacagatattttaggcagtatcgccctctcttctttaccgtcaatagaacaaatttttgtcaatgcacctgccggatggcgtattaatgatattgagcgccgcttatttgtcgctcgtcgccgaattgaaaaacgtattaccgataatgatttttatatttgtagcctctctaatttagtgactgtctataaagggctgtgcatggcaattgatttgcctcgcttttttactgacttagcggatttacggatggaatcgtccatctgtctttttcatcaacgtttttccaccaataccaccccaaaatggccgcttgcgcaaccttttcgctatcttgcccataatggtgaaatcaataccattaccggaaatcgtcaatgggcaagagcaagagcctataaatttcatacgccgctgatccccgatttacaaactgcggcgccttttgtaaatgagagtggctcagactcaagctcactggataatatgctcgaactctttcttaatggggggatggatattgtccgcgctatgcgcctattagtgccgcccgcatggcaaaataatccacaaatggatgatgatctacgtgctttttttgattttaactctatgcatatggagccttgggatggacctgcggggatcgtgttatctgacggtcgctatgcagcctgtacactagatagaaatgggctacgtccagctcgctatgttatcacgaccgataatattattacctgtgcttctgaaattggcatttgggattatcaacctgatgaagttctagaaaaagggcgtgtcggccctggcgaactaatggtaatagatacttatcaaggtcgcattttacattctgctgaaactgacgaagatttaaaaaggcgacacccgtataaactttggttagaacgtaacgttaaacgtctgatcccttttgagcaattgcctgagccacaagcgacaggtgagcgcgcttttgatgatagcttactggcgacataccaaaaacagttcgcttatagccaagaagagctggaaacgattttgcatgtactggctgaaaatgggcaggaagccaccggctcgatgggagatgacacgccttttgccgtactttctcagcgcccacgcttaatttatgactattttagacaaaaatttgcgcaagtgaccaatccgccgattgatccattaagagaagcgcatgtgatgtctttagcaacctgtattggtcgcgaaatgaatgtctttagtgaagcggaaggacaagcccatcgcctcagttttaaatcacccattttgctttatagtgattttcaacaattactcaatcaagaaagcccttattattcatccatcacgctagatatcacctatcaaccgactgaaaataatttagaaaccgcactacacatcttatgtgaaacggcgcaacaagcggttaatagtggtgcagtattactggttttatccgacagaaatatcactcaagcgcgattacctattcctgcgcctatggcagtaggcgcggtacaaaaagccttggtagataataatttacgctgtgatgccaatattattgttgaaactgcaagcgcccgtgatccccaccacttcgctgtactattaggttttggcgcaaccgctatttacccttacctggcttatgaatccttagcgcaacgagtcgataaaaaaatattgtcgggtacttatgcgcaagtcatgctcaattatcgtaatgggatcaacaaaggtctgtataagataatgtccaaaatggggatctccaccgttgcctcttaccgttgctcacagctatttgaagccgtagggttgcatgataatgtcgttaaacgttgcttcgatggggttgataatcgtattaacggtgcagattttagcgattttgaacaagacttatttaatctatccaaacgtgcttggctaactcgctatcctctagacgctggtgggttattaaaatatacccatcaaggagaatatcacgcctataatcctgatgtggttcaagcgttgcaaaaagcggtaaatagtggtgactatgctgattaccaacattattcccaattagtgcaacaacgccctattaccaccttacgtgatctattagctctcaatgacacaacccctattgcaattgaagatgtcgaagcagaaagtgaactgtttaaacgctttgatactgcggcgatgtcaattggtgcattaagtaaagaagcccatgaagcccttgcgcaagcaatgaataccttaggcggattttcaaactctggagaaggtggtgaagatccggcacgctacaacaccaacaaagtttcgcgtatcaaacagatagcttcaggtcgtttcggtgtcacgccgtcttatctaatgagtgccgatgtattacaaatcaaagtggcacaaggggcaaaacccggtgaaggtggccagttacccggtgataaagtcacgccttatattgcgcaactgcgttatgccgtaccgggagtcacactgatttccccgcctccccatcatgatatctactctattgaagatttagcacaactgattttcgatttaaaacagattaatccccgtgcgcttatttctgtcaaactggtctctgagccgggcgttggtacaatcgccaccggagtcgctaaagcttatgcagacttaattactattgcaggttatgacggcggtactggtgccagcccattaacgtcagttaaatatgcaggtagcccttgggaattagggctagtagaagcgcaacaagcattagttgccaacaatctgcgtcataaagtgcgcttacaagttgatggtggattaaaaacgggggttgatattataaaagcggccattttaggggctgaaagttttggtttcggtaccgggccaatggtggcgttaggctgtaaatatctgcgaatttgccatttaaataattgcgctatgggggttgcgacccaagatgaaaccctacgccgccaacattttcatggtttacctgagcgcgttatcaactatttccgttttattgcccaagaaacccgtgaacttatggcacaacttggcgtaaggaaaataaccgatttaatcggcagaacggatttgctttcttgcttagagggaataaccagtaagcagcaaaaattatcgctcacaggattattagaaactgcgacctctcctacaggtaaagcgctctattgtcaggagcacaatgatacttatgataaaggagaattaaatcaacgtattgttgcgcaaaccatcacaggcgtcgaacaaaagataagccaaacccactatttcgccattcgtaacacagaccgttcagtgggagccacgttatccgggctcattgccaaaacctatggtgaaagtggtttatctgctacaccaataaaacttcactttacgggtactgctggtcaaagttttggcgtttggaatgtgcaaggggtggaattaaccttagtgggtgatgccaatgattatgtcgggaaaggcatggcgggtggacgcattgttatttcaccgccagtcggttctgcctttaaagcccatcagaccacgattatgggaaatacctgtttatatggcgcaacaggtggaaaactctatgcatctggattagcgggtgaacgttttgcagtcagaaactctggcgccattgcggtgattgaaggggttggggataatggctgcgaatatatgaccggcggtattgtctgtattcttggtaaaacagggattaactttggtgcagggatgacggggggctttgcctatctgttagatgaagataccacactatcacaacggatcaataacgcctctattgagcttcttcccgtggctaattatgcgattttggcagagcatcttcgcggtatgatcgcagagcatgtacggctaactggctcccaacaaggagaaagactactttctcaatgggaatattggtcacaacactttaaattagtcaaacctaaatcgagtgatgttcatgccttattaggtcatcctcgccgttcagtcgctgaattacgcgttcaggcacaatag

SEQ ID NO: 312329 - DNA, 1479 bp, Proteus mirabilis
atgtcactaaatgcagaagctcaagagcaacaagcccccgcatctacaggctctttacttgatgaaattatggctcaatcacgtatgtctccagaaacagaagcatacgatattgccaaacaaggtgttgctgcttttattagtaatattttcgccagtgaatctgaagaccaacagatcaatcgattattaatcgataaaatgcttgttgaacttgataataaactaagtactcaagttgacgaaattcttcacgcgcctaaatttcaagaaattgaagcttcatggcgttctttaaaattactcgttgatcgcactgattttagagaaaatattaagatcaatattcttcatgcaactaaagaagagttattagaagattttgaattttctccagaaattgttcaatcaggcttctatcaacacgtctactcttcaggatacggccaatttggtggtgaacctgttgcaacagttattggtaactacgcctttaacaatactgcgccagatatgaagttaatgcagtatgttagtactgttggtgcaatggctcacgcgccattcctatcatctgtttcacctaatttctttggtattaatagctacgctgaactgccggcaattaaagatctaaaatctgtttttgaaggccctgcacacactaaatggcgctcactgcgtgaagcagaagattcccgttatttaggattaacagcaccgcgtttcttattacgtttgccatactctccaacagaaaaccctgtaaaaatgtttaactattcagaaaatgttaaacaagaccatgagcactatttatggggtaataccgcattcttattagcaagctgtattaatgatagttttgcaaaatatcgttggtgtccaaacattattggcccacaaagtggcggtacagttaatgatcttcctgtgcatatttttgaagcgatgggtgaattacaaactaagatcccaactgaagttttagttaccgatcgtagagaatttgaactagcagaagaaggctttatcacgctgaccatgcgtaaaggcagtgataatgctgcattcttctcagcaaactcggttcaaaaaccaaaagtcttcccaaatactcctgaaggcaaattggcagagactaactataagttaggaactcaattgccatacatgtttattatcaatcgcttagctcattatataaaagtattgcaacgtgaacagattggctcatggaaagagcgtcaagatctggagcgtgaactcaatatttggcttaagcaatatgtcgcagatcaagaaaacccaccagcagatgttcgtagtaaacgtccattgcgttcagctgaaatcaaagtacttgatgttgatggcgatccaggttggtaccaagtcgctattcaagttcgcccacattttaaatatatgggtgcaaactttgaattatcacttgttggtcgtcttgataaagagtaa

SEQ ID NO: 312330 - DNA, 270 bp, Proteus mirabilis
  misc_feature (185)..(194): n is a, c, g, or t
atgaaactaaaaagaatggtgttgtttatgttttccccttgttttttagctgtgagcgctgctaatgctgggaattgggaaaatacaattaaagaaagctcatttatttctgattctgaacttgagctgactaccattaatatgtggaaatacctaaaaacagaaaaccgttttgataaacaagnnnnnnnnnngagcaacgttatagaaaacaagttgctaatgcttggggtcaaaacttccaagctgatttcagatctggctatttag

SEQ ID NO: 312331 - DNA, 417 bp, Proteus mirabilis
atgttaatggcggtgtatatcatgatcccgatggtgctgatgttttcggcgtatgaatttaagacggcgataacggtgacgtttgtgatatttgcgctgaactttctgacattctggtgggagctggcacgctggatagacagctggatgatggaggcactgtataattccgatacgcacagtcagtggaatatgaacgggcttcagaacacgtctgatgatgtcattatgaacctggtaatgggaacgatgtttttggtgttgccggcgttgtggttgacagcatttggttgggctggagctaaagttgggtccgagctaggtaatatgacatctaacgcgacttcacctgcgcatagtgcgggggggaaaggaggacagttagcagaacaagctatttctaaaaaagttaactaa

SEQ ID NO: 312332 - DNA, 213 bp, Proteus mirabilis
atgttggaaaactttctcgaacgacttcctagtattgtatctagtgaagcattcattgcagaaatgaaacgtttcttaccaacagatgtatttgatagaaccctcgctcaggataagtttcaagtttacctgcaaaatactttggcgaaactatttaaaactgtgagtaacgaattactaggcaaggtcactaatagtgaatttagaatgtaa

SEQ ID NO: 312333 - DNA, 270 bp, Proteus mirabilis
atgaaaaataccattgtaaaagatctgaaaacactggaagagatttatggtcaacctgccgaaccatcggtcttaaaagaagtggattttattcaccccctttatcgcccttatattgaagctacaccatttgttgcattagccacttatagtgctgatggtatggatgtttctcctcgtggcgatgagacagtattgaagacgatcatactttattattacccgatagacgtggtaataaccgcattgatagcatgcgcaatttattaa

SEQ ID NO: 312334 - DNA, 213 bp, Proteus mirabilis; identical to SEQ ID NO: 297970

SEQ ID NO: 312335 - DNA, 132 bp, Proteus mirabilis
atgacggtgagtctatatcgctttcttggttggcaagttagtggtgaaattcctgagtttgctcaagcagttgatggtaagtttgaggctacaaccattatgtttaaacttaagcctgagagtaatagttaa

SEQ ID NO: 312336 - DNA, 357 bp, Proteus mirabilis
atgatgatttattgttatgatgacaaaataagtgaaattaaaatagaacaactcaccaaattgttatatagatgtgtccttggtggggcaagtgttgggtatactgacgcagaaactcaaatagatgatatgagaaattattggcttagtgttaatcactcattatcaacaaatacgtttaaattaattactgcagtgattgacggacaaatagtcggtgttgttggtcttgaattatgcactaaaccaaatggcaaacatcgtggggagatttgcaaactattagtatcccctgatcataggcataaaggaatagcacagcaattgatgcaaaaggctgaacaaatagcatggtag

SEQ ID NO: 312337 - DNA, 396 bp, Proteus mirabilis
atgaacaataacccagctatcttaagtgctgttcttgaccttgaaatcgaaggtattgtattaaaacaaggtgcgcctgctgatctacctaaagcacttgcagcattgcaaaaaggcaagaaatttatgcctgaaagcgtggctaaactgttagaaaaagtgaatgccaatggttatggtgataaacgcttatctcccaaagaaagtgaagtgttgcgcttatttgccgaaggtttccttgtcactgagattgctaaaaaactcaatcgtagtatcaagactatcagtagtcagaaaaaatcagccatgatgaagctcggtgtcgacaatgatatcgctctgcttaactacctatcatcagtcactattgataaggaaattaacggagaaagctaa

SEQ ID NO: 312338 - DNA, 426 bp, Proteus mirabilis; identical to SEQ ID NO: 300345

SEQ ID NO: 312339 - DNA, 522 bp, Proteus mirabilis
atggaaatggcacaacgttttaaattacctattatcacttttattgatactccgggagcttatccgggggtgggcgctgaagagcgtggacaatcagaagcgattgctcgtaatttaagagaaatgtctcgctttggtgtgccaattatttgtaccgttattggcgaaggtggctctggtggtgctttggcgattggtgtgggtgataaagtgaatatgttgcagtacagcacctattccgttatttcgccagaaggttgtgcttctattctatggaagagtgctgataaagcaccattagctgctgaagctatggggatcacggcaaatcgtttaaaagaattaaaattgattgatacggtgatccctgaacctttaggtggtgctcatcgtcattatgatgaaatggcagcatcactaaaagcacagctaaaagctgatttagcgcagttagatgagtttgatacagaagaactcactaaccgccgttatcaacgcttaatggaatatggctattgctga

SEQ ID NO: 312340 - DNA, 174 bp, Proteus mirabilis
atggatgcgggtagtaaagcagttaaatggaatactgcaactacaccagtacaattaattaacggtgtatcaaaaatcccattcgttgcttatgttcaagctgaatcagctgacgctaaagtaacgccaggtgaattccaagccgttatcaacttccaagttgattatcagtaa

SEQ ID NO: 312341 - DNA, 3549 bp, Proteus mirabilis
atgaaattaccggttttctccatttcaaacattacgagttcggtaaaaaaactcttttttgctgataaatctaaaattgcctcctttttgctatttttattggcattacttcccgctttgctcattatttggatctggtggtgggggccaacatttcgttatcaagattccataccgtttagcgaggtcaccacacgttggttagcaaccgtcgttattgtattgcttgttgtgagttggattggtctagcaacatggcgtcgagttaaaaaattggaagcattaaaacttgatgtcgaattggctgtagttgatccggtaagacaagatcttgattttcaaaaacgttatttaaactattggaaatcacaatttattcgccacttaaatggtcatactaaagcggtttatttacgcccttggtattttgttttaggtgctaaccaaagtggaaagcatagcttattaaaaaatacggtaaacccattagatattgcgcctagcgacaatattgttaacgaacaaaatattgcattaaatattcaatgtctattaaccgacaatgctgtactttttgtccctaatggtgatctattaacccagccggcaaatcaggctgataaacctcaactttatcaccgtttgtggggcgatttactcaattggatcaaaactaatcgcccaagacaaccaatgaatggcatcgtcttaactgtcgataccctatcgttattaaccaatagtaaggagcaaaatagtcagctacttgctgatttacaaatgcgtattgaagaaatacgcatgacatttaatagtcgcttgcctttatatatcgtcttaaccaagctagatctattacgtggttttgactcaatgtatcaatcattagatgttcaacaacgtaatgaagtactaggtgtttctttcaaccagaaagcaaaaagtaattggaaaaaggaattaaatcatttttggtcacaatgggtaggccaaatgaacagcgcattaccagaaatgatgctacaaagagcagaaggtaaccagcgtagtgatctatttagtttcgtgcgccaaattgaagggttacaacattctgtatgcacattaattgatgcattgctcatcaataatgagcaacataatatctgtttaagaggggtttatttaacttctgcattgcaaatcggtcaaatcgatgatgtgtttagccaaacagcgtccgaacaatatcatttaccgacagcacctcttactacatggccaattaatgatagccacccttattttactacccaattatttagtcaagtgctatttagtgagcctaatattgcagcagaaaaccattattgggttaaaaaacatcggactcgcctattagtcaccactgctgttagctttgtcggcttaatcgcaatttggaatggttggagccactattacgacaaaaactatcgtgctggagaaaacgttcttaatgaggtaaaagcattccgtgctattgagaacaatgttcagaaagatactgatggtagcctacaattaccggtgctcaatccattacgtgaagcaaccttagcttatggtaatcatcgtgataaaaatgtgctcttttctgatatgggtctttaccaaggtcaaaaagttggcccacaagttgaacaagtctatttacaactactcaccgatcgttttttacctgcggttatgtctgggttgttaaatgaacttaacagtgccgacaaaggaagtgaagataagttagagatattgcgtattatgcgcatgttagaagataaaagtggccgtaataatggcatggtagaagattttatggccgattattggagccaactgttcactggtcaacgtgaaaaacaactgcaactaaaagcccatttgcgctatgcccttgagcacacagattggaaacaagagcgtgaaaaaggatttgtttcagccactaaagcctttatgccttttgctggacctataaaaaatgcacaagcagagttaagtgtattgtcactttatcagcgtgtatatcaagccttacgcttaaaggctaatcaagagctttcagcgcctttaaatttacaacatcaaattggcccaagttttaatacggtctttacggctattgatgatgataaattagaaattccacaattcttaacgcgctcagggttattaaactattttatccgccaaaatgataaattggtcgagctaacattacttgatgcttgggttcttaatctaaccaccaacacacaatatagtgaaagtgatcgtaaagaaattcagcgtcaaatcagtgaacaatatcttagtgactatacggctcaatggcgtaatgccatgagcaatttagaaattcgtcaatttgattcaatacaagatgaaattaccgctcttgagcaaattattagtggtgaacaaccattacgccgagcattacaagttctacgtgataacacggttattccaactattgatgaaaatttaccacttgatgaacaaaaaacactgatggctgagccatcttaccgtttattaacccgcttagatcgcgaatttactcctcaaactgagatattagtcagtaaccaaggggaaaatttacagaatctgaatcaaaaactaaatgacttacatcgttacctattggggatccaaaactctccagtgccggggaaagcggcgcttaaagcagtttcgatgcgcttaaacgataataatcgcgacgctatttttgagctatcacaaatggcgaaaacattaccagagccgcttaaccgctgggtcgatgagttatcagtgcaagcatggaatgtggtccaaaaagaagctattcgttatatggaagtagaatggaatgaaaatgttgtcaaacaatacaatacttatattgccggtcgctatccatttaacccagcagctaaacaagatgttcctttaagtgaatttgaacgtttcttcaaaccaaatggaacattagatagcttctatcaacaaaatctgcgtttattcgttgagaataacttagttaacgatagtgatagccaatcattgatccgcgctgatgtattagcacaaattgaaatagccaatcgtattagagaaaccttctttaatgcccaaggtaatttagaagcacaatatgctattgagccactgtcattaagtggtaataagcgtcgtagcatcttaaatcttgatggacaattgattgattacgctcatagtcgcagccatgtgacacacttggtatggccaaactcaatgcgttccaatattgaaagtaaactgactttagtgcctctttccggtgataaatcgccacgttcaatcagtttctctgggccatgggcacaaatgcgattagttgataatgcaaaactcatcaatatcaaatctaactcattcgatattcgcttcacaatcgacggtggtgatatgacttatcgagttatagttgatgaatctaataatcctttcttcggtggattattcacaaaattccgtttacctgaaacgctttattaa

SEQ ID NO: 312342 - DNA, 927 bp, Proteus mirabilis
atgatcatcgaagattcggtgctcacgcagcaagccattttacagcaacaccttaatgcgactgcaaatgaatctgcaagaattgcttatttaggccctaaaggttcttattctcatattgccgctcgccaatatgcagcccgccattttgatacttttgttgattgcacttgccataaatttgaagatatttttacactggtagaaacaggacaagcggattacggtttactacctattgaaaacaccagctctggtgcaattaatgatgtttatgatttactacaaaccacctcgctgtcgattgttggcgaaattcgtattccgataaaccatgctttattaacagcagttaagagtagcctagaagaattacacactatttatagccatccacaaccattccaacagtgcagtcactatttaaatcaataccctcactggaaaattgaatattgtgaaagcacagctgcggcaatggaaaaagttgcattagcacaatctccccatgtagccgctattggcagtgaagctggcggatcgctttataatttaacaccacttgctagtaatttagctaatcaacaaattaatgttactcgttttattgtgattgcccgtaaacctattgatgtatcagaacaagtacctgcaaaaaccacctttttaatggcaacggggcaacaagcaggggcattagttgatgctttaattaccttaaaacaatacagcattattatgactaaattagagtctcgcccaataaatggtacaccttgggaagagatgttttatattgatgtacaagctaatttacgggatatcaatatgcaaaaagcattacatgacttatcaaaaacatctcgttcactcaaagtattaggatgctatccttcagaaaatattgtacccgttgaaatacaatag

SEQ ID NO: 312343 - DNA, 480 bp, Proteus mirabilis
atgccaaatggtgttatccgcatgagtgatgatgtggaaggtgtggttgaaacctcattaaacgtcggtgtagtgagtattgttgacgataaagtagaaatcctatgtttaattcgctctctgattgatagtggtaaaacttatgttgttagcatgctgacagcattagccaaacttgctcaagcagatatcgaaaccaaaggtggttatcctggctggaaacctgatgcggattcaccggttatgcacttagtacgtgacacttatcaacaactatttgataaagtgccaaatatcatggtgatccatgcaggtcttgagtgcggtctatttaaaaaaccttatccagatatggatatggtctctattgggccaactattcgcggtgcacactcaccggatgagcgagtacacattaagagtgtaggccaatactggcagttactgacagctattttaaaagcgatcccggctaaataa

SEQ ID NO: 312344 - DNA, 528 bp, Proteus mirabilis; identical to SEQ ID NO: 297392

SEQ ID NO: 312345 - DNA, 849 bp, Proteus mirabilis
atgcttatacctaagcgccaattaatcttttacttatttactagcatgttgatatatccagcttcctctatagccgctattttttcttatattacagaatcaaaaccagtaggtaatgaggggacaggggctgattacacttttattatccaacgttgggatcccgagccaccaacggctttaaatccttgttataaaaaaaaaccttgttatataaccataaatcatcgtcatcagcctaaccagtctggaggttcagcgaccagaactattttaagtgatgggcataaatatcgaagaatggaagatctacgtattgctgttatgaaagaattaggaggattcccttatggcccaggagttgccattcatcgatatgttgatacatcaaccatacaagagtgcgttggtatattttatcagccaaatgcttatggttttgctgaagatggctatttattaccgggttctatttgtgcaattgctccccctcctgttggacattgtgatgtgttagcccattctgttgagttggattacggcaatgtgggggaaaatgaattagacaatgcggttcgttctcaaactgtgaatgtgacgtgtaatcgtgatgtctctttacaggttgttgcaacaggaatgaataatcgtcaagtcccactacgtaatgacaatagcttatatgctgatttatatattaatgataaatctggcgaagagggagaggctatctttgtcgctaaaggcaaaatggtttctatacaggtgagttctaaattgagaaccaatggacatgttgctccagggtatttttctggctctggcgcgttgattctaacgttaccataa

SEQ ID NO: 312346 - DNA, 1230 bp, Proteus mirabilis
atgagtaagacaaataaccaagccaatccttgggaaacggacactcaagaagcggcaacagaaaacgccaatacaacacaaaattcagcgcaagaaacgcataacaacacagatacagacaatgatccttgggcaaccacggatagcaacactactgataccgacccttggagtagtagcgctggcggtgataccggtggagctgatgctgatccttggggtacagggagtggcactgacggcagtgatctctcttctggtactgattggctagatgccatgccaacagaaagtacacctgatcactttaatattatggatccatttaatcatacgctgatcccactagattcttgggtaacggatggtattgactggattgtgctgcattttcgtcctattttccaagggatacgcgttccagtcgatttagtattaggtggctttgaaaactttcttacctcaatgcctgcacctgttgcgattattttattttcactgattgcatggcaactttcaggtaaggtgatgggaataagcgcttttatttcactgatcttaatcggtgctattggtgcatggtctgaagcgatgataacccttgcattagtgctgacctcattactattctgcctgattattggtctccccttagggatatggcttgcacatagtgacagagcatcaaaaattgtcagaccacttttagatgccatgcaaacaacccccgctttcgtttacttagtacctatcgtgatgttattcgggattggtaacgtacccggtgtagttgtcacgattattttcgccttaccaccgatagtgcgattaactattttaggtatcaaacaagtaccggaagatctcattgaagcggctcaatcatttggggcaaatcctcgacaaatgttgtttaaagtacaattaccgctggcaatgccaacgattatggcaggggtaaaccaaaccttaatgttagcactgtcaatggttgttatcgcatcaatgatagccgttggtggtttaggtcaaatggtattacgtggtattggtcgcctagatatgggattagcggctgtaggtggtgccggtattgtgatcctcgcgattattcttgaccgcttaactcaatctttaggccaaaatagtcgcctgaaaggtaatagacgctggtatatgacaggcccgattggtttgatctgccgcctgtttggtaaaaaagccgcataa

SEQ ID NO: 312347 - DNA, 561 bp, Proteus mirabilis; identical to SEQ ID NO: 311360

SEQ ID NO: 312348 - DNA, 930 bp, Proteus mirabilis; identical to SEQ ID NO: 308568

SEQ ID NO: 312349 - DNA, 1398 bp, Proteus mirabilis; identical to SEQ ID NO: 298856

SEQ ID NO: 312350 - DNA, 1071 bp, Proteus mirabilis
  misc_feature (998)..(1007): n is a, c, g, or t
atggaagagcaaacagaagttactcagcccgttagagtgaaaaatgccactctacaacgcgggctaaccaatcgtcatatccaattaatcgctattggtggtgctatcggtactggtttatttatgggttctgggaaaaccatttcgctagctgggccatcgattatttttgtttacatgataatcggctttgtcctgttctttgttatgcgagcaatgggagagctattattatcaaatttagaatataaatcatttagcgattttgccggggatttattagggccttgggctggcttttttgttggatggagttattggttttgctgggttatcaccggtatcgctgatattgttgccattacctcctatattagttattgggcgcccaattttcctgaatggggaacgtcttttatttgtgtgctgacactacttattttgaatttagccacagtaaaattatttggggaaatggaattttggttttcgatgatcaaaattaccgctattgtctctttaattattgttagtatcgtattgattagcataaattttcaatctccagccggccacacggcaactattgaaaatatctggaatgatggcggtatgttccctaaagggatcagcggattttttgctggttttcaaattgctatctttgcctttgtggggattgagctggtaggtacagcagcggctgaaacacgtgatcctgagaaatcattacctaaggcgattaacgctattcctattcgtattattactttttatgttttggctttggcgattattatgtcagtaacgccgtggcgttcgattttggcagacaaaagcccgtttgtagaactctttgtcatgattggtattccagccgcagccagtttagttaactttgtggtattaacggcagccgcctcttcagcaaatagtggtatcttctcaaccagtcgtatgctatttggtttatcgaaagagggggaggcaccaaaacnnnnnnnnnncgttcagtacctgccaatggtttactctttacgagtctctgtttatcttgcggtattgtgctaa

SEQ ID NO: 312351 - DNA, 429 bp, Proteus mirabilis
  misc_feature (297)..(306): n is a, c, g, or t
atgaataaaactattagtgaacatgtagatgtcgcgctcattggtgctggcattatgagtgcaacacttggcacacttctgaaagaactagagcctaatttaaaagtcgcaatgtttgaaagacttaatgattgtggtcaagaaagctctaactcatggaataacgcgggaacaggacatgctgctaactgtgagctaaattatacgccaccaaatcctgacggcaccgttaatatcagtaaagcgttagaagtgaacaccgagttcgatttatcgcgccaattatggtcttatttnnnnnnnnnntttggggtgcagataacgttaaattccttcatcaacgctatcgccaaatgtctgccaatcactgttatgaaaatatgcaatacagtgaagacaaacagcaaattgaagattgggcgccattaa

SEQ ID NO: 312352 - DNA, 1470 bp, Proteus mirabilis
atgaaaattctcggtggtgatctcgcgcctactagcggtaacgtattccttgatcctaatgagcgtttgggtaagctaaaacaagatcagtttgcttatgaagagtttaccgtgcttgatacggtaattatggggcacgctgagttatgggaaattaaacaagagcgtgaacgtatttatagcttaccggaaatgagcgaagaagagggtttacgtgttgccgatcttgaagtgaaattcggtgaaatggacggttacaccgttgaatcacgtgccggtgaattattattaaacgttggtattccacttgagcaacataatggcccaatgagtgaagtggcgccaggatggaaactacgtgtgctccttgcacaagccctattcgctgatcctgacatcttattacttgatgaaccgacgaataacttagatattgatacgatccgctggctagaacaaacattaaatgaacgtaatagcactatgatcatcatttcccatgaccgccattttttaaatatggtgtgtactcatatggccgatcttgattatggtggactaacagttcacccaggtaattatgatgagtatatgttagcggcaacacaagcgcgtgaacgtttactcgctgataatgcaaagaaaaaagcacaaattagtgaattacaatcctttgttagccgctttagtgctaatgcatcaaaatctcgtcaagctacttcgcgtgcaaaacaaattgaaaaaattcaattaaccgaagtcaaagcttctagccgacaaaatccctttattcgttttgagcaagagaagaaattattccgtaatgccttagaagtagagaatattgctaaaggttatgaagcaaatgcgcctttatttaaagacgtaaatatgatgctggaagtgggcgaaaaagtggcgattttaggcaccaatggtgtgggtaaatcaaccatgatcaaaacattagtgggtgaattaacgcctgataatggacgcgttaaatggtctgaaaatgccactataggttattatgcacaagatcatgccactgattttgaagttgatatgaccgttttcgattggatgagtttatggatgaagccagaagatgatgaacagtcggtgcgtagtgtattgggtcgccttcttttctcacaagatgatattaaaaaatcagtcaaagtattatctggtggtgaaaaaggcagaatgctgtttggtaaattaatgatgcaaaaaccaaacgttctgattatggatgaacctaccaaccacttagatatggaatctattgagtcactgaatatggcgttagaactctatcaagggacgttaatttttgtttctcacgatcgtgaatttgtcagctcattggctaaccgaattattgaaattacgcctgaaaaagtgactaatttccaaggcacttatgatgagttcttggctaagaaagggattgatggttag

SEQ ID NO: 312353 - DNA, 270 bp, Proteus mirabilis; identical to SEQ ID NO: 297227

SEQ ID NO: 312354 - DNA, 153 bp, Proteus mirabilis
atggataatcagataatggctgaagaatatgccatttcacaagataaacagcgtgaaattacgaaattatgtattcaaacggcgctattgttgttacaacatggtgctgaaagtatgttggttgaacagctctcaacgcgttcatcaagttga

SEQ ID NO: 312355 - DNA, 306 bp, Proteus mirabilis
  misc_feature (289)..(298): n is a, c, g, or t
atgtatgctcaagatggaaaattacctgatataaaacaaagggctgaaggtctatttgcttatccgcaattaaccgtacattggtatggtgatgttaaaaaagaagataaaacaagagcttatgggcgtttatcaaaatcaggtacttattctactactatcaccaatccaactttatttgaaaattatttaactgagcaactgcaacttattgcggatgcttatcatgtctcttttgaagtgacggcctcaaaacaagagataccatatccttttgtcattgatggcnnnnnnnnnnggttttga

SEQ ID NO: 312356 - DNA, 1074 bp, Proteus mirabilis
  misc_feature (6)..(15): n is a, c, g, or t
atggcnnnnnnnnnnggttttgatcggtcaatgagcgcctctttagcaaaatattttccgactaccgatctctctaaaattggtgatgatattaccgatggtttaatttatgacagcgagcttttacctctttcacattttgatgcactacggacggatttttctttggctcgtttaaagcattataccggaactttacctgaagatgtgcaaccttatattttattcaccaattataaccgctatgtggatgagttcgttcgttgggcctgtgcacaagttgctgataaaaatagtccatattgtgtactttcttgtgcaggttttcagcaaataaccgccgatacggttgatccggaaaaattaatttctgatctgacatggaaaaaatatcaaatgcccgcctatcatttaatcgcaaaagaagggccgggaataacattagtgaatattggtgttgggccgtcaaacgccaaaacaatttgtgatcatctggcggttctacgccctcatgtttggttaatgattggtcattgtggaggcttaagagaaagccaattattaggtgattacgttttagctcatgcttatttacgagatgatcatattttagatgctgtattaccgccagatattcctattcctaatattgctgaagttcagcgtgcactttatgatgctactaaagccattagcggtaagcctggacatgaaatcaaacagcgattaagaacaggaacggttgtgacaacagatgatcgcaattgggaattacgtttttcagcgacatcaaggcgatttagtttaagtcgagccgttgcggtggatatggaaagtgccactattgccgctcaaggttatcgttttcgcgttccttatggcactttgttatgtgtatctgataaaccgttacatggtgaaataaaattaccgggtcaagctaatcacttttatgaaggtgcggtatcagagcatttgcaaataggtattcatgcaattgagttattaaaagacgaagaggataaattacattctcgtaaattaagaacctttaatgagccgccatttagataa

SEQ ID NO: 312357 - DNA, 561 bp, Proteus mirabilis
atgcgtctcattgatgcggttcttcataaattacctgaagagctacgcatatctgaaagttggcgcagtgaattattattaagtgaaatgggatttaaagccaatgaaatcaatctattagtctcacaattaagtggtggtcaacatactcgtttattacttgcgagagcattgattttacaaccagacttactgctattagatgagccaagtaaccacttagatctaccgactatcttgtggttagaaacatttttaacacagtggcgaggaagttttattcttgtttcacatgacaataggttgttagataaagtgaccaattgtacgtggatcattcgtgataaaaccctatctgtttttcgcttgccctgctctcaggcaagacaagagcaagaagcacaagatatcagtgcgcaacatcgttgtgatgcacaacaaaaagagatagatcgtattgcacaaagtgcgaagcaattggccatctggggaaaaagccgatgtaacagaaggcaatcaatggacgttacagttatcaggaacaatattacgggcagatag

SEQ ID NO: 312358 - DNA, 588 bp, Proteus mirabilis
atgggatcttataaatcaaaaaatattactttatataattatccagaattaaaaattaatgtattacgttggtgggaaagtctatttttatcaccaaatgaattaagtaaaaaaggtattttaccagcaccgaatcgttataaatctgaattgaaacgttgtgattctattactgctattatgttaaccgaagggtttcgtgctttatggttgagttttcctgtggatcttattaataatgctacaacggaagatattgagcgttgggcaacaatagtagctatattagtttatattacgcaggatagtgaaaaacactttgctactattgcaggtgaaaaagatgagagtaaaaaatcttgtatcagtgaatcccgttttttacaactacaatcttcgcgtacttatgatgagtttattcggcgtttaaggagaattttaattcagattaaagggaaatcatctgtcttatcaatgtgtaaagatattgaaaagtgggttttagaaaaacagcgctttagttctatacaaacaaataaacaaattattattgagtgggcaatgaaatattatcaggctgccatttaa

SEQ ID NO: 312359 - DNA, 471 bp, Proteus mirabilis; identical to SEQ ID NO: 297226

SEQ ID NO: 312360 - DNA, 471 bp, Proteus mirabilis
atgtctctcaaacagaaaatagcggtgataacaacagcaggagcaacagccatcgcgttagtagtaatagcccattttgaaggtgtacgttatgaaccttatcgtgatgtggcaggtgttctaactgtttgttatggacatacaggcaaagacattattcaaggcaagagatacacacaacaagaatgtgatgcgttattacaaatcgattttattaagacacaacagcaagtcgatgcattaatcaaagtatcactcgatgactacaccaaagctgctttatattcctttgcttttaatgtgggtacaaccgcatttgctcgctcaacattactcaagaagctaaacgctggtgatagagcgggtgcctgtgaagaaatgaaacgttggatatatgcaggcggaaaggtctggcgagggcttgtcagtcgtcgagaggcggagtcagcactatgtcatggaaaactttaa

SEQ ID NO: 312361 - DNA, 627 bp, Proteus mirabilis
atgttaagtcggtcaatgaaagacttactgacaatgttaaaacaacacggcatcaatgatgagcgtctgttggaagctatgagcaaagtaccccgagagctatttattgatgaagcgctctcccataaggcttatgaaaatacggctttacctattggtaatggtcaaactatttcacagccttatattgttgctaaaatgacatcactgcttgaattacaagcaacggattctgtgttagagattggcacaggctctggttatcaaactgcagtattagcaaacttagtgcatcatgtcagttcagttgaacggataaaaatattgcagtggcaggcaaaacgacgctttaaacaccttgatttacataatatttcgactcgtcatggtgatggttgggaaggttgggtatcaaaaggcccctttaatgctattattgttactgcctgtgcaacagaagtaccgcaacgactcttgatgcaattagctgatggtggcaggatgatcattcctgtcggtgaacagcagcagatgcttaagtttattcgtcgtttaggtaatgattttcactatcaatctatcgaggctgtacgctttgtccccctaattgcgggtgagttagcataa

SEQ ID NO: 312362 - DNA, 1422 bp, Proteus mirabilis
atggattacctacccttatttgtggaattaaaacagcgcccagtattactggttggcggtgggcatgtcgctgcgcgtaaagccgtactgttattaaaagcgggcgctcggttacgtgttatcgcgccacagttatgtgatgaattgcatcttgcttatcagcaaaatcaaattgagtggattgctgggcaatatcagtcagagcatttacttggcatgatgctggtgatcgtggcaacagacgataaggtattaaatcaacaagtgtatctagatgcgcaagcacgccacatttttgtcaatgtcgtcgactctcaaccccaatgctcttttatctttcctgccattatcgatagaaatccgatattaattgccatttcatcagcgggcaaagcccctgttttagttcgtatgatacgggaaaagctagaggcattattgcctacctcattaggggctatggcgactattgcggggaaatggcgcaataaagtgaaacaaaaactgactggttttcaagcacgttgccgcttttgggagcaagcgtttagtggcaaatttgcctcattagtggcaagtggtcaattaatacaagcgcaagcacagctcgaacaacaactgtctcatccagatagcccacaaggtgagcttgctttagtgggggcagggccgggtgatgccgggttattaaccttacgaggtttgcaagttatccagcaggccgaggtggtactttatgacagtttagtcagtgcagacatcttagaactggtacgccgtgatgctgatagaatttgtgtgggtaaaagagcggggcaacacagtacgttgcaagaagaaatcaatcaattgatcgtgaaatatactcagcttggtaaacgagttgtcagactaaaagggggcgatccttttatttttggacgcggaggagaagagcttgaaattgcggtacaacatggcattccttttcaagttgttcccggtgttaccgcagctagtggggccagtgcttatgcgggtattccattaactcatcgtaactatgcgcaaagtgtcacttttatgactgggcattgccaatcaggggggatagagccagattggcaagctttagcgcaagctaatcatacgttagcaatttatatgggaacgacgaaagcagaacttattagccagcgtttaatagagcaaggtcgttcaccactcacccctattgccgtcattagttgcggtacacgccatgatcaacagatcttaacgggaaatttaacacaattagcgcaattagctaagcaagctcccaccccggcattattaatcgttggagaagttgctgcattacatcaccaacttgcgtggtttggtgatagacaaactcaacatacctctgccatccactcatctttggttcattttgcctaa

SEQ ID NO: 312363 - DNA, 732 bp, Proteus mirabilis
atgagtcgattatcactttctcagttggtgttgctatcgattgaagagcagcgactggcgcttgatgaaatcaaccaacaattagagcaaaaaacggcgatagagcgggtgatttgggctttagaacatcttcctaaccagtttgttttaagctcaagttttggtattcaagcggcagtttgtttgcatttgctcaccagacaatatcccgatatacctgtaattttgacagacacaggttatctctttcccgaaacatatcaatttattgatgaattaacctcttcactacaacttaatttaaaagtatatcgcgctgaaatatcttcatcttggcaagaagcacgctacggcaaactttggttgcaagggattgaaggtatcgaacgttataaccaaataaataaagttgcgccaatggaaaaggcattaaaggagttacaggcgaagacatggtttgcagggctacgacgccagcaatcaaaaagtcgagagcatttacctgttttatccatagcgaaaggtatttttaagttactaccgatagtcgattgggataataaacaaatttatcaatatcttaaacagcataatttaccttaccatccattatgggaacaaggttatctgtctgtgggtgatacgcatacgacacgcaaatggcaagagggaatgagtgaagaagagacgcgattctttggcttaaaacgtgagtgtggattacacgaataa

SEQ ID NO: 312364 - DNA, 1815 bp, Proteus mirabilis
atgagcaatcaacccccattattatcaatgcttccattaacacaggagcaattgaataaattacaggatgtgacgaaagacttaactccagcccaatttgcttggctttctggctatttttgggggcaattaaatcagcattcatccactaaagatgagctggtaagtgtacaaagtcaggttccccaacaagaaaccatcaccgtgatatcagcatcacaaactggcaatgcacgtcgtttagctgaacaattacgcgataaattggttgataatcaacttaatgttgagctctatagtgcgagtgaatataaatttaagcagatccacaaaacgacaaccttaattattattacctcaacacagggggaaggtgaacctcctgaagaagccatcgcattttataaatatttgcactctaaaaaagccgcgccaatgaagcaaacggcttatgctgtactgagtctcggcgatagtagctatgaacatttttgccaagcaggtaaagattttgatcatcaattggcgcaacttggcgcgaccagtctattagaaagattagatgcagatgttgattatcaagctgacgctgataaatggataactcagctgactgatattttaaaaatacgtatacctgagcaaaatactcaagtattgcaacaaacacaatcaggaacaaccgacagtgtcgataccgcacgctaccatcgtgatgcaccttttagtgccactttattaactaatcagaagatcaccggtcgacattcagataaagatattcgtcatattgaaatcagtctagcaggctctgaattgcaatatcttcccggagatgcgctaggagtatggtttaagaattcggaagaaaaagtggatgagcttattaccctactatggttaacgggggatgagcaggtaaatgttaaatcacaaacattaacgttaaaagaagcattattgcatcatgttgaattaactcaaaatagtgcaccaattattaaagcatatgcccaattatcccgccacgaagagttattatcgctggtggctgataaaagcaaacttcagcaatatgcgcaaacctacccaattaatgaaatggtacgtcaatatagtgcgcaacctaatgctcaagagtttattgatatattgcgcccattaactccacgtctttactccatcgcttcatcacaacaagaagttgatgatgaagttcatcttaccttaggtgttgttcgttataacgtcgatcagcgtgcttatacaggaggcgcctcagggttcttagctgatcaacttcaagaaggcgatacagtaaacgtttttattgaacgtaatgatcattttcgtttacctgaagataatcaagtccctgtgattatgattggcccagggacggggattgcgccttttcgagggtttatgcaacaacgtgaaagtgaaggtgcgacggggaaaaactggctcttttttggcaatcctcattttgtagaagattttctttatcaagtggaatggcaacgttatgtcaaaagcgggttgttaacacgtattgatttagcatggtcgcgtgatcaagccgataaaatttatgtgcaagataaattacgggagcaaggtcaggaaatttggcaatggttacagcaaggtgcttatctctacgtttgtggtgatgcatcaagaatggctaaagatgttgaacaaacattgttagaaatagtaatgacccatggcaataaaaatattgagcaagcagatgattatttaagtgagctacgtttagcacgtcgttatcagagggatgtttattaa

SEQ ID NO: 312365 - DNA, 672 bp, Proteus mirabilis
atgcaataccccattaatgaagtgtttcaaaccttgcaaggtgaaggtgtttttactggcgttcctgcgctttttgttcgattacagggatgccctgtaggatgtagttggtgtgataccaaacatacctgggaaaaagaagagagcaagaaagtccctcttggagatattcccattaaaacacaagaaagtgatacttggggtatagccactgtcgaagatattttatcacttttccggcaacaacgttatagtgcaaagcatgtggtgataacgggaggggaaccctgcctttatgacttacggcctttgacggaaggcttagaaaaagcaggttttgattgccaaatagaaaccagtggcacgcatgacatcctctgtagtgaagcaacatgggtaacactttcgccgaaagtcggtatgcgaggtggattgagtgttttatctagtgcgattaatcgtgccaatgaaattaaacaccctgttgctcgtgaaaaagatatcgaagcactggatgatttactgcgattaagaactcaacaacctatggcgatcgttgccttacaaccaatcagttgtaaagagagtgcaacagcgttatgtattaaaacctgtattgagcgtaattggcgtttttcaatgcaaacacataaatatttaaatatcgcctag

SEQ ID NO: 312366 - DNA, 267 bp, Proteus mirabilis
ttgccggcattattagatatttatcgttatctatttgtttctgctatgacaacggtttccgcggcgatcttcctttatagcccagacactattttagccgcggttgcggtattgaatatggatgatgcgggcaatattggtggcgcggcggctatgtcgacattgattttaaccacctcggcaggggtttcgatattgttatctattgcttcgcaaggtgttattcgccgaacacaagcgtggcatcagcgtgaagctaagcaataa

SEQ ID NO: 312367 - DNA, 960 bp, Proteus mirabilis
atgagtcttaattttctggattttgaacagccaattgccgagttagaagcgaaaatcgattcgctaaccgcagttagccaacatgatgaaaaaattgatattaatattgatgaagaagttgcacgcttaagagaaaaaagtttagaacttactcgaaaaattttctctgatcttggtgcatggcaagtggcacaacttgctcgtcatccattaagaccttatacccttgattatattaatcgtgtttttactgattttcaggagttggcgggtgatcgcgcttatgctgatgataaagcgattgtcggtggtattgctcgtttagacggtcgtccggtgatgatcattggtcatcaaaaaggacgtgaaacgaaagaaaaaattcgtcgtaattttggtatgccggctcctgaaggttatcgcaaagcgctgcgtttaatggaaatggcacaacgttttaaattacctattatcacttttattgatactccgggagcttatccgggggtgggcgctgaagagcgtggacaatcagaagcgattgctcgtaatttaagagaaatgtctcgctttggtgtgccaattatttgtaccgttattggcgaaggtggctctggtggtgctttggcgattggtgtgggtgataaagtgaatatgttgcagtacagcacctattccgttatttcgccagaaggttgtgcttctattctatggaagagtgctgataaagcaccattagctgctgaagctatggggatcacggcaaatcgtttaaaagaattaaaattgattgatacggtgatccctgaacctttaggtggtgctcatcgtcattatgatgaaatggcagcatcactaaaagcacagctaaaagctgatttagcgcagttagatgagtttgatacagaagaactcactaaccgccgttatcaacgcttaatggaatatggctattgctga

SEQ ID NO: 312368 - DNA, 291 bp, Proteus mirabilis
gtgttatatagcgcttggttgattattcgcgcagtaaagaaaaaaggtcattacttacctttctttgcttctctagcgattatatttcttggttttactgggctagggattagtatctggccaaatattataccgccggcaattagttttatcgatgcatcagcaccaccggaaagccaaggttttatgctcgttggtgcgctatttatcattcccattattctcgtttatacattctggagttattacgtattcagaggaaaaaccaattatgaagaaggctatcactga

SEQ ID NO: 312369 - DNA, 2598 bp, Proteus mirabilis
atgtcaactatcgattatccagagaaaaaagcgtcccgctcgataaggcaacaggctactatgcagtcgcatatcttaacccgttattacaaattttatcgtcataatggggcttcattcagtgcggctatcgtgaatgagcttttctgggtattaatgtggctctttttgcgtatggaatcccctttttggcagaaaatagcacaaaaacaacaacaactatttcctcatattaatccgcgtcgccctaaattatgcgatccgatccgatacttattacaaagtatttggcttatttgccattatttgatgctcaccttggtgaaaaaaccgattcaatttattgtctatattagacagtattatcaaaatctctttgctcgcttatctcctgttgcgcgagatatgatccatcataagaaaacaaacacgccactatggcaatacgctctattatcgctcgttgctgtttttgccatttttattatcttattaagtattactcaaccttttgatttaaaactacaatttgtttttgttctcgtgatttggctgatagccttagctatccgcgatatccctggacgactgtcttctattaccattattattttatcgctgactattgcttgccgatatatttggtggcgctatcaatacacactctactgggtggataatctgagccttttctttgggatcttactattactggctgaaacctatgcatggattgtgttatttcttagttttatgcaatgtatttggccactccatcgacaacctatttcaatgcctcaagatacaacacaatggcctactgtcgatatttttattcccacatataacgaagcgctacaagttgtaaaaccaacactttatgcctgtttaaacattgattggcctaaagataaattaactatctatttattagatgatggctctcgccctgagtttgcggcttttgctaaagaaattggtattcaatatatcactcgtgaaaaacatgattttgctaaagccggtaatatcaaccatgcattgagcaaagcctgcggagaatatgtcgctatttttgactgtgaccatattccgacacgctcattcttacaatttactatgggctggttcctaaaagacgaaaaaatggcattggtacaaacaccacaccattttttctctcctgatccctttgaacgtaatttaggcaatttccgcgaaacaccgaatgaaggcacgcttttttatggattagtgcaagatggtaatgatacttggaatgcagcttttttctgcggctcctgtgctgtattacgtcgttgtgctttggatgaaattggcgggctggcagttgaaactgtaaccgaagacgcacatacctcattacgcttacatcgccatggttggacttccgcttatattcgtatccctcttgccgcaggattagcaacaggatcactttcagcacatattggccaacgcatacgttgggcaaaaggaatgatacaaatatttcgtttagataatccactctttggcaaagggctgacactgccacagcgcttttgttacctcaatgccatgttgcactttttatcaggcataccaaggataatcttcttattagcaccactaacgttccttatctttcatgcctatattatttacgcacccgccatcgctatcgctttgtatgtcgtgccttatttattacacatttggttagccgcgaccaaattacaaggtccttatcgccactcattttggggagagatttatgaaacgattttagcttggtacaccactcgccccgtattaagcaccctattctcaccttataaaggtaaatttaatgtcacagagaaaggggcaattatgaagaaaagttttgtcgattggcaaattaatcgcccctatattctgtttcttaatcttaatttgttaggaattctatttgctttctggcgtatcgcaacaggcgatcccgatgaaaggttagccgtactcatgtgcttagtttgggtatgctataacttagtattactaggtgttgccattgctgtttctgtagaagcaaagcaagagcgccagttcccacgggtacgtctaaaagtgcccgcaatgctattactccaagacggttcgctttattcttgtcagctcaatgacttctctgataatggctgtgccattgtattaccagataattttacagttcccttatcttgtcaccaagagatcaccgttattctcaaacaaaatcaacgtgaatatgcttttgaagcacgtattttacggattgataatcgcattattggcttacaactgcttaatatggatacacaaaaatccattgattttaccgcctgtacttttgaacgagccgacacttgggctaattggcaacacgctctccctgccgataatccactgaatagtttaagaaatatcatttatatcagtatgcggggctataacaccttacttaaacgcgccccgtatcttgtttacctcttatttcgtttattagggcagtgtttattgtggctattatcgctacttccacgacgtgtcaatgtttcacaaatatttcattaa

SEQ ID NO: 312370 - DNA, 1278 bp, Proteus mirabilis
atgcaaggttatgataaagcgttacaggctgaaattgatgctcaacttgctttacaatctaaaaaaattaagccacccaaaacacccaaatcaagcattgattatgctaagcagtacacaaaaatcctttctgatttacaagaaaaacaagcctcattaattgcagatggacaaagtattcagttgtatggcactacatcttcatttaatgaatataattctgcacttgctgatatcaaaaagaataaagaaaaattcgatgcaatattaaagattgatccaaaagcaatcgaaactattaaagagaaagctaaagccattgatgatatggctcgcgctaattctgtcgcgcaatttgcttatgatcgcggtaaagaagttgagcaaatgcagtttgaaacctctctaataggaaaatcaagggcggaacaggaacgattaaatgccttgaggcaggttgatttgctttatcaacaagcaaaagttgatttaggagataaagaactcgcaaacttacagaacaatgtcgagcttacaaagcaaaaaatcgaggctgaattacaaaaacgggagttaatgaaattagatccagtagaaggactaaatcaggggctttcagattttggtgattctgccaccaatgtgatggaaaacgttaaaaatgtaaccgctaatgctctgaataatatgtctgattctttagctgattttgttttaacaggtaaaggtagttttaaagactttgcgaatgctgtgatatcagacattactcgaatggtgatgaaaatgctggttttcaaagcgattgaagcaggaaccagcttttttatggggggtgcttctggcggtagtgatgctggtggaggaccaggagggctttttgcttatggcggatatacaggacatggcggaaagtttgagccaaaaggtattgttcatggtggtgagtttgtcttcaccaaagaagcaactgcaaaattagggatcggtaatctttaccgattgatgaattcaacacaaggttacgcctctggtggttttgttggttcattagctggaaaaatgccatcatctccagtcacaacatcatcctcatcaggagttaatatcacagtagtgaatcaaattactgtaacaggtaatggtgactcggtacttgttcaggccatgaaagaagccgcacaacaaggtacagatgctggtgcacaaaaagcgagagcaatgatattgcaagattttcagagtaatggtactgcacgtagaacgttaggagtatag

SEQ ID NO: 312371 - DNA, 591 bp, Proteus mirabilis
atgcttggtccacctgccacttacgatttaagagctggcgaagaaagaaccaaggagtatttgaaaagaacagggaaagaaagcttaggaccagaatatgcctggaggttagaaccatatggaattgggcacggttttggtttgatgttggctgcagcggaagaatactcagtggagccatttttcagtcatccattttttcgagatggaatttctagatataactatacacattataaacgtgacaagtttattggcgagttatcccaggccactgtgagcgaagaaagaggcgatgttgaaataggtaactccatcatagaggcaaagaacctcttaaaaagtcctgagtcacttacccttgcagaagtagctttctatttggatcaaaaagaacgtattgactctatttcaggaatcattaccgcttcaaaagatctcgaaagtcgtgggaaagatattggtataatagcgagtaaatatgttggtactgtagctgccgataccttgcttttcggaggtctacccgtatcaacgtcaattgtttcaatatatgatatcggaacaagattctttaaaccgagaaagtag

SEQ ID NO: 312372 - DNA, 477 bp, Proteus mirabilis
gtgaaatttgaacgaatctacaaaaatattactggtcttagctgtccaatattcggaatccagtggaacgcgccgatcatagaagctgacgaagcaaaacatattatcttatttcttgaagataagcgtgttttattcaattcagcggatatggagaatgcaaatcattgtgctcaaagtgttattcaaattaggaatgaattaaccaatgctcttcagagtttgccaagtgattctattttagccaggtcaattaagagcatgagaagagcttgccaagaatttagtgacaaacttgggcatccaaaattttcgcaatttgaataccctgtgcaagtatccatgcttgagcgagaacttttcaaattaagaggaaagtgcggcatctccgtagcaaaaatagcagtttcctatggtatcgatattgatgacggattggctagtattataccttttaacaatgcagaaaatacgtaa

SEQ ID NO: 312373 - DNA, 975 bp, Proteus mirabilis; identical to SEQ ID NO: 305939

SEQ ID NO: 312374 - DNA, 258 bp, Proteus mirabilis
  misc_feature (231)..(240): n is a, c, g, or t
atggcttcttataataccaacgattttcgttcaggtcttaaaatcatgttagatggcgagccagccgtcattactgaatgtgaatttgtgaaaccaggtaaaggtcaggcatttgctcgtgtgcgtctgcgtaaactgatttctaacaaattactggaaaaaaccttcaaatctactgattctgctgagggtgcagatgtcatggatatcaacttaacttacctgtacaannnnnnnnnncctgtacaacgatggtga

SEQ ID NO: 312375 - DNA, 861 bp, Proteus mirabilis
atgcctacattaacgaagatagcgtggataaaaccagggatggcgacaaatcaacgtaaaatagcggattatattttagaacaccctgaaaaaatcgtgactttatcatcacagcaattagccgaaattatgggagtcagccaatcagcagtagtgaaatttagtcaaaagataggatttaaaggatttccttctttaaagctggctatcagtgaagatttaggccgaaaaaatgctaattcagaaaaaaattccagcatattacataaccaaatagattcagaggatagcctggttgttattgcgcagaaattagcacaagaaaaaaataattcaattcgggataccacacgtcaaattaattatcaccagtttgaacaagtgatccaacagattgatgacgcctctcgggtacaaattataggtattggtggatcaggtttagttgccagagatttaagttataaattacagaaaataggtattacgactttaattgaaaccgatcatcatgtacaaatttctgttgctcagatgttaagccctcgggatttacaaattgtgatctcttacagtggcaaaagaaaagatatgctggtcgctgcatctgtggctaaaaaacaaggtgctaaaattatagcgatcacaggagaaaaacattcaccactaggtctgatggccgattatatattagaaactattgctgatgaaggtgagtggcgtagtgctgctatttcttctcgcactgcacaaaacaccattaccgatcttatctttatggcattattaaagaagcgtgatgaaaatgcgaaggctttagtattaagctctcaagcactaattaatagtctggatgattaa

SEQ ID NO: 312376 - DNA, 261 bp, Proteus mirabilis
  misc_feature (201)..(210): n is a, c, g, or t
atgtttggattagatgcttttcacctagcaagaatacaattcgcgtttaccgtttcatttcatattatattccctgctatcaccataggattagctagctttctagccctattagaaggcttatggttaaaaacaaaagaaccaagttacctttctttatatcatttttggataaaaatttttgccgtaaactttggtatnnnnnnnnnntggtatgggtgtggtatcagggttagtgatggcatatcaattcgggactaa

SEQ ID NO: 312377 - DNA, 1374 bp, Proteus mirabilis
gtgacctcatttgctgatcttcatgcacttcctgctgagcaacttactaatcttaatgagcttggctatttaacgatgactcccgtccaagaagcgtctttacctgctattcttgccgggaaagatgttcgagcccaagcaaaaaccggaagtggcaaaacagcagcttttggcttaggtttattgcaacgtattgatgcaaaacaatttaatactcaatcattagtattatgtccaacacgagaattagctgaccaagtcgctaatgagttacgtcgactggctcgttttctgcctaacattaaaattctgactctgtgtggtggggtgccttttagcattcaacgggattcattaattcatgctgctcatattattgtcgcgactccggggcgtttgttagatcatttaaacaagcagactgtcacacttgctgatgtaaaaacattagtacttgatgaagcagatagaatgctggatatgggattttttgatgatattagcgacatcatttctcaaatgtcgacacaacgtcaaactttgctcttttctgcaacttggccggatgaaatcgctaaaattagtcgaaaaattcaacaagatcctgtcactattgagattaattcaccggatgaattgccagcggttgaacaacaattttatgagatctcccgttatggcaaattgggattattacaaaagcttttgagtcatcatcaacctaattcttgtgtggtattttgtaataccaaaagagattgccaagatgtgtatgaagctttgaccgaaagcaaccaaagtgtccttgcgttacatggcgatatggagcaaaaagagcgcgaccaaacattgatccgttttgctaatggtagctgtcgagtgttagtcgccacagatgtcgctgcgcgaggcttagatatcaaagcgctagaaatggtgattaattatgaattatcacacgatccggaagttcatatacatcgaattggacgaacagccagagcgggagaaagtggtttagcgattagtttttgcgcaccagaagagatccctcgcgccaatgctctggaagaaatgttgaatataaaactggattggcaatcagccccttcaggtttatcaatcacaccattggttgcgacaatggcaacactatgtattgatggcggtaaaaaagcaaaaatgcgtccaggggacatccttggtgcattaactggagatttagggtttagtggagaagatattggtaagataaatatccatccaactcatgcctatgtagcggtaaaacagtccattgctaaacaggtatggaaaagccttcaacaaggtaaaattaaaggtaaatcagtaaaagtcagactgtttagataa

SEQ ID NO: 312378 - DNA, 858 bp, Proteus mirabilis
gtgtctgagcacagtagcgcagcgccccataccacggtttatcatgcttacaatgaccaaagttatacgcctcttgctcgcattgaatgcacggataacccgcttaatccgcaacgggcgatttattatacgcacagtagtttaagtggcttaccggaagcgttgaccaacagtgacggtgaaatagtttggcaagggcaatacagtgcttgggggcatttacagcgtcaaacccgccccacaagcacatttaatcgtgaacagaacctgcgttttcaagggcagtatttcgacaaagagacggggctgcattataatacgttcaggtactatgccccggatttaggccgttttacccaacaagacccaatagggttggcaggggggataaatttatatgcttatgcgccaaatccattgacatgggtggatccgtggggttgggctaagctgtttgcattaggtacttatggtgaattaaatggttctgtgcatgtgggcgatcaattacaggctcatgaattattgagacacgaatatttaaaacaacaaggccttgcaaacacatcacggttatctggaaatccatctatagctttagacctagatcatcatactagaggcccgttgaaggatactagaggaattgggggggctcattggcatgaagctgaaattcgagctaatcaagggctaggtaaaaatgagtttgcttcaacactaaaacgtgaattggatataacatcaggtggtttaagaaaatcaggtgttcctgctagtcgagttaaacaattaagacaagaagcattaaaattttataaacaacaagttgctgcaaaagtaaaaagttgtaaatag

SEQ ID NO: 312379 - DNA, 609 bp, Proteus mirabilis
atgaatatagcaagtcttcttgaacaaattgcagataaaggttggtgtgtatgggatgatttccttacacctgaggcggttaaacaattgcgtgcttgttttggtaatgatgcacaacaagcacgtataggacgtcatgaaaacctattagcagaaaccacgatacgcagtgataaaattcgttggctagagccgcaaatgggagagccagttcaacattaccttatgcaaatggaaagcattcaacgagcagttaatcgtgagttctttttagggctgtttgaatatgaagcgcatttcgcttgttatgaaaaaggtgctttctataaaaaacatcttgatgcatttaaagaaaatgtcacaagacgtttaacgacagtgttatatcttaatgatgaatggacacaacaagatggtggagagctagttatctatgatctggatgataatcaattagcgacagtcgcccctcaaggtggtcgtttagtggtttttctttcagaacaatttccacatgaagtattacctactcataaagaaaggatcagtattgcagggtggtttcgagttaatggtgtcagagataattttctcgatatcgccagctaa

SEQ ID NO: 312380 - DNA, 162 bp, Proteus mirabilis
atgatctctatagaggtgtcaattccaccaattgagaaaataacaataattggtgtcagaataagtgcgaaaatcattaatgtggcttgtaccgtatccgtccaacttaccgctaaaaaaccacctaggaaagtatatgcaatggttgctagtgcaccatag

SEQ ID NO: 312381 - DNA, 207 bp, Proteus mirabilis
atggctcatgaactcaacttagaggctgttgcaaaaaaaagcgaccaactaaacgcccttttattccagctcaatgctgaacgtatatcggggcaacctgaaatagaaagtttaatcggattggcttacgaattatcaggtgacatttcagtttggttaatcgaagaaaatgcacagagagataatgatcatgacaaaagaaattaa

SEQ ID NO: 312382 - DNA, 405 bp, Proteus mirabilis
gtgcaattaagtcgcttagaagaaatgaatgctaaacgtgctgagttagttgccctttatcgtgaaaaacttcaagattcaccattggaaatgttaagtgtgccggaatatccacacttacatgctaaccatctctttatggtcagagttgataaaaatgtctgtggtatcgatcgtgatacatttatggaaaaactcaaacaaaaagagattggtacagggcttcatttccgtgctgcgcatacacaaaaatattatcgtgagcgctacccttcgttatcccttcctcaatcagaatggaactctgcaacgttatgctcgctgccactgtttcctgatatgagcaataaagatgttattcgcgttgtcgatgcgatcaatgaaattctttcggagcatatctag

SEQ ID NO: 312383 - DNA, 741 bp, Proteus mirabilis
atgagtcactttcttccattctcccgtcctgctatcggggatgaagagattaaagcagttgaaagcgttttacgctccggctggatcacaacaggtccccaaaatcatcagctagaacaagatttttgtgaaaaatttggtagcaaacatgctattgcggtttgttctgcaacagcgggtatgcatgttgttttgatggcgatgggaatagggcctggtgatgaagttattacaccttcccaaacttgggtatcaactatcaatatcattacgttattaggcgcagagccagtaatggtcgatattgatcgtgacacattaatggttagcgctgaatcggtaaaaaaagcgattaccccaagaaccaaagcaattatccctgtgcattatgccggagcgccttgtgatcttgatgcactcagagcggttgctgatgaggcgggcattcctctaattgaagatgcagcacatgcgataggtactcgatataaagatgaatggataggtgagaagggaacttctattttttcttttcatgctattaaaaatgtcacttgtgccgaaggtggattagttgttacggacgatgatgaattagccaatcgagtccgttgcttaaaatttcatggtttgggtgttgatgcttttgatcgtcaaatccaaggacgtaaacctcaagcggaagtcgttgagcctggttataatataatctctcggatattcatgctgctatcgcggtag

SEQ ID NO: 312384 - DNA, 399 bp, Proteus mirabilis
gtgatttctcagcttctcgatcttagtcattatttaccaagtgatattggtgctatttttattcatggtaatggttcgattattagtgataaagctgagacggtagctattactaacatctttaaacaacccatccctattattagctataaagggcagataggttatatttctaattgctctggtattattgatttaatgattatagctgattcattaaaaaataatcgattgatcccctcgacttcacattatccaatagatgatggaatggaggttaatttcctcactaatcaagagtgtgtgaactatagcgctaaacctattttaaaaatcggcttaggtatggatggctctattattgccatgttattaatcgcaaatggagagcaaggatga

SEQ ID NO: 312385 - DNA, 168 bp, Proteus mirabilis
atgttagttgaagcgcacgctcaacctttgagtaaatacagtgatggggtcaccttatcagatggttatgccgtgatgattttagaaagccaacaacagataaactcgagacaatatcttgcacctgcttatatctatcattccacttttatacaatatcaaaagtga

SEQ ID NO: 312386 - DNA, 384 bp, Proteus mirabilis
  misc_feature (308)..(317): n is a, c, g, or t
atgatgagctatggatacgatccattgttatcggaaggctctgtcaaacctcctgtatttttaacatcgacatttatttttaaaagtgcagaagaagggaaaaatttttttgatacggtaagtggaagaaaaccccttccagaaggagaaaaagcgggtttagtctattctcgttttaaccaacctaatagtgagatcgttgaggatagattagcagtttatgaaaacacagcatcatgtgtcctcttttcatcgggaatgtcagctattacaacgacattaatggcttttccacaacctggcgatgnnnnnnnnnngcttttacacaacctggcgatgttattttacattctcaaccactttatggtggaacagaaacattaa

SEQ ID NO: 312387 - DNA, 267 bp, Proteus mirabilis
gtgtcaacatttgaaaaaatcaataaagtatcagtcgttattcccgtttataacgaggaagagagtctcccacagcttttagagcgaacaatcaaaagctgtaaacagttagaacaagagtatgagctgatccttgttgatgacggaagcagcgataattcagcaaaaatgctagaagaagctgccaacattgaagataaccatgttattgcgattattttaaatcgcaactatggtcaacactccgctattatggcggggttttaa

SEQ ID NO: 312388 - DNA, 1554 bp, Proteus mirabilis; identical to SEQ ID NO: 297813

SEQ ID NO: 312389 - DNA, 903 bp, Proteus mirabilis
atgcagttctcaagtgaacatatcgcgatatttttagctgttatggataaaggctctttttccgcggctgcgcgttcattaaaacgtgttccttctgcggtcagtatggcgattgctaatatggaggctgaattaggttatgcgctgtttgagcgttcatcaagagagccacggccaacagaaaaagctaaagcacttgaacctcacgccagaatgattgctgagcaattaaagctattacaggttcatgcacaagagctttcaatggatctggaaagtatattaaatattggtgtcgcggcagatattaatcccgattatttattaccggcattatctgagttaacacagcgttaccccttactaaaagtgaatgtagtaaccgcggcacaagatgacattattgagatgctgcacgcacgtaaaatccaattatgtctcgtgtatggtgggttatatgtcaatggcgatgaacaatttcaatatttgggctcagagtcattagttgccacaatttcggcaagtcatattgcacttgctcaccctgcaggggtatttattgaagatttagtgaatgtaagacagataatgatagccagccatactcaagagataagagatgtacgctctttagtggcgactaattactggcaaacagataactttcaaatggcattaggtatggttgaagcggggatgggctgggggaatttaccttattcgctgatttatacgcagttacaaaagggaaaattaaaacaactgcaatttaaaaatactaaaaatgaattgcgcttaccggtacatgcaatgtggttaaaaggcgagtcactacaaaaaggggcaaaggaattggtggagttaatgaatattcaccaacccattgtgcccaattttgattaa

SEQ ID NO: 312390 - DNA, 171 bp, Proteus mirabilis
atgaaggaatattatcgtgtgttggagttagatagcgcattatcacaagtgaccggtaaattgctaagaaggacgacggcagatgataaaaatattgggttagggcgttgtgaattagaaggtgggattgaacaatttgcgttagaagatatttatccaatagagaagtga

SEQ ID NO: 312391 - DNA, 717 bp, Proteus mirabilis
ttgatagatgatttagttatgaaagatgaaaatgatttgtatgaaaaaagacgtcaaaaactagccgagcttgtttcccgatatgagacgcaagaagagttttctcgtgttataggcaaggataagtcatatgtgtctaggatgctgtatccaccgacaaaggctggttacaagagaatcggggataagatggttttagctattcagaaagcattaggactcccttctggatggatggatggtataacagaatcagaatttaccccaccacaacataatgataagttcaaggttgaaatactagacgtagaagcgagcgcaggtgctggcgtgatggttatcgatgattttatcgagactatcacggctattgagtattcagcggatgaagcaaaaagattattcggtggaagaccttcaaatacgataaagatgatcactgtaaaaggtgactctatggctgaaacgttcgaacctagggatcagatattcgtagatataaccacaaacttttttgatggtgacgggatttatgtgttcgtattggataaccagctctacataaagcgattgcagaaacagtataagcgcctagcagttatatctgacaaccctagatatgaaacttggtatctggacgaagatgctattaatgggctttatatatgcgctaaggtgctagttagccagtctattacctataagttccacggctaa

SEQ ID NO: 312392 - DNA, 318 bp, Proteus mirabilis
atgaataaatacacagaactctctgacttagaaattaacaagcgcgtctttgttgctgcaaaaatagagcatgaagacacggacttgcatagcaataaagttttctatggtgatggtgttaattggattgaattcgacccctgcaacaaccccactaacgcaatgcagattattgttgagaataagatagcaatgaatcctaaagatgacgcctggcagtgtggctcaggttggaatgtagctgacaataaaaacccactacgcgccgctatggaagttttcttaatgatgaaggatgcggagaatgaaaaagtatga

SEQ ID NO: 312393 - DNA, 1551 bp, Proteus mirabilis
atggcgacatggaatcaaaatattaatagcggtgggtttttaggtggtattggccaagttaatgacaacgcaccaagagctagtgatgcaaattcaacgctcgccatgatacgcgagaataacaacttacagcgctcaggagctaataatttggggcttcaagcaatgcagggattagcaggaataggtgagatatatcaacaacaaaagcaacaagatcgactgaaagagtttcaaagtaaatggggtcaagcgatggctaataatgacaccaagaccatgcggggattatttgcagagtatcctgatatggaaaaacagatcactggtggtatgagccacatctctaatgatgttagagaatcaataggtaatatcgcatcggggtatcgactagccgtaagtagcggtaagtctgatgagtacgttagagccaatgctgatgaaatgcgaagacttgatattgaccctcagtacgcatacgaattggctcaaaaggatccgaaaggcgctatggagcttgcggattatatttctctaagcgcattaggctctgacaaatattttgatgttcgtgacaagatggaaggtcgagtaattgagcgtgacaagctaactgaagatgctagacaggcggatatggagcactcgagagttattagaggacaaaatatatcaagagctaatgccttaacctctgcttacgcaccaacatccgcaatgcaaaattattctcaatatgcacaaatgttaaaaaccgatccagaaggcgccaaagaatttgctcaagctgctggaattaaaccatcagaaagaaaattatttaaggttgaggaagcgcctgatggcggaataattaaatattattcaaatggtgatgaggaaaggggttcaataaatcaaccagttaaaatggatggaatgggtcagccaatatcaataaatcaagctaatagaataatggaaaaatcgactggtgagcaaagaaaggctgcaggttttgcttttagagttagaaatggtatcgatacagcgaatgcgcttgttgagtctggcaaggtttccccacaaagagctgctgcaataaattcagctttaagggatggaacatttgccagaatggcgttatctggtgatgagcagtcgtatatagcatcaatgcaggatgcagttctagcaattcttcgtaaggagtcaggcgccgccatccctgattttgaaatggagcgttactttagaacatatactccacaattaggtgatgaaaaggctgctgtaaaaacaaaatccagacttcttgaaaaccaattcaaagcgattagagctgaatcaggaaaagcatttgatgccatgatggttattaattctggatatggaacaccacctaaccagcagacgagtaacactaacgagcaacagcaacctccaaaaacaactgttgaaaatcagcggggaggtcagtcaggctcaatcttcgaaggaactaccgcaaccaacccaaaaacagggcaaaaaataatttttagaggtggtcaatggcaaccgatttag

SEQ ID NO: 312394 - DNA, 273 bp, Proteus mirabilis
  misc_feature (6)..(15): n is a, c, g, or t
atgaannnnnnnnnngtaggtaaagagggtgacgtattactggggatctcaacttccggtaattccggcaatattattaaagccattagtgccgctcgtgaaaaaggtatgaaagttattactctaacaggtaaagatggcggaaaaatggcggggagcgcagatattgaaattcgtgtccctcattttggttatgccgaccgtattcaagaaatccatatcaaagttattcatattctgatccagctgattgaaaaagaaatggaaaaataa

SEQ ID NO: 312395 - DNA, 504 bp, Proteus mirabilis
atggagccaatcacccgcttaatcgatcgcatgttatcttttgcattacttgatcctcgaattgaggctgtggtattaacaggctcagtgggtcgtaataagaagatagacagctattctgatattgatatagagcttattggtcacggtgcgactgagctagcaaaaaaccaacattggctatcacaatttggtaaacacctcgtctctttagcaacagaatgtgaagatccgaacggcattcgctggccaatctatttgcacgtattagctcaaggccgaaaaatggatattttgatggcagagcctgaaagaattatcaatatgaaacaaaatggtctaagtccagtttatcaacgaggctatcgtgttttacttgataaaacaggtttatgtgaccaacttccagaaattagcactgtgacacccccagccctttccatagagcaagctgatgccttggctcaagagagttttggtttgaagccacacaaatcgctatag

SEQ ID NO: 312396 - DNA, 696 bp, Proteus mirabilis
gtggcaggatttggtattgaacgctataccttagagccgtggctaaatgaaggtaaacttgattggcgtgaaggtgcaatacaatctttagataaagatgtgattgccgatatcaataagccattctcttcacacggcggaacacaggtgatggaaggtaatttaggtcgagcagtgatgaaaacgtcggcggtgcctgatgaaaataaaattattgaagcacctgctgttgtgtttaatagccaacatgatattgccgctaaatttagcgccggtgaattgaataaagattgtgtagtcgttgtgcgttatcaaggtccccaagccaatgggatgccagaattacataaactcatgcctcctttaggggtattgatggataaaggctataaagtggcattagtcacagatggtcgtctttctggtgcatcaggtaaagttcctgccgctattcatgtaacaccagaggcggtaaacgatggactattagcaaaagtacaagatggtgacattattcgtgttaatggcaaaacaggtgaattaacactcttagttgatgaacaaaccttagaagctcgccaaaccgaaatacctgatctcagcgcaaacaatagcggttgcggtcgtgagttgttcgttaatttacgtcgccatttatcaggtgctgaacaaggtgcttgctgtattgatttttaa

SEQ ID NO: 312397 - DNA, 1275 bp, Proteus mirabilis; identical to SEQ ID NO: 310852

SEQ ID NO: 312398 - DNA, 426 bp, Proteus mirabilis
atgacaattaagaaacttgaagatggtcgatatgaagtggacattagaccaactggacgtaatggaaaacggatcagacggaagtttaataaaaaacatgaagccattgcctttgaacgttatgtaatggccaatcacagcaaaaaagaatgggggacaaaattaaaagacattcgcccattagatgaactcgttgagctatggtggaacatgttcggtaaacacagcgagaacggaaaatctaactacaacaatgcaatgcgtgtctgcaagggtatgcatagtagcaatgtatctcaagtgacatcaaaaagtatctcattttatcaaaatgagcgttttgctaaggggataaaaccctccactattaatcgtgaactggattatatgaggctgaaaacccctttattgaggccaagaaattaa

SEQ ID NO: 312399 - DNA, 1131 bp, Proteus mirabilis
ttgcgacaaacactctttttagcctctcccactcgtggaggaaaaccttatttaggtaaattacgtgattatttatctcattctcttgatcagaatatcgactcttttgagttgttccaatgtgaaaatattgaagcaacccttaatggcatagcaacatcatccgctcaagagctaaatgaacagatacaacctgttgcaatacctgatgtaccaaccaatatgattaatgaaatcattgcattatggtctgagttattaggtcgtgaggtcaatagtacaaatgatttcttccgttctggaggagatagtttgattgcaaccaaaatgatcagccaattacatcaacggggatatccagcaacattacaacagatttttacctatccatgcttagccgatttttgtgctcatttagagcaggaaaagcaatctcaacgagagtactcctctttgatacctctaagcgctgtatctgctccaaaaccttaccactactttatggtacatgcttctgatggtgatcccggtgtttacctacctcttgctgagtcgttaaataatacagtgtggggattaacagttacagatgcttcaaaactaactgatttggatacattgttatcattacatttatctagcataaaaacagcacaacagactggcccttatattcttattggttggtcatatggtgcttttattgccagttaccttgcagaacaactctcgcaacaaaatcattccgtattattagtattaatagatcccgtctatcgacatgattttattaaattttgtcatgatgactcagatagttcatcagatgaaaataagcagcttgcatgcactaaaagacttatgtcattcctacctgaaagtgacctaccattatctgatgatatcgcctgtttatggctggaagccaccaaccacccaacagaatggacatcacctgaaaaagagtggtaccaacgattaccgccacatacccaacatcactatttttcaggggagcactggtcaatactgcaagatcgcgctaccagcacacatctggccgaaatcattgatcagtgggtgcaacaaaaactttctaataacggatatccatccgaaggaggtaattaa

SEQ ID NO: 312400 - DNA, 651 bp, Proteus mirabilis; identical to SEQ ID NO: 307889

SEQ ID NO: 312401 - DNA, 453 bp, Proteus mirabilis
atggtacacaatagtccgtatcgcatacggcttaccggcttcatcccatttgggaaaaccaaatcgctgaatttcgccaatcgcttccgtgatatcgtgaaatatcccgttcattttttcacgttcaatatctttcgcagcaggatctgtgacttggtcacgctcataatcgtaaccatagccttgtgtataagacacagaaccgtctggttggatttctacgggtatagaagccttatccccttgtgttgcaaaaggggttttaaaaatagttgtcataggaattatgctccgaagttactgcctaagaagtttttacgatgcagaccaacaccaaaggcttttttggtcacaatgcgatatttgacgccaacacccgaagggcgtggcattaagtcgaagttttcgagaagaacccgtagacgttcgtcagggttgaagttaaagacgtaa

SEQ ID NO: 312402 - DNA, 666 bp, Proteus mirabilis
  misc_feature (654)..(663): n is a, c, g, or t
ttgtcctattttggcacctctaagttttcttctgggtattcgttacaaaactttcctgaaatacccactaaaggtgaagtcgttacgacactgcgtaatattgttaaccggtttgcgggatcatcagaggggctcaatcattggcgctattacattgatgcggtagagatccatattcctccattactggtgccttatctgcaacaagaaaatgtcctcgatgtcgtttgtactccttctatccccattgtcattggtgtgaatggccattttcttaaagatgaaaaatcacatttttctgcgttaagtttaaaacaactttctgaacccatactgtcaaatggcacttccactatccagaaaaatgaaggtgatgcggcgcatttattacatattcgccaagaaaccaacgaagagtatcggttacatcattcttcaggtttttggaatggctcgttaatttgcttagggttaatcttatggttaacggcattaatgatgccacaagtctttctcccttggataatggctgcaggagggacttttcttgttttaggcttgtttcttatttatcgacccatcatcaaatcacgaaaacaagaagtacaatgttttaaagggcgtttaaaacgctggggactgtttggtaatttnnnnnnnnnntaa

SEQ ID NO: 312403 - DNA, 1092 bp, Proteus mirabilis
  misc_feature (1011)..(1020): n is a, c, g, or t
atgaacatttcaaggagaaagctacttttaggtgttggtgctgcgggcgttttagcaggtggtgcggctttagttccaatggttcgccgtgacggcaaatttgtggaagctaaatcaagagcatcatttgttgaaggtacgcaaggggctcttcctaaagaagcagatgtagtgattattggtgccggtattcaagggatcatgaccgctattaaccttgctgaacgtggtatgagtgtcactatcttagaaaagggtcagattgccggtgagcaatcaggccgtgcatacagccaaattattagttaccaaacatcgccagaaatcttcccattacaccattatgggaaaatattatggcgtggcatgaatgagaaaattggtgcagataccagttatcgtactcaaggtcgtgtagaagcgctggcggatgaaaaagcattagataaagctcaagcgtggatcaaaacagctaaagaagcggcaggttttgatacaccattaaatactcgcatcattaaaggtgaagagctatcaaatcgcttagtcggtgctcaaacgccatggactgttgctgcatttgaagaagattcaggctctgttgatcctgaaacaggcacacctgcactcgctcgttatgccaaacaaatcggtgtgaaaatttataccaactgtgcagtaagaggtattgaaactgcgggtggtaaaatctctgatgtggtgagtgagaaaggggcgattaaaacgtctcaagttgtactcgccgggggtatctggtcgcgtttatttatgggcaatatgggtattgatatcccaacgctcaatgtatatctatcacaacaacgtgtctcaggggttcctggtgcaccacgtggtaatgtgcatttacctaatggtattcatttccgcgaacaagcggatggtacttatgccgttgcaccacgtatctttacgagttcaatagtcaaagatagcttcctgctagggcctaaacttatgcacttattaggnnnnnnnnnncttcctgctagggcccaaatttatgcacttattaggtggcggagagttaccgttggaattctctattggtga

SEQ ID NO: 312404 - DNA, 642 bp, Proteus mirabilis
  misc_feature (494)..(503): n is a, c, g, or t
atgtcatttactaaatcaatgcttgcactcgctgttatggcggtttcttttactagtcacgcagccaaacaggctgatttaatgattgtcgatggcacagtgttaacaatggacgcacaaaatcaggttatcgaacaaggaacggttgttgtaaaagaaaataaaattatcgccgttggggggcctgagttaacacaagaataccaagccaacaaagtgttagatgtggatggtgatatcgtgatgccaggattaattaatacccatacacatgcatcaatgacggtttttcgctctttagccgatgacgtgccagaccgattacatcgttatattttccctttagaaaataaaatggtgtctcgcgatatggttcgcgtaggagcaaacctcgccaatgttgaaatggtaaaagggggagtaactacctatgttgatatgtattattttgaagatgaagtcgctaaaacggttgataacatgggaaatacagnnnnnnnnnncctgaagaaggcattcaatatgctgtcaattttattaatgaatataaagatcacccgcgcattattcctgcctttgcacctcatgcaccttataccaataccacagagaacctgcaaaaaattgctaaactctcggtag

SEQ ID NO: 312405 - DNA, 789 bp, Proteus mirabilis
atgtcagataatgtcatctcctctatcggcaccaatcaaactggtgttaataaccgtgttcaattacgcaaaacattgacgctaatgcaagtcgtcatgatggggttggcatttttacaacctatgacgatttttgatactttcggtattgtatcaggcataaccaatggtcatgtggcaacatcatatgctattgcgttaaccgctattttatttaccgcagtgagctatgggaaattagtcaagcgtttcccttcagcaggctctgcttatacttatgcacaaaaatccatgagtccacatgttggttttatggttgggtggtcttcattattagactacttatttatgccaatgataaatatcttattggctaaaatttatttacaagccatattcccaggcgttgatccgtggatctttgttgttgcgttagtcgcgttaatgacattttttaatctacgcggaattaacgttgtggctaacttaaataccgttattgttgttattcaagtagctgtaatggtggtatttgttggtttattaattcatggcgtatataacggcgaaggtacaggggagttatggactttccgcccatttgcgtcagtagatgctgaattaatcccaatgataaccggcgcgacaattttgtgcttctcgttcttagggtttgatggcattagtaccttatctgaagaaacacccaatggcgttaatcggtggtttaatttttatcgctgtttcttattttttacaattatatttcccagatatttcacgttttaa

SEQ ID NO: 312406 - DNA, 3066 bp, Proteus mirabilis
atgccgatatttcgttttactgcgcttgcaatgacattggggttattatcaacgccctatcatgttattgctgccaccagcactcctgcatttgatcccaatcatcttatgcaatcagaaatctatcattttgcacaaagtgatccattagctgatttttcatcagataaaaattcaacactaactttatctgataaacgtagcattatgggaaaccaatcccttttatggcaatggaaaggtggtagtagttttactttacataaaaagcttatagttcccacagataaagaagcctctaaagcatggggacgcgcttctacacctgttttatcattttggctttacaacgaaaaacctattgatggttatctcactgttgatttaggggaaaagctcaatgccaccagcgaagcccaagctggctttaaagtaaaactaaatttcactggctggcgtgctattggtatctctttaaataacgatcttgaaaatcgcgagatgactttaaatgcaacaaatacatcatccgatggtactcaagatagtattggtcgctctttaggtgcaaatgtcgacagcattcgttttaaagccccttctaatatcagtcagggtgaaatctatatcgaccgtattatgttttctattgatgacgcccgttatcaatggtctgattatcaaataaaaacacgattatcagagccggaaattgaatttcacactgtacaacctcaattacctgtaacaccagaaaatttagctgcgatagatcttattcgccaacgtcttatcaatgaatttgttggtggtgaaaaagagacgaatcttgctttagaagagaatatcagcaagctaaaaacggattttgaggcactgaatattcgccctctttcggatggaggaatgcaaggtcgacatcttatcaccgataaacaaaccatcatctatcagccagaacagcttaattctcaagacaagcaactttttgataattacgtcattcttggtaactacaccacattaatgtttaatattagccgtgcttatgtgctcgaaaaagatccaacacaaaaagaacagctaaaacagatgtacctcttgatgaccaagcatctattagatcaaggatttgtcaaaggtagtgccctagtaaccactcaccactggggatatagttcacgttggtggtatatctctacattattaatggctgatgcactaaaagaagctaatctacagacagaagtctatgattctctactttggtattcacgagaatttaaaagtagttttgatatgaaagttggcgcaaatagctctgatttagactattttaataccttatctcgtcaacatttagcgctattattacttgaacccgatgatcaaaaacgtattaacttagtcaattcttttagtcattatattactggtgccttaactcaagtaccaccggggagtaaagacggtttgcgtcctgatggtacggcatggcgacatgaaggtaattatcccggctactctttcccagcatttaaaaatgcctcacagctgatttatttattacgagaaacaccttttgctgtaggtgaaagtggctggaataacctaaaaaaggcaatgatttcagcatggatctatagtaatcctgaagttggcttacctttagcgggaagacacccctttaactcaccttccctacaatctatagcacaaggttactattggctcgcgatgtctgcccaaccagcgccagataaacagttagcatctatttatttagcaattagtggtaaatcgcgaaatgaatctcccactatttttggtgaagagataacgccagcgtcccttcctcaagggttctatgcctttaacggtggtgcctttggtattcaccgttggcaagacaaaatggtgacattaaaagcctataataccaatgtatggtcatctgaaatttacaataaagataaccgttatggccgttatcaaagtcatggtgttgctcaaatcgttcgcaatggctctcaactttcacaaggctatcagcaagaaggctgggattggaatagaatgcctggcgccacaaccattcatcttccgcttaaagaacttgatagccctaacccacacaccttgatgcaacgaggtgagcgaggatttagcggcacatcagcccttgaaggaaaatatggcatgatggcgtttgatcttctttatcccgctaatcttgcgcgttttgatgctaactttaccgctaaaaaaaccgtcttagcggcggataaccatttaatttttgtcggtagcaatattaatagcagcgataaagatcaccctgtggaaacaacgttattccaacatgctattacgcctgagttaaacactatttggattaatggccaaaaaatagaaggttttctttatcaaactacgctaaaacaaggagattggataatcgatagtaatggtaacggttatttaattactcaagcagaaaaagtgaatgtcagccgccaacaccagacttcggctgaaaataaaaatcgtcaacccacgcaaggaaattttagctccgcatggatcgaccacggtattcaacccaaagatcatagttatgagtacatggttttcttagatgcaacaccggaaaaaatggcgcaattagccgagaaattccgtgctaacaatgggttataccaagttattcgtaaagataaagatgtacatattatttacgataaactcagtcaaataacaggttatgcattttatcaaccagcagtcattgacgataaatggatcaaaaaagtcgataagccgtccatcgttatgacacatcaggaaggaaatatactgacggtgagtgctgtaacacctgatttaaatatgactcgccaaaaagcggcaacccccgtcaccattaatgtgacagtgaaagggaaatggcaacccacagctcaagacagtgaggtaaaatataacgtttctggggataataccgaacttattttcaccagttactttggcattccacaagaaattaaactctctcctctctcttga

SEQ ID NO: 312407 - DNA, 927 bp, Proteus mirabilis
atggttgaagatatgcgcaacaatattgctcatcgctacttacgctatgataatcagctccccattgaagaaagagaaataggttggaatagctgggcaaatattctgtacggttatggtacgcaaagtcaacaaggtggaattaacggctacaatacttatcgcactggtattcaaatcggtactgattatgaaataaatcaagatgcgctaattggcgtttctttagcatataactacgctaaagccgatgctaaacaacgtaatgcaagcaaagaaattagccattttgaatttatgccttatgccggttggtatagtgatacattattcttaaacggtaatttaaatattggttattacactgtcgatagtgagagggatatcggtggtaatacgggatggcaaggaaataccaaagcaaaaggtgactactctggtgtgcaattaggctatcagattaacgctggcacctatttggattttgattttatccatattaaaccgatgctaacttaccaatatcaatggctcaatattgattcttgggaagaaacaggctctacattatctatgcgtacttatggccaacgctacgcagttaatcaattaggtggctctgttgctttatggaatgactaccaaacctcttatggcaaattaaccccttctcttaaccttcgttatatcaaagatattgcaggtaataacgatattaatcaacgccacagccttacctattttaatactggaggaagcaccttcgatattaaaggaaataccgttggtggtgacatcattagtgctgaattaggtgcaaaccttgatattacccaatcgttaaatttaggtacaacaatgggatatcagcgttatgacaaattcaatgaagggcgtatcggctttactgttagccagcgtttctaa

SEQ ID NO: 312408 - DNA, 1026 bp, Proteus mirabilis
gtggagacatcaaacccgaaagagtggtatgaaaacccgtttaatatcgatggcgtgaccaaaggcatgtacaaggggattaaacagattgatccccaatgggtaacggctgatttaacggaagcgaatgttcaagaccccgcgagtatggacttctacgagccaacatattatgtgattggtggacgcaagtatcacaagtctcactttattaagtttgtaccgttcccggtgcctaatgtgcttaaaccaatgtacaactactttggtgtatcagtgccagagcgcatttatgagcgtgtctatgcctcagaacgtacagccaatgaagcaccacaactggcaatgaccaagcgtttacttacgatggggattgcagacccagaaagcgctgataaggacattattcgcgaaaacatgctctattttatggagatgcgcgataactacggcgtacaaatgaccggtagtgaagatacggttcaacagttcgacacctcattagcggatttagatgccacgattatgacgcaatatcagctggtggcatcggcttccaatgtgcccgcgacaaagctattaggcaccacaccgaaaggctttaactcaacgggggaatacgaagaagctaattaccgagaagagcttgaaagtattcaatcaaacgaccttgaagagctattacagcgtcattacgacatgttgatgcgtagcgaggatttacctgtgacagaaatctctatcacatgggcaccgcttgatagcccaacggctattgagagtgcggatattgagcttaagcaagcacaagccgactcagcctatgcaacaacgggggcgattgatgggctagatatccgcaagaaactggccagtgataaagcgtctagctattacggcattgaagtgaacgaggcagattatgtcgaggcgaatacgagtacgaacgaagcgagcgcaatgggcaacctctcgccaagcagtaatgaaagggaagcccctgcagtattcggtagcgccctctag

SEQ ID NO: 312409 - DNA, 714 bp, Proteus mirabilis
atggttaaagactatgaaaaagtgtttagcgaattaaatgacgactttgaaggttttacgatggatgccagctttgccagtcaaacacgcatctggcttaatcggctaaaacgcaaatgggataagatttttaaacaaaaatccacagagattgcggataaatttgtttcccaagtcgatataggcgcaaagcgtaatttagatgattctctcaaacagttgtcaggggggatcaccatcaaaaccccagacatgcctgaagctctgaaagataaaatcattgcctctacagctgaaaacgtatcgttaattaaatccattccactgcaatttcatcaacgcattgaaggtgttgcattacgttctattagcctgggtgatgaaggtgcaaagacgctattagaggaaattaggcagacaggcagtgtgacagagaaaagggcgaattttatcgctgttgaccaaacacgaaaaatcacgacagcggtgaactatgagcgcatgaaatctgccggtattcgtaaggcagtttggcatcattctggtgggagtgctgagcctcgtgaatggcatattaaattggacggtgaagtattcgatttagataacccaccaattattgatcctaaaacaggagaacggggtttacccggacagttgcctaattgcaagtgcttctggacaccagtaatagatttcggtgaggagacatga

SEQ ID NO: 312410 - DNA, 1260 bp, Proteus mirabilis
atgacaaagcgacaatatgatttaaacggctggctggaagtaaaagataaccccatctctaaagttggggtttttgattatttagggtttgaaattggcgcaccgatacccgaaaagatttacaaggtgtatcgaccacaagaagaactggccagcacagaaacaattaactctttcaaattaatgccctttgttgatgagcatgaaatgctagggaaagacggcacacccgcagagacaaagggaatacaaggggtcataggggaacaggtttactttgaatacccctaccttagaagcaatatcaaaatcctgtctaattcagcgcttaaccaaattgatggagggaaaattgaattatctccgggctatcgctgtatttacgatttcacaccaggcgaatttaacggtgaacgttatgacgccatacaacggcatattagagccaaccatcttgcgttagtcgatgaagggcgcactggcgctgatgttgctgtgcaagaccattccgttattaccatagacacaaaggaacttattcgcatgaacgaagaagaaaacaaagacaaaccaaccactgatgaaggtgcctttacgcccgagcaattggaagcgttaaaagccattatcaaagaagcaatcaccagtgctaaacctgcaacagatgatgattcagaagaaaaggaaaagtcttctactgatactgaccctgacgaagaaaagaaagcagaagaagcagtagaaaaggctgaaatcgcgacagaagaagcagaatctggcgaacctgaagccgtagagaaagccgaggtcgcgattgaagaagctgtcgaagcgattgaagaagccaaagagcatcttgaccaagcaactaccgatggccttaatcgtcgtttaaaacgcctaaaccgtagcatgaccgcaatggatgaaatggcatctctgaaacgtaaaattaagcgattagagaaagcaaaaccggcaatggatacgggtgaattactcaaacaaattggtgcgcgtgatgcgttagcgcataaattaacgccgtttattggtgtgtttgaccactctgctatgactcaacaacaagtcgcggagtacggtgttaaagaactgggtattcaatgcagtaagggaaccgaagcgattgctcttgatgcatggatgcaaggacgtgtacctgattctcaaaagcccagttcaacaatggactctgcagtgagcaataaaacaattatggataaatggggagctaaataa

SEQ ID NO: 312411 - DNA, 498 bp, Proteus mirabilis
atggcaattcctaaatcagtagcagatggcttaatttctggtgttgtcggtgaaattagtcatgcaggccctattcgcgctgtttccgccattctcagttcagcagatgaaaagctgaatattttcggtcgcgcctatacctacaaagatgattcagtggaatccgttcaagtcggtggtaaaggggcatttgcggggatcatgattaaccctaaagcctatcgtatcgaagaagcgttcgctcgtaacggtacgcagggcgaattcctgacaatgggggaggttttcgttgaactaaaagaagtggcaggaaaaatcaacgcaccggttgtgttcgatgaagctgacggctcgctatcttctaaagccactattagtgccggtgatcgcgtcattggttttatcagccgacaccttgagtcaacagaaagtgctcatttgggcattattcgtttaacagaaatcccatatccagcatctccaaaggaaggtgaataa

SEQ ID NO: 312412 - DNA, 2487 bp, Proteus mirabilis; identical to SEQ ID NO: 297653

SEQ ID NO: 312413 - DNA, 1137 bp, Proteus mirabilis
  misc_feature (1102)..(1111): n is a, c, g, or t
atgacaactcttaatagctcaaaaaaaccacagaaagacaagctcaattctgttgtttttttcgcttccgcaacgctgattttagcgttctcctttttcactattttaatgacagataccgccaatgcgtggatcattaaaacactaggttgggtatcaaaaacctttggttggtactatttattagcagcaactttgtacattgttttcgttattttcgttgccacatctcgctttggtaatattaaattaggcccagagcagtcaaagcctgaatttagtgtattgagctggtctgctatgttgtttgccgcggggatcgggattgacttaatgtttttctcagtcgctgagcctattacccaatatatgctaccgcctactggcgaaggtgaaacaatagaagcagcccgtcagtcgatggtgtggacattattccactatggcctgacgggctggtctatgtatgcactgattggtattgcactcggatattttagttatcgttataatttacccttgaccatccgctctgcactttatcctatctttggcaatcgtatttatggccccatcggtcatactgtcgatattgctgccgtattgggtactatttttggtattgccaccaccttaggtattggcgtagtacaacttaattatgggttgaaagttctcttcgatttaccgcaagggttaggtgtacaaggtggtttaattctactttccgtaattatggcggtgatctcagccacatcaggcgtcaataaaggcatacgtattctttccgaattaaatgtattactcgctttagggttaattttatttatcctatttgctggcgatactgaatttttattaaatgcgttagtacttaatgtcggtgattatgtaaaccgattcttaggaatgacgctaaatagctttgcttttgatagaccaacggattggatgaatagctggacacttttcttctgggcttggtgggttgcttggtcaccttttgtgggcttatttttagcacgtatctcaagggggagaactatccgtcaattcgttataggcaccttgatcatcccttttgtattcacgctattatggnnnnnnnnnnctattatggttgtctatctttggtaa

SEQ ID NO: 312414 - DNA, 981 bp, Proteus mirabilis
  misc_feature (21)..(30): n is a, c, g, or t
ttgtattcacgctattatggnnnnnnnnnnctattatggttgtctatctttggtaatagtgcactttatgaagtgatccacggtaatcaaacctttgctgaaacagtattagcctcaccagaaaaaggcttttattctctacttgaactctatccgggattcggtttaaccgcttccgtagcgactattacaggattacttttctatgtaacctcggcagactccggttcattagttttaggtaacttcacttctcaactgagtgatataaataatgatgccccaaattggctacgcatattctggtctatcgctattggtctattaacattaggtatgttaatggcagacggggtttctgctttgcaaaataccacggttattatgggattgccttttagctttgttattttctttattatggcaggactatataagtcattaaaagtagaagattttagacgcgtcagttcattaaacaccaatgcgccagcacctctttatggtaacaccaccatgaactggaaacagcgtctaggtcgagtgatgaattttccaggtactacctatacccaacggatgttagatttagtttgtaccccagcgatgcaagatgtggctaatgagctgtcattacgtggtgcaaatgtctcgtttaatctttacccgctggaagaagagcctcgtttaaaccatttagaattagtggttgatttaggccaagagcagcattttatttatcaaatatggccacaaaaatattcagtacctgcatttacttatcgtgctcgtcgaggtaaatcccattattaccgactagaaacctatttatgggaaggttcacagggtaatgatttaatggactataccaaggagcaagtgatcagtgatattctcgaccaatatgaaaaacacttaaactttattcacttaagtcgtgaagcgcccggtgcaacattaacatttccagaatcaaattaa

SEQ ID NO: 312415 - DNA, 504 bp, Proteus mirabilis
atgaatggaaaatcaaataatagtttaataaataatgatagtaataaacaaatagctaaaccaataattccgccaccatctgctaaccctactttaagttcacaaatggagacaggagatggcaatgttgctttagatttagttgtgataatagatacaagtggctcaatggctgatgaatcttctgatttaagtcaacaaatagatgatgctgttcaaaaggcattaggacgttgcccatcaagtttaagagtcacttttttaggaatagaaggtacgtgggataatactaagttcgatcgctcagtgactgactatttaatgacacaaggtgtatctgctcacagactacaagcaagagcgccatttaaagaggctgatggacgagatcatgctggaaataaagaagatttatgccgagccgtcattgatgtgtgtaaatatttcgattggcgaaggtatggaaggtggcggaggtgtattaacacaagccgctgtgcttaa

SEQ ID NO: 312416 - DNA, 849 bp, Proteus mirabilis
atgcaacaccaaaatactcaaaagaaaatactacgtactatttgtccagatgcgaaaggacttatcgcaaaaattactaatatttgttataaacatcagctcaatattgttcaaaataatgagtttgttgatcatcgcactggccgcttttttatgcgtactgagctagaaggcatttttaatgatgaaacctttttagccgatttagatgatgcacttccacaaggctcacagcgagagcttaatactgccggtcgccgccgtatcgtcattatggtcactaaagaagcccattgtattggtgacctcttaatgaaaagcgcttttggtgatctggatgttgaaattgcagcagttattggtaatcacgacacgctaaaacaccttgttgagcaatttgggatccctttccatctcattagtcatgaagggttaacccgtgatcagcatgatgaaaaactgatagcacaaattgaccaatacaaacctgattatgtggtattagctaaatatatgcgtgtattaacccccgcatttgtacaacattacccaaatcaaattattaatattcatcattctttcttaccggcatttattggcgcccgcccatatcatcaagcctatgaacgtggtgtaaaaattattggcgccacagctcactatgtaaatgataatttagatgaaggccctattattactcaaaatgtaataaacgtagaccacactttttcagcagaagatatgatgcgcgcaggacgggatgtagagaaaaacgtactaagccacgccctctattgggtgctctcgcaacgtgtttttgtctatggcaacagaacaattattttgtag

SEQ ID NO: 312417 - DNA, 180 bp, Proteus mirabilis
atgtcgaccgacctgattaatattccaagagacttaccttatgtacctaaatcattaaattgggtacgggttgagcagcgttttcctgtcaaagtcattattactgaaccaccagaagcactcatgcgcatcggtgccactgctactgtaaatattgtacctaacgatgatgactgttaa

SEQ ID NO: 312418 - DNA, 837 bp, Proteus mirabilis
ttgaaagcttatttttctgaaactttatcaatatcagcaaagcctaaaatattttcactaaactatacttttattaatatcggatggacggttggcccacctattggcacattattattaatgtatggtacccaattacctttttggttagcggcaatatccgccagtattcctttatttatgatccaatgttttgtgcaacgttcagtggtagagcattccacagaagaaaatagtgtaaagtgggatccgaaaataatgctaaaagataaagcattaggctggtttgtgctttcaactttttttggcacattaacttttggtacatttgcttcgtgtatttcgcaataccttttagttgtttatgatgctaaattggctgaatctgctattgcggtgatcctccccgtcaatgcggccattgtcgtctcattacaatatatcgtcggtaaacaagtggttgctgaaagactacgtaaattaatgaccttaggcacactcttttttatcttaggattagcgggctttatgctggcgggtgataatttaattttctgggcaatggcgatagcaatatttacctttggtgaactgatttatgcacctggtgagtatatgatgatcgataatattgcgccgttaggaatgaaagcaagttatttctctgcacaatctttaggttggttaggtgctgcattaaatccacttgctagtggttatatcctgacaaccttgccccctatttcgttattcgctattttaatggggatcgcagtactagcttggctttgtatgctgcaaggtatgaactacagtgaaaaaagaatagctgcttaa

SEQ ID NO: 312419 - DNA, 936 bp, Proteus mirabilis
  misc_feature (910)..(931): n is a, c, g, or t
gtgtctaaaaaaattattgctaccaacctattacttgctctccccttcagtctgttatcgttacaaattcatgccgcaatgacacaaaattcacctgataaaatcattgttaccgcatccccctcacaagatccgcaaggaccaatttcaggtttagtggcaacaaaaacactatcaacaaataaaatacttagtgatatagataagacaccacaatcaatcagtgtcattacacgtgaccagatggatgcgcaagatgtcagttctgtctctcaagcattgcggtatacacctggcgttttcactgaatatcgcggcagttcaaaccgaaatgatgaaatctttattcgtggatatagctatgcccctcgctttcttgatggacttagttatggtatgggagcctcatcttctacaggagctattgacccttggctattagagagagttgagctgatccgtggcccgtcttctgttctatatggtcaattaaatccaggtggtcttgtggcaatgaccagcaaaagacccacttcaacaaccattaatcatattcaagcacgtgtaggaaatgataaattagcagagacagcttttgattttgcaggctcattaagtgatgataatcgtattctctatcgccttaatggattagcaaaaacacaacatactcaaattaaagactataaagaagaacgatttgcccttgcccctgccatcacttttttgccaaatgagcagacacgtttaacgttattaagttttattcaacaagagcccgaagcgggataccgtaattttttgccagcttatggtacggtcaaaaaaacacccgaaggcaccattccatttgatttcaatgtaaataatgctgattatcaccaatcatggcgccaacaatatggcgttnnnnnnnnnnnnnnnnnnnnnnaatga

SEQ ID NO: 312420 - DNA, 606 bp, Proteus mirabilis
gtggcaacaacggttgccgaatattttcgtcaacaaggaaaaaatgccgttttatttattgattctatgactcgttattgtcgagcgttaagggatatcgcattaacagcgggtgagttgcccgtacgtaaaggatatccagcatctgtatttgataaacttcccgctattttagagcgtccaggggtaacaaaaacaggctccattacggtattttatactgttttattagagagtgatgatgagccagatgcgatcggtgaagaaattcgttctattttagatggacatatttatttatctcgaaaaatagcagcatcagggcactatcctgctattgatgtattaggtagtgtgagtcgggtttttcaacaagtcactgatagtaaacaacaaaaatctgctttaaaaataagacaaatattgatgcgattacaagatgttaagttattgcaagagttaggagaatatcatgaaggagataacgaattaaatgatatcgcggtaagaaaacaagccaagatagaaagctttcttactcaatcctttaaagaaaaagccgattttcaacaaacattagaacaaatgtatgagattaccgcttaa

SEQ ID NO: 312421 - DNA, 669 bp, Proteus mirabilis
  misc_feature (639)..(648): n is a, c, g, or t
atgtttcataacgcagcgcatcctttacgaatacaaggaaatattttagaagtgatgttacgtgatgtttttattggggaggtctgccaactaaaagagaatattttcagtgaaaatattctcggtgaagctattgttattgggtttcataataacatagcaatattaagtatgatgggaagcgctcaaggttactctttacaaattatagttgagccaacaggaaaaacattttcagttgccctaggcccacatatattaggcagcatgattgatagtaaagggaattgcttattacgatttaatacagaaatagcagagaagacctttaataccttatgtcctatcgaaggtcggccacctttgtttagtgataggctgcctattacaacactatttaagtcaggtatacgtgctattgatggattattaagttgtggattggggcaacgaatggggatttttgctagtgcaggaacgggtaaaacgatgttaatgaatatgattatccgttttgcacaggccgatgtttttgttattggcttgattggtgaacgaggaagagaagttacagagtttattgaagaattaaagcaacataagcgatgtgaaaatacggttttaatttgctcaacttcnnnnnnnnnncttcagaacaatcagcggtag

SEQ ID NO: 312422 - DNA, 273 bp, Proteus mirabilis
atggctttacccaaccctaaaaatgcactacctaataattttatcggttttaataatagcgtgagcgcactaccgcctttaatgcctaaaattgacaagcttaatttcgcggcggctaatggccctaacattgccgcaatggataacgagagaatacccagcgtggtaataatgcctgctatcgctaaaccgatcatcgtcagcgttttagccagttcagggttagcctttacccatgattcaacctttgatattgcctttgtaatactttga

SEQ ID NO: 312423 - DNA, 981 bp, Proteus mirabilis
ttgaaagccgatgccactgcgaatgatgtaggcgcttattctaaaacagaatcagatcaacgctttcaaccactaggtaactatcaagcctctggttatagctactcaaaggcagaagctgacaccaaatatcagctaaagggtaattatgcgccagcagggaactacgctaataaaggggatagttacacaaaagcagagacggatggccgatatcaagcgaaaggaagttaccaaccgtcaggcgattatgcgacaaattcagcgttaaatagtgggcttaataataagtttgataagagtaatgtagctcaaggtacgggaacatcaaaggttcatgtgatgagccagaaagcctctacggatgcttttcagcctaaaggaagttatcaaccttcaggtaattatgcattagtaggagcatcgtatacaaaggctgagtctgacggtaaatatcaagctaaagggagttatgcgacagctggaagtagctatacaaaagcagaaagtgacggtcgttatcaaggtaagggaaattaccaaccagcgggtaattacgctttagtaggcgcttcgtatacaaaggcagagtctgacggtaaataccaaccaaaaggcagttatcaagcttctggttacagctattcaaaatcagaatctgataataaatatcagctaaagggtaattatgcaccagctggaaattatggtgctaagaatactgcaagtaaggctcaatctggttggtggaaatgtggtgatactggaataatgcaacaatggaatagccataactggagtgcaggacaatcattagattttaaatttccaacgccttttcctaatgcggtttttgttgtgatggttacagataaggacggttggcaaccaatgggaactactaatagaacaaagacaggttttacattgactggtaataataatgttttaaattttagttatatagctattggatattga

SEQ ID NO: 312424 - DNA, 981 bp, Proteus mirabilis; identical to SEQ ID NO: 301437

SEQ ID NO: 312425 - DNA, 219 bp, Proteus mirabilis
  misc_feature (198)..(207): n is a, c, g, or t
atgttaaagaaaatgatgggatttatgtttcttgcggtggcaatgatgacattatctgcatgtggtgataaacaagacgaagcaggaaaagccgcggttgaatttattgaagctgtcgcttccggtgatggtgataaggctgtgtcattaatgtattttggtgatttagaaaaagatccaatggcagagcaaattacnnnnnnnnnnaatttaaaatga

SEQ ID NO: 312426 - DNA, 225 bp, Proteus mirabilis
atggtatcgccgagcattgctaaattaacattagctcgtgtaaatactcctaccagcgtatcactcactcgactcatttcatctgagcttaacccaaaccccgtcaaaatatttgatccgatatctgccgtggtacctaaatcaatatcacctgctaatgacattgccagtgttccgggcatagcatttttaatttgctcaggcttaaaacccgccattgcgtag

SEQ ID NO: 312427 - DNA, 231 bp, Proteus mirabilis; identical to SEQ ID NO: 307350

SEQ ID NO: 312428 - DNA, 582 bp, Proteus mirabilis
atgtcattagaagaaaaaaatatcgataaaccaagaacaaagccagccgaagttcgtttagaagagttaatgaacgccgcagaaacactatttcttgaaaaaggattcagcgatattgtaaaacaagcgggggtcgctaaaggaacgtattatcactattttacggcaaaaacagatattctcgacgcactgcgaactcgatatatggattggtatattgataaagttgagcaagcaatggcaagctgccaaattcaagattttcgcgctaaattaaaacagtggtgtgaaactagcgttattgcttatgttgaaaaacaagaattacacgatatgctttttcatcaagtctttcatcaaagcggtaatattcatgaaaatagagcgctacagcagttacaaaagatattaatgggggggacagagaataaaacgtggcaagtcctacagcctgaattaacctgcacgcttatttatcatggtatgcatgctgccgttgataatttagaacacagtacggaatacacatcacaaacattaggtgcgctattatatcgacaatttacacaattattaagttaa

SEQ ID NO: 312429 - DNA, 693 bp, Proteus mirabilis
atgctgcaggcggatacattcaaaagcacgacaacctcgttgccagatttgaaaaaatatccctcgggaactcagcgtaagaaagcgtttttaaatgtcatagttcctattattgataacattaataataagatattgagagatcgtgagtggttaaccgctcaacgtaaagcccaacactggggcagcgcagatttgaaaaaactgcgtgaaatctgtcaatactatggcgttacatgtaccagccccaaaaaagtgaattgggattcgttactggctcgcgttgatattattccgactcattttgtcgcaacgcaagccgcaacagaatcaggttggggaacatcaaaattggcacagcaaaacaataacttattcggtatgcgatgtggtaaccggtcttgcaataatgtccctgggaaaaccaaaggctatgcagcctacccggatattgaaggctcagtgattgcttatatgcgtaatctcaatacgcaccgcgcctataattcactgcgctcatcaagagcacagcaaagaatgacgcaacagcaactcgatccacgccagttaatcaccgacttgaaaggctattcagaattaggttcaagttacaatgattatctgaccgaaatgttcgactcaaataagaagctgatcacgcaagttcagttacagtcgaaacgagaaagttag

SEQ ID NO: 312430 - DNA, 399 bp, Proteus mirabilis
atgacactctttgccacacactattttgaattaacgacactgccagaaaaactagaaggcactgccaatattcacttagatgcagtagagcatggagaaactattgcctttatgcacagtgttcaagaaggtgcggccagtaaaagttatggtttagcggttgcggcattagccggtgtgccaaaagaggtgatccgccgtgcaaagcagaaattaaaagagttggaaaccctatctggtcattcaggggcaagccatgtagaaacgtcacaactgatgttattagcagatattgagccttctgaagttgaattagcattaaataaaattgatccggattcattaacaccaaaacaagcgttggaattgctctatcacttaaaagagctaaataaataa

SEQ ID NO: 312431 - DNA, 417 bp, Proteus mirabilis; identical to SEQ ID NO: 300152

SEQ ID NO: 312432 - DNA, 318 bp, Proteus mirabilis
atgaaaataaaaaatcatatcagattactatctgcattattagttatctcttctagcatgaatgtattagcagataatagcaaaacaacagaaaagaaaaataacaatattattaattttagtggaacagtaatatcaacatcctgcaatatagatagccctagttctcctatcactttgcctacaattaataaatcggaaatagtcttagataaagattgggccaatgccaaaagcagtacaggtagtaattttgaaattaaactattagccggtgaaaataaaattatgaagaataaaagcatcctgattatttaa

SEQ ID NO: 312433 - DNA, 258 bp, Proteus mirabilis
  misc_feature (228)..(237): n is a, c, g, or t
atgcagagttatcactctctatcggctcaagtttatcaattggataaaccgataggatgcagtttcggcgatgttgaatactatcaacagcgattaaaagatgttaaaggtaaaattttagagccggcagtaggaacaggacgtatccttatccctttattgcaatcaggttttaatattgagggatttgatctttccgaagagatgcttgaattttgtaagaaaaannnnnnnnnnggtttacaaccaactacgtaa

SEQ ID NO: 312434 - DNA, 150 bp, Proteus mirabilis
atgaatgaattggtaaagcaaagaaataaatacaaactaaacagtgaatcttttacttataaaagtaaaaaatattcaaaagcggataaagcaacactggttttatgtgccattgttattgtttcgtttcttgtgaaagtttctatatag

SEQ ID NO: 312435 - DNA, 210 bp, Proteus mirabilis
ttgcgtggtggtgatttaattttcccttcttataccctcgttgatgccgggatcggaaaaaaattcccgttggataaacttactgtttctgttgatgtagtgattaataatctaactaatgtcgaagcaagacccgctagctctcaattaaaatatttagcacctctaccaggtagaaattatggattaaacgttaaagttgatttttaa

SEQ ID NO: 312436 - DNA, 189 bp, Proteus mirabilis
gtgtgtatctcaacagggcatcttcagcaattttgcttaggaaaaggcggtagtgctgtgattgcctatcacgatggaaaacgcacccgctttaacgttttctatgaaggtgaagataatattgaggccggcattcactactacttagatgaaaaacagcgccctgttgcaatggataatattacttaa

SEQ ID NO: 312437 - DNA, 123 bp, Proteus mirabilis
atgataatcaatatcacaataaataaaaatgataaaaataagtttgcttttttgtttaaaaaagcagtctttttatcaatacctttcttagaagaacccatcatctcttttgttgagcattga

SEQ ID NO: 312438 - DNA, 609 bp, Proteus mirabilis
gtggacaatattaagccaccaacttgtactattaaaggcgcagcacaaaaagatattatttttgattatggaaaaataagcccatcacttatccccaaatcgacaatttactcttattctggcattgtaactaataatgccattacgattgaatgtgatgctaacacatatttaacatttgttgtatctgatacttatggtgacacggagttaagtgttaataatacgtcaggatggtttcatttagttgataaatcgaatcctgaacatacagttggagcggctgatttcgtattgactaatgttactgtcgatggtaagcctgcgtatatttcacgagcaaatgatgttgctattacggggaataaatttaataacgtcctatacaaaggccctaccaatggttggacctcagaacaacaatcagatattaataaaaactctctgtctctcatttcaggtgaaattttccaagcgaatttcagtcaaggaaagacaagtcgtacttttattttatccaaagatgcactaagtaaaaaaggaatagatattgctgatggattagattttgtcggagaggttgttctcacttttaactttggggtctaa

SEQ ID NO: 312439 - DNA, 237 bp, Proteus mirabilis; identical to SEQ ID NO: 301841

SEQ ID NO: 312440 - DNA, 606 bp, Proteus mirabilis
atgacaaatagcctagttgtttcgttgagcgttttcctttttattgcagccattacgcccggacctaataatttactattaacctcttcgggggctcatgttggtttaaaacgctctttaacgttgatggcaggcattatcgtcggaatgcaatgtgtattacttagctctgcgtttggtattgcgacattattgattatttatcccgcattgcatatcggtttaaagattattggtagcatttatctttgttggttagcttggaaaacagcaaccgcttcttatcaacgattagatatttcaagtaaagtgccccaaacagtaacggcgtttcaaggtggattattgcaatttttaaatccaaaagcttggatgatgggactaggcgccgtaggaagttttagtttagccggtgatggttatttgggatcgattggtgtaattagtgttgtgatgttggtggtaaattttatcgctggtatggtatggattttaggtggaacatttatcagtcgttttttacaaagcagacgagcatggttcttatttaatattataatggggatattaaccgccatgtgtattccattgatttggattgaataa

SEQ ID NO: 312441 - DNA, 129 bp, Proteus mirabilis
atgcacttttgttcgaccagtacaacaaaaatgattggtttaggaagcgttcatttacattgtgcaatggtctatttatactaccagccaaattttgacgaagagaaaacagatggatacgcaaagtag

SEQ ID NO: 312442 - DNA, 1590 bp, Proteus mirabilis; identical to SEQ ID NO: 311598

SEQ ID NO: 312443 - DNA, 537 bp, Proteus mirabilis; identical to SEQ ID NO: 311597

SEQ ID NO: 312444 - DNA, 1956 bp, Proteus mirabilis
atggttaagaatgtgttgaaaatctcaacattagcaatgttggtcgcattcaatgtgaatgctgcgacagtcgatctccgtattatggagacttcggatgttcacagtaacttaatcgactttgactacttcaaagacaaaccaacagaacagtttggttatgttcgtacggcgaatttaattaaagccgcgaaagctgaagcaaccaatgcgattttagtggataacggtgacttgatccaaggtagtccactggctgactatcaagcagctaaaggcttagagaaaggggaagctcatccagcgcaccagttaatgaataccatggggtataccgtaggtaactttggtaatcatgaatttaactatggtttagattacctgaaaaaagccattgcgggcgctgaattcccatatatcaatgccaatatcatggatgcgaaaacaggcaaaaactatttcacaccttatatcattgttgatacaccagtaaaagatcgtgatggcaaagagcacactatcaagattggttatatcggctttgtaccaccacagattttaatctgggataaagccaatctggatggaaaagtcgttgtcaatgatattacagaaacagcgaaaaaattcgttcctcaaatgaaaaaagagggtgcggatctgattgtggctatccctcactctggtttctcttctgaaccttataaagctatggctgaaaactcagtctattatctgagtgaagttgatggcattaacgctattatgtttggtcatgctcacggcgtattcccaagtaaagaatttgaaggcattaaaggtgttgatgttgctaaaggcactgtaaatggtgttccagcagtaatgccaggccaatggggtgatcacttaggtgttgtcgatatggttatcaataacgacagcggcaaatgggtgatgacccaagcaacaggtgaagcgcgtcctatctttgataaagcaaacaaaaaagcattagttgaacgtgatgccgagttagcgcaaatcattgaaaaagcacaccaaggtactcgtgatttcgtcggaaaacatattggtaaagcgtcagctaatatgtatagcttcttagctttagtacaaagtgatccaacggtacaaatcgttaacgatgcacaagttgattatactaaacactttattcaaggtgatccgaacttagacggcctgccagtattaggtgctgcagcaccatttaaagccggcggacgtaaaaatgcacctgcagacttcgttgaagtagaaaagggtgacttaacattccgtaacgcagcagacttatatctgtatccaaatacattagtggttgtaaaagcgaccggtgcagatgttgttgagtggttagaatgttcagcgggtatgtggaaccaaattgatcctaattcaactaaaccacaatacttaatcaactgggatggtttccgtacttataacttcgacactatcagtggtgtagagtataaagttgatttaactcagcctgctaaatatgacgttgattgccaagttgtcaataaagatgcaaaccgtatcaaaaatgtcacttaccaaggcaaacctatcgatcctaaagcaactttcttaattgcaaccaataactatcgtggatacggtggtaaatttgcgggtacaggtgaaagcaatatcgcctttgcatcaccagatgaaaaccgtgcaatcttagcttcttatattgctaagcaaacgaaagaaaatggcgaagttgcaacaaaagctgcgaataattggtctttcttaccgatcaagacagataaacaattagatgttcgctttgaaacttcaccaagtgaaaaagccgctaactttattaaagattttgctcagtatccaatgacctttgtggaaaatgacgatatcggttttgcaatttacaaaatcgacctaactgagaagaaataa

SEQ ID NO: 312445 - DNA, 252 bp, Proteus mirabilis
gtgaaatggcactgggatcgtatcgaaagtggtatgtatgcgggttattacctgcgtgatggcgatgctaacactttcaactacaaaaaagaaacctatactgtgggtgtagataaacgttttgcggtatctaaatacaacaacttacgtttattcgctgaaatggcatatgatgatgctcgtagcgaaaacccagcttatgaagataaaaaacaatatatctttgaaactggtatgcgtctgtacttctag

SEQ ID NO: 312446 - DNA, 840 bp, Proteus mirabilis
  misc_feature (823)..(832): n is a, c, g, or t
ttggttctgtcgggatctgcaaacgcagtaaatgtgtacaacgataaaggtacacgttttgatgttaacggtcagttccgtttaaaaacgcaagtgacaagtaaagatcatgaaatgcgtatgcgtgatgatggtagccgtatcggtttctttggttcccatgaactgactaacgatatcaaagtgtttggtaagttagagtggggttcagatactcaaaaaaccaacagtgataatgagaaaacaaactttgatctgtacaaccgcgtaggctatgtcggtttttctcatcgtgattatggacaaatccaatttggtcgtacttatatcccaattgactgggtaaaaaaatcaagctacggctatggtaatacaggggtattttactttagtgatgtattaggccgtgcagtaggttattcaagtaaaggggttggtaaaaacaactttatgacccgtttaccacaaactatctttattgaaacaaaccgttatgaaggctttaaattagcggcaactttaacgggtaaagatggtaaagataatgatggtgatggaaaaaatggcgatcgcagaaccggtgatatccgtcatgcctattctgtcgttggtttctataaatcaactttcggtttagagtttgatgcgggttactcagcagctgtaggtgagcctaatctatacccagatagtgttgttggtaataaaaaaccagaaaatagtatcttagcattcggtgctgaatacttcttccctggtcgcgaattctctatcggtatcgactatggtcaatctcgcggtaaaaatactggcttaactttannnnnnnnnnaactttaa

SEQ ID NO: 312447 - DNA, 486 bp, Proteus mirabilis
atgtttaagaaggcgttattgagtttaactgcaggtgcattattatttaatgctagttcagcattagcggctgattatcaaattgataaacaagggcagcatgcttttgtgcaatttcgtatccaacacttaggttatagctggttatacggcacatttaaagattttgatggaagcttcacttacgataaagaagatccttcaaaagataaagtcgatgttgtgattaaaacgggtagtttagatactcgtgatggtgaaaattatacggtgacgggtgatttaacacttaatggcgttacaaaaccaatttcactaaatgcaaaattaattggtgaaggtactgatccgtggaaagggtatcgcgctggttttgaagcaacaggtaaagttaatctgaaagagtttaactttaaatcagatttaggaccaaaatcgcaagaagcagaattaatcatctctgttgaaggtgtgaaaaaaaattaa

SEQ ID NO: 312448 - DNA, 423 bp, Proteus mirabilis; identical to SEQ ID NO: 308936

SEQ ID NO: 312449 - DNA, 729 bp, Proteus mirabilis
atgatgatctctttgaaagttatttctctgttattggattatcccagcgaagatctctgggaacatcgtaatgagatcattgatgcattgcaggaagctgacgagcttcctgtcacgcaagtcgcaaaattaatggcgtttattcgtgaactcacgcaacaagatctgctggatgcacaagcgaattacagtgagatttttgatcgaggtagagcgagatcgctattgttatttgaacatgtacatggtgaatcgcgtgatcgtggtcaggcaatggttgatctgcttaatcagtatcaacaagcagggatcaccttaagtagtcgtgaattgcctgattacttacctacttatcttgagtatttaacgctattgcctaccgatgaaagtattgaagggcttaataatattgcccctattttggcattgctgagtgagcgtttaaaacagcgaggcagtgattatcacgctctttttgatgtattgctttgtctctcacaaagtgagttagacgcttcacaactggcggctcaagtagaaaaagagcctgtagatgatacgccggctgcattagatgctgtatgggaagaagagcaagtgacgtttctaggtgaaagtgcgcaatgtggtagtaacaatattagccagcatcagcgacgttttgcgcaagaaacgcctgttcaatatctcaacgtcggtaattcgctggatatgggagcacaaaaatga

SEQ ID NO: 312450 - DNA, 1554 bp, Proteus mirabilis
atgaaaattcgttcacaagtcggtatggtactgaacctcgacaaatgtatcggttgccatacctgttcagtaacctgtaaaaatgtttggaccagtcgtgaaggtgtggaatacgcttggtttaataatgttgaaactaaaccgggtacagggtatccgcaaaattgggaagatcaagagaagtggaaaggcggctggatcaaaaatattaaaggtaagttagtaccaagaatgggtaaccgtgttgggctattatcaaagatttttgccaacccagatgtgccagcattagatgattattatgagccatttgattatgactatgagcatttaaaaaatgccccagaaggctcattacccaccgcacgtcctcgttcgttgataacaggtcagcgtatgaccaagatcgaaaaaggcccaaactgggaagatgatttagggggcgaatttagcaaacgtgctgcggataaaaacttcgccaatatgcaaaaagagatgtatgggcagtttgaaaatacatttatgatgtatttacctcgtttatgtgaacactgcttaaatcctgcttgtgtcgcgacctgtccaagtggtgcgatttataaacgtgctgaggatggtattgtgcttatcgatcaagataagtgtcgtggttggcgcatgtgtttaacagggtgtccatacaaaaaaatctactttaactggaaaagcggtaagtcagaaaaatgtattttctgttatccgcgcatcgaatcaggtcaaccaaccctatgctcagaaacctgtgttggacgtattcgttatcttggtgtgatgctgtatgacgcagataaaatttcacaagccgccagtgctgataatgaaaaaaacttataccaaagtcaattagatatctttttagatcccttcgatcctgaagttattaaagctgcagaagagcaaggtattccattaagtgtgattgatgcagcccaacgttcgccagtttataaaatggcggtggattggaagctggcattaccattacaccctgaatatcgtactttacctatggtgtggtatgtgccacctctgtcacctattcaatctgcggctgatgcaggagtgttgccacatacgggagtattaccggatgtagaaagtttacgtattcctgtccaatatttggctaacttgctgaccgcaggcgatacagcgccagtgttattagcattaaaaagaatgttggcaatgcgccattataaacgcgcagaaacggtagaaggtaaaaccgatttgacagcattagagcaagtgggattaaccgaagcacaggcacaagagatgtatcgctatttggcgattgccaattatgaagatcgctttgttattccttctagccatcgtgagttagcaagagaagcttttcctgagcgtaacggctgtggttttagttttggtgatggttgtcatggcagcgagagtaaatttaatctgtttaatagccatcgtattgatgccatcgatatcacttccaaaacccctcaagatgagcgccgttctgaggagaaaatatga

SEQ ID NO: 312451 - DNA, 741 bp, Proteus mirabilis
atggcactttctcaacacccagaaaaaatgaaaaaaggggtgatcgaaaattggcatcctgaagataaagctttttgggaaaaaactggtcaaaaaatcgcatcgcgtaatttatggatttctgttccttgtctattgctatccttctgcgtctggatgctatttagtgcagtcgctgtcaatttaaataaggttggctttaattttaccactgatcagctatttatgctgactgctctaccttctgtttcaggtgcgctactacgtgtcccttactcttttgttattcctatttttggtggtcgtcgttggacggctattagtacggtatttctgattattccttgtctctggctagggtttgccgtgcaagatctaacgacatcttattccacttttatcgttatctctctgctgtgtggttttgctggcgcaaacttcgcatcgagtatggcaaatatcagcttcttttttcctaaagcacaccaaggcggtgcattaggattaaatggcggactgggtaacttaggtgtcagcgtgatgcaattaatcgcgcctttggttgtcagtgtgggcgtttttgctatgtttagtggccccggtgtcgttcaacctgatggctcacgtttatggctagagaatgcggcgtggatttgggtacctttcttgcttatctttacctttgcagcttggtttggcatgaatgatctggctgctaataaagcttctttaagtcaatag

SEQ ID NO: 312452 - DNA, 225 bp, Proteus mirabilis
atggagttatttgcacgtgatcgcccaggcttattagctattataggtaaggtttttgccgatctttctctttcgttacatggcgcaaggatcaccactattggcgagcgtgttgaggatttttttgtattaacagataacgaaaataatgcgttaaaccaaaaaatgaaggatgaagtcgtagaaaggttgacaaaagccctcgtttcaaaggataaaatatag

SEQ ID NO: 312453 - DNA, 1164 bp, Proteus mirabilis
atgtcaaatatagcaacacaaaagcaaaaaacaccagataatgatgaatatacagacgctcttagtcgttgggagtcatgtaagccaccttacacaagtacacacataagaatctgtgttactgctgtcaaaaccattttaaagcatatcaataaaccacgtcgctctaaatatgaaaaagagcactacttgcgtattgattttagtaaggcgggtaaggttaccatatacgcggaatatcctaaacacatggatataaaaggccagaaattaggggaatggccagaactatcattaccaatagcaagagagaaagcgaaagcattagctgaagaagggctaagagctgaatctgttcatcaactattagatctttatgaaaaagatttagcagggaaagtcgaacgctcaaagttaagtgaaaatagtttttatacttatcgttgcagagtaaaacaactgaagctaacgttcggatcgcgtgaagtttttagtgatgtgaaatactcacgattaatagaaatattggataattggatacaaacaaaatcaaataatcatgcattagagttatttgctgagatgcgccgattttggaaatatgcatcccccatttattctaatggaagaaatattgcgtcgagcattcctgatgattatgtgttgtcacgggtgcagaaacccatgccaacgaaacgatatactgatattgagtccattgccaccttatggatgaacgttgcttcaagcacctctgtgcatcaaaaaaatgcagttagatatatgatcctcactggagttagaccaatcaatgttgtcaatttgaagtgggaatatgttgatttagataacttagaaataacttatccagctggtttaattggtatgcgtggtgcaatgaaaactcaaaaagagtttagagtgccaattacaaaggcaatgaaaagcttactcgaggaacaattagcttggaaaaattccactgttaattgcaataaagaatatgttttcctacaacctagagatccacaattagcgttttctaaacgttcattggataaattagttaaaacatatagccctgaaggggcggtgaagggtgtagtgcatgagggaacggtgaagggaaagtccggagcatttaatactatgtgccgaaagtaa

SEQ ID NO: 312454 - DNA, 795 bp, Proteus mirabilis
  misc_feature (31)..(40): n is a, c, g, or t
atgaatatacaaaactcaacttttcctattnnnnnnnnnnatactataatgaatataccaaactcaacttttcctattgtggcggttattcccgctgccggcataggtagtcgaatgcaagcaacctgcccgaagcaataccttaaaattggcagattgactatccttgaacatactattaatgcgctattaaaacatccacgcatttcgcaaattattgtcgcaattaacccagaagatgactatttttatcacctagcccttgctaaagataaacgaattattgtcgttaaaggagggggacaacgtgctgattcggtattatcagggcttcgctatattacagaacatcttgcgcaaaatacatgggcgctagttcatgatgcggcaagaccctgcctgtcctttagtgatttggataatcttattcaactcattgatgataaccatcttgatcctcaattttgtggtgggatcttagcctctcctgtgcgtgatacgatgaaacgtagtcatcaacaagataaccatattgaaaaaacagtggcaagagacacgctatggcatgctttaacgccacaatttttcccagcggccttgttaaaacaaaatcttgaaaacgcattggcacaaaacgtacccattactgatgaagcatctgcgatggaatttggtggatatgaacccttattagttaaaggccgtgcggataatataaaagtcacacaaccagaagacttggctcttgcagaatttttcctctctcgacaaattaccagcataaggaacacataa

SEQ ID NO: 312455 - DNA, 426 bp, Proteus mirabilis; identical to SEQ ID NO: 311608

SEQ ID NO: 312456 - DNA, 654 bp, Proteus mirabilis
gtgcaattaattggccgtgcatataaaactaaaattatgctcgataatgattttgtcgatgaagtattacctgttgctggtcaacagatgatctatcgtcaagtggaaaatagctttacccaacctaatgcacaggtcaatattaagatgttggaatgggcactatcagtcactgaaaactcaaccggtgatctgttagagctttattgcggtaacggcaatttctctctcgcccttgcgcgtaattttaagcgagtgctagccactgagatagcgaagccttcagtgcatgcagcgcaatataatatcgcgatgaaccatattgataatgttaaaattattcgtatgtcagcggaagattttactcaagcaatgaatggcgtaagggaatttaaacgcttagaagggattaatctacaagattaccaatgtgaaactatttttgttgacccaccacgcagtggtttggatgagaaaactgttgagttggttaagaattactcgcgcattttatatatctcttgtaatccgcagactctgtgccagaatttagaaacgctgatcaaaactcacaaaatcagcaagttagcactttttgaccaattcccttacacccatcatatggaatgtggtgtgttattggagaaaagataa

SEQ ID NO: 312457 - DNA, 402 bp, Proteus mirabilis
atggaacaaaatcgctgtgaaaaaagcacactattactttccgtagttatcggtgttgctttacatggtagttactcaactttatttaacccacttactggaccttggtctatttttccactgattagtttagttctagctgtttactgcttataccaacgttatttaaatcaaccaatgactgatggtatgcctaagttaattttctcattctttttattagggctatttggttacaatgcttatttaaaaacctctaaccctgaaatgggctctaacttcttctcttctgtatgtattgtgattattgctctatggatttatcgtcaaattaaacagcgtaaacgtctacgtgaacaggaagaagacgctgagaaagcatcgcaagcagagcaatattaa

SEQ ID NO: 312458 - DNA, 681 bp, Proteus mirabilis
gtgagtaataatattggcatcagagcgaaacaaaaagaaaaaacccgccgttctttgattgaagcagcttttagccaactcagtgcagaacgtagttttactagcctaagcttacgagaagtggcgcgagaagcgggtattgcacctacctcattttatcgtcattttaaagatgttgatgagttggggttaactatggtcgatgaaagtggactgatgctacgtcaattgatgcgacaagcacgacagcgtatcgctaaaggtggaagtgtgatccgtacatcggtttctacctttatggaatttattggtaataatccgaatgcttttcgattattgttacgtgaacgctctggcacatctgctgaatttcgtgccgctgtcgcacgagagatccaacattttattgcagaactggcagactatcttgagcaagaaagtaatatgccacgttattttactgaaatgcaggctgaagcgatggtgactatcgtatttagtgcaggggcagaagcattagatattgatattgaaaaacgccaacaattagaagaaagattagtaatacaactacggatgattgccaaaggcgcttactattggtatcgacgtgatttagaaacacctctacaaaataaccccgaaataaagaaaaaaatgcatcagaaaggagataaatga

SEQ ID NO: 312459 - DNA, 1398 bp, Proteus mirabilis
atgcaacattctcatttcgatgcaattgtaatcggttcaggtcctggtggtgaaggcgcggccatggggctggttaaacaaggaaaacgcgtcgccgtcattgaacgttatgatcaagtcggtggtggttgtactcactggggaacgatcccttcaaaggctctacgccacgcggtcagtcgtattatcgagtttaatcaaaacccgctctatagcgaccaatctcgcctgatcaactcctctttttctcaaatactacgccaagccagcacggtaatcagtcaacagactaaaatgcgtcaaggcttctacgagcgtaatcattgtacgatgtattcaggcgaagctgcttttattgatgatcatagaattagcgtacgttatcctgatggtacttgtgatattctcagtgcagataattttattattgccacaggctctcgcccttattgcccaccggatgttgatttctcacactctcgtatttataacagcgataccatactcgaccttgagcatgaacctcgccatgtcattatttatggtgctggggtcattggttgtgaatacgcttctatttttagaggtctaagagtaaaagttgatttaattaatactcgtgatcatctactgtcattccttgatcaagaaatgtcagatgcactctcttaccatttttggaataacggtattgttattcgacacaatgaagagtacgacaccatcgaaggcgttgatgatggcgttattgttcatctaaaatccggtaagaaagtcaaagccgattgtctgctttatgctaatggtagaacgggtaataccgatacgcttggtttagaaaatgttgggatcaaaaccgatagccgtggacaagtggcagttaatgcgcattatcaaaccagttgtgaacatatctatgcagtaggtgatgtgattggctatccaagcttagcctctgcggcttatgatcaagggcgcattgcggcacttgcgcttaccacaggcacctcggaaacgcatttaattgaagatattccaacgggtatctataccattccagaaatcagctctgtgggtaaaacggaacagcaactcaccgcaatgaagatcccctatgaggtcggtcgttcacaatttaagcatcttgctagggcccaaattgcaggtatgaatgtcggtagcttaaaaattctttttcaccgtgaaaccaagcaaattttaggtattcactgctttggcgagcgcgctgctgaaataattcatatcggccaagcaattatggagcagaaaggagaaggcaatactatcgaatacttcgttaataccaccttcaactacccaaccatggcggaagcctatcgcgttgctgctttaaatggtttaaatcgcttattttga

SEQ ID NO: 312460 - DNA, 918 bp, Proteus mirabilis
atgaatatccgtgatttggaatatctggtggctctagctgagcataaacattttcgccgtgcggcagattcttgccatgtgagccagccaacattaagtggccaaattcgtaaacttgaggacgaattaggcgttatgttacttgaaagaaccagtcgcaaagtactgtttacccagcagggattattgctagtagagcaagcgaaaacggtattacgtgaagtgaaagtgctacaagaaatggcatcactacaaggtgagagtatggcagggccgttacatattgggcttattcctactgttggaccttatttattaccgcatattattcccgaattacatagaaactaccctaagttagagatgtatcttcacgaagcacaaaccaatagcttattagctcagttagatagcggtaaactcgactgtgctattttagccatggtaaaagagagtgccccttttatagaagtgcctttgtttgaagagccgatgaaattagctatttatgatgagcatccatggcatgatcgcaaatcagtgccgatgggggacttagcaggccaacgtttattaatgttagaagatgggcattgcttacgtgatcaagctttaggtttttgtttccaagcaggggctaaagaagatacccattttagagcaactagtttagaaacattgcgtaatatggtcgctgcaggaagtggtattacacttttacctgatttagcggtacctcaagcgcaaaaacgcgatggcgtttgctatttagattgtacttcacctaatccatcacgttctattattttggcttatcgccccggatcgcctttgcgtaatcgttatgaacaattagcagagacaatccgtgatcatatgaccgcattttatgaggctaagaaagcagcatcaaaataa

SEQ ID NO: 312461 - DNA, 1383 bp, Proteus mirabilis
atggcactttggggtggacgttttagtcagcaagctgatcaacggtttaaacaattcaatgattcactgcggtttgactatcgactcgcacaacaagatatctttggttcagtagcttggtctaaagcgttagtcacagtaggtgtcttatcgcaggatgaacaagctcaacttgaacaggcactttatgaactgtctgaggaagtaacagctaatccccattctattttacaaagtgatgcggaagatattcatagttgggtagagagcaaactgattgccaaagtgggtgatttaggtaagaagttgcacactggacgtagccgtaatgatcaggtcgcgacagatttaaaattgtggtgtaaagaagaagtcgcccacttacgtcaggctattattgaattacaaaaggcgttagtggtaaccgctgagcaaaatcaacatgctgtgatgcccggttatactcatttacaacgtgctcaacccgtcacttttgcgcattggtgtttagcttataaagagatgttagcaagagatgagagtcgtttagcggatgcattaacgcgtttagatgtaagtccactgggtagtggcgctttggcgggtaccgcttatgatattgatcgtgaacaattagctcaatggttgggttttgccagtgcaacaaacaatagtttagatagcgtatcagatagagatcatgtgttagagctattatctgcggccgctattggtatggtgcatctttctcgttttgctgaagatttgattttctttaatagtggggaagcaggttttattgagctttcagataaagtcacttctggctcttcattaatgccacagaagaaaaatcctgatgcattagagcttattcgtggtaagtgcgggcgtgtacaaggggcattaaccgcaatgatgatgactctaaaagggttgcctcttgcttataataaagatatgcaagaagacaaagaagggctgtttgatgccgttgatacttggtctgattgtttgcatatggcaacattagtgcttgatgggttgcaggttcgccgtcctcgttgtgaagaggccgcaaaacaaggttatgccaatgcgacagagcttgctgattatttagtcgcaaaaggggtgccatttcgccaagctcaccatattgtcggtgaagttgttgttagtgcaattgagcaaggtaaagcgcttgaagagttggcgctatctgaattacagaagtttagtagcaaaattaccgttgaagtttacgagatcctttcattgcaatcttgtttagataaacgattagcaaaaggtggagtatctcaacagcaggtttcttatgccattactgaggccaaaaaacagcttaatatggatgagtag

SEQ ID NO: 312462 - DNA, 1212 bp, Proteus mirabilis
atgacgaaaggtattaaaaaaattgtactggcatattcaggtggtctagacacatcggctatcatcccttggttaaaagagcattatgacaattgcgaggtggttgcgtttgttgctgatgtgggacaaagccgtgaagatctggaaggcgtagagcaaaaagcattggcgtcaggggctagtgaatgctatgtggttgatttacgagaagagtttattaaagactatgtgtatccagtattaaaaacaggggcattatatgaagggagctatttgttaggcacttcaatggcacgtcctgtgattgcgaaagcacaagttgaattggcattaaaactcggggctgatgccttggcgcatggcgcaacaggtaaaggtaatgaccaagttcgttttgaaagtacttataccgcactggcaccgcaacttaaagtggttgcgccttggagagagtgggacttgcgctcccgtgaagctctactggattatctaaaagttcgtcatattccaaccacggcgacacttgagaaaatttatagtcgtgatgaaaacgcatggcatatctcaacagaaggcggagtgttagaaagtccatggaatgcttctaatgaagattgctgggcatggacggtagatccgaaaaaagcccctgatacacctgaacaggtttctgtaacggtaaaagcaggtgaagtggttgctatcaatggcaaagctcaatccccttatgagtgtttagctacattaaatacgctaggcgtaaaacacggtattggtcgtattgatattgtggaaaatcgtctggtcggtatgaaatctcgcggttgctatgaaactccgggaggcaccattatgatggcggcactgcgtggtgttgagcaactggttttggatagagatgcttttaaatggcgtcaacagttgggtttagagatgtcttatgttgtttatgacggtcgttggtttacgccaattcgggcttcattacaagctgctgctgactcgctggcaacagaggtaaatggcgaagtggtgttagagctttataaaggccatgtgaatgctattcagaaaaaatctgacaacagcctctactcggaagagttcgccacctttggtgaagatgaagtctatgatcacagccatgcagaagggtttatccgcctatactctttgccatcacgtattcgggcattaagtaaaaagaaataa

SEQ ID NO: 312463 - DNA, 774 bp, Proteus mirabilis
atggaaccattaattatcaaactaggcggtgtactgctagataacgaaaaagcgttaacacgtttttttacagcactacaagaatatcgtactagtcatagtcgtccattagtgattgttcatggtggtggctgtttggttgattctctgatgaaaaagctgcaattgcccgttgttaaaaaacaaggcctacgagttacccccgccgatcaaattgacattattactggcgcgttggcaggaagtgccaataaaacattgctgtcatgggccacacgctttggtttaaatggtgtcggactttgtttgggcgatggccaattagccaaagtaacaaaaattagtgatgaactaggtcatgtaggaaatgctgaacctggctctcctgagttattaaatctattactgaatgcagggtatctcccgattattagttctataggtgtgagtatccaaggtgaactgatgaatgttaatgctgaccaagcggcaacagcgattgctgaaaccttaggagcagatttggtgttgctctcagatgtaagtggcattttggatggcaaaggacaaaaactcacagaaatatctgccacaaaagcgcaagcattaatcgaccaaggcattatcaccgacggcatgattgttaaagttaatgctgcgttagaagcggcaagaacgcttagacgtcctgttgaaatagccagttggcgtcacgcggaaaaactgactgatttatttaatggtatggcgatcgggacacgtattttagcttaa

SEQ ID NO: 312464 - DNA, 1005 bp, Proteus mirabilis
atgttaaatactctgattgtaggagcaagtggttacaccggtgctgaattagcagcctatcttcagcagcatccccatgtgaatttgagcagactgatggtatccgctcaaagtatagatgcagggaagtgcttttctgagctttacccacaatatcgtggcttagttgatttgccacttgagcctatggtcgatgttgctaatgccgctaaaaatatcgatgtcgtttttttagccaccgcacatgaagtcagtcatgacattgcccctatttttctcgctcaggggtgtgtggtgttcgatttatccggcgcctaccgagtaaaaaataagcatttctaccaacaatactatggattcgagcataagaatactgattggttatcacaggcggtttatggtcttgccgaatggaacgctgatcagattagtcaggctcaacttattgctgtgccgggttgttatcccaccgtttctcagctgtcgttaaagccattagttgaagcgggattattagacagcactcactggcctgttatcaatgccaccagcggtgtaagtggcgcaggcagaaaagcgtctttaacaaacagcttttgtgaagtgagtttacaaccttacggtgtttttacgcatcgtcaccaaccggaaattgctactcaccttggcattgatgtcatttttactcctcatcttggtaattttgctagggggatcttagccactatcacctgtaagttaaaacaaggtgtcacagaaaatgaggtaaggcaggcatttgaaacagcgtatcaagaccaaccgttggtgcgtatgtatgacaaaggtctacctgcattaaaagccgttgtcggtaccgccttttgtgatatcgggttagcacaacaaggtgagcatttaattattgtcggtgcggaagataacttattaaaaggggccgcagcacaagcggtgcaatgtatgaacattcggttcggttttgcaccaaccgaaacacttatctaa

SEQ ID NO: 312465 - DNA, 1164 bp, Proteus mirabilis
gtgaatattaaattacctacatttattgagctttatcgacaattaattgcaacaccctcaattagtgcaacagatgctaagacagaccaaagtaacgaggcactgattaatctgttggctaattggttggaaacactcggtttttcaattgaaatacaaccagtacctgaaaccagagggaaatttaacctacttgctacccttggcagtggaaccggcgggttattactctgtggacatacggatacggtgccatttgatgaagggcgttggactcaagatccctttaccctaacggaaaaagaaggcaagttatatggtttaggtacggcagatatgaaaggcttttttgcctttattattgatgcattgcgagatatagatacctctcaactcacacatcctctgtatattcttgctacagcagatgaagaaacgtcgatggctggtgcacgttattttgccgctaataccgctattcgtcctgattttgctattattggcgaacccacctcattacaaccaatacgtgctcacaaagggcatttatctaatgctatccgtattactgggcaatccggtcactctagtgatccggaaaaaggtgtcaacgctattgagttaatgcatgaatctatcacctatctcagtacactgcgcgatagattaaaaacccgttataacaatccggcgtttgttattccctatcccaccatgaactttggttatattaacggtggtgatgctgctaatagaatttgtgcttgctgtgaattacatatggatattcgcccattaccgggattaacgctgcaagatcttgatgatctgctgcacgaaacattagccccggtaaaagcgcgctggccgggacgtttaagtgtcgaagcattgcacgagcctattcccggctacgagtgtccgaccgatcataaaatggttgccgtgattgaaaaactactgggtgagaaagcgcaaactgttaattactgtaccgaagcgccttttattcaagcgctatgccctacgctagtgcttggtccgggctccattgaacaagcccaccagcctgatgagtttattgatatggcttttattgagccaactcgtgaattaatggggcaattaattgaaaacttttgtttagcagagaaagcgaaataa

SEQ ID NO: 312466 - DNA, 822 bp, Proteus mirabilis
atggacaaaagtagaagtccgataaaggttttctttattagtattctggcagtccttttcttaatttttatttcacaatatgtgattggtaaaaaagaaattaagattggtattgcagtcattcctattctaccaatgttatttgcagttattattggtatgtttatgtcggctggatttacccgcaaaaaaattaaagtttggggtaaattatttacagaaaaagaagaaggcttctgcggtaaaatggtaggtttcagcctacttattttaggtacgcaatatgctggcatgatcgtcccaaatataaaaatgattttaagtgtcggtattcctttatttgttcaagagctaggaaacttattaccagtattaattgccgtaccattagccattaaatttggttttggtcgccgtgcaattggtgcatgttcatctattagtcgagaaccttctatcgccgttattcaaggtagatttgggactggctcacaagaatatattggtgtattagctatttacttatgtggttctgttatcgggactttatggtttagcgtattaggtagtcttgcaccattaacaggcttacacccacttgctctagcagcaggctccggcgtaggttcaggttcaatgttaagtgctgcatcaggggcattaattaacggtttagacgaagctttagcacaacaagtattaagtgttgcggctgcatctaacttattatcttctgcacttggcgcactctcattaacctatttaggtttacctctttcagaaaaaatttataaagttttcaccagaggcaaaactgcatga

SEQ ID NO: 312467 - DNA, 450 bp, Proteus mirabilis; identical to SEQ ID NO: 293870

SEQ ID NO: 312468 - DNA, 1182 bp, Proteus mirabilis; identical to SEQ ID NO: 293871

SEQ ID NO: 312469 - DNA, 165 bp, Proteus mirabilis
atgaaagattatatgcatgagtttatttcactctatgctccgcatattgatagaaatattattcagatgccagagcagtgggaaacccagtggcatagcaaagaagtgtatcaggggttacccgatctgatttcggtaaatagcaaagagaaaataatagaataa

SEQ ID NO: 312470 - DNA, 270 bp, Proteus mirabilis
atgtctcctaacttaaaggcattaccgctaaccatattatcagcaatacagagcaatagttttacgcgtttatttaaacctcgtgtaatagctaaagccaaagcacctgctaaggttgcagcaccgcccatatccgctttcatagaattcatggaagaagaaggtttgatgctatatccgcctgaatcaaaggtgatccctttaccaacaagacaggcaaagataggggcttcggcatctttagttggattaaaatctaatgctaaatag

SEQ ID NO: 312471 - DNA, 138 bp, Proteus mirabilis
atgctaacactttctaccatcgatatgcttttagcgataaacgaagggcagcttatagaagaagtgattatcactttattagcttctcctcaattagctgttttttttgaaaaacacccaagattaaaaaaagcataa

SEQ ID NO: 312472 - DNA, 2493 bp, Proteus mirabilis
atgtcagaacaaaaagttggcggtattgtttaccaagtatcaatggatataaagcctttattacaaggtgaaaaggaagtaagcaaatccctagaggagatgaataactcaacaaaaaaaaccacagaagcgcttaataagctagatagaacggccgctaatgttggttcctctttaaaaatgccagagataaacaagctatccagaaaaatgtctgagttagctggcagtattggcgctcagtcagcaaaaacagagaaagcgactcaggtgaacaatagatttgctggcgtcttaagtaccgtatcaggaacatttggcgctggctatgttagcaatgttggtagcgcaacaagtcaacttgttcagcacacaaaagccgcgatcctagccactcaagcagaattagaacacgctaaatcagcgcaaaaagaagcagaagcacttcaagccgcggcatctcagcaagtattaaatgcaaaagcagcaaaagaggaagctcaaagcaagttagcctcagttagtgctgaaaaaagcactattactgaaatagagcgctctacagatgcaaaaatgaaggatctggaggcacttcgtcagcgtcaaattttgatggttaaagatgcagaagaaaactaccagatgacggctagcgaaaagaatttaatggcggtaactaaagcaaaaaatgcactttacgccaccgaaaacaaaataaagacacagttgtcagttactggtaaagaaatagccgcaatagaggctcgtattgcagcagcaaaagaggcagaagcgcttgcaactaaacgattaaacgcagcaatagcgctagagcagaaaggtaaagcaaccttaaagtcagcaaatgaggcagttgccgcagcgtcagcaaaagtaacgctagccacacaggcacaaagtgttgccatgaatggattgaaaagcgcaatggcattattgggtggtcctactggattgtttatgttagccgcagcaggggtgtatgcgctttatcaatcaatgagcaacaattcatctattgatgattataagtcaaaaattgacgaagctatcaataaactagatgagcttaacgctaaacaagctgctgctgctgccgcatcaaaagcaaggtcagttattaatgaaaacacgaaagaaattgactctttagaaaagaaaataacatatatacgttcaataattcaaagtatcaaggatggtagcggtagagtttgggaggatgtgcaagatgtagatgaagcaaaacaaaaacttagcgagttagagggtaagttagtagatctaacacaagaaaacaagcactattcccgaacactggaattattaaacaagacagaaaaagaaaggacaggtaaaaccgacgaacaaatagaagctaatgctttatatctaaaatccgttggcggagttcgtgaagctaacgaattattgttgagaacattagagctaggctctccggttattgctgatatagaaacccagatagacaatcttgctaaatcacttgaggatgcaaaagtacctccagaggaagcagaaattgctatttcgaacctcagaacagcattagaagcgaagttatcaaataactttgaagtgatgctacaagaccttgaaaataatgttactgcattaaaaatagagatgaaggatggcaaagatgcggcgatagagtatcgtgcaagcgtcatggccgccaaaatgggcatgactgatgagggacaggtaaagcgttatatacaattaattaaagaagaaaccgaggctagggaaaagttaacaaatcaaaacaagaaatcaaaatcaggaaataacgaagctaaacgcattgacgatgccattaaaaaacaacaacaacagactgaggcgttaagaaaagaatttgaattattgagttctggcgcagctaacgtaaatagagagatggctatttttaacgctgttcaaagcctgggtactaacgcgattaaggagcaaaaggaggctattgctaaagaagccgccgaagtttttgacctcaaacaaaaagtcgatgactttattaagtcacaagaaatcacaccggagttaaaacttgcaagagcatttagacaagaatctgaagagcttaaacgcatgtttgataatgatttcattgatgaagaaacgtttaaggccttaggcaataaagcaatgaaggcatttgatgctggaatggctgaaataaaaataaacgcggttattgacccaataactgaagctaaagggcaatatgatccgatacaagcactggctaacgaacacgctaagaaacttgagatgatccgccaatttgaaacagaaaaaggggctatcactcagcgtggcttagagttaatgaatgccgctaatactcaatatgagcaagaccggttaaatgctcaatgggagatatggcgcaatcagagccaagccaatcaattcttagctgagatgggttggacgcattag

SEQ ID NO: 312473 - DNA, 183 bp, Proteus mirabilis
atgaagcgaaagttgcttgcccatatgattcaaggactagaaagcggtgcagtctatgattatgtgagttcacacagcggtgtttgtgcattagaacatgatggatttgtgagcttgcgtaagctgtctgatggcgattggaagcacccatatttggatatagtgttgaagcatggttgctag

SEQ ID NO: 312474 - DNA, 567 bp, Proteus mirabilis
atggatgtggagatattattcgttggtgactttttccaacatacttttgatactagcagagatggtaatattcaaaaaaacttacataacaactatgaaatatatcttaccaagctcaaagattctggatacacaatcgacttagatacactctcccacagctatagatgtagccctacagtttgtaggtttgttaccgaacaaattggcatcacaataagctcccatcgacaagatgaggtcagtattgccctaattgacgataatgagcatattaagagactattctccgacgactccatcgttaaattgttttttaaagaaagctacaagtatcttggaaggactgataattggggaaatacaaaaggcttggatgatttcgctgacatttgcatagttctaaacccaaccacattcacagcctataaaaaaggacggttggctacgttggcaccctcgacgttaaataagctatacgtagcttgtacaagagctaaaggtaatgtgtattttgtttcacaacgcttgttagacgagtataaatgtaaaccaagaatacagtaa

SEQ ID NO: 312475 - DNA, 147 bp, Proteus mirabilis
atgaaaactcaattaacaaggaacatacttggctcttgtattttattttctggtattcattctctggtgtttgcggctgaaacggaaaaaacagttcaatttagtagtttaaaagtctcatcggcacaaaaagaaacaccatggtga

SEQ ID NO: 312476 - DNA, 516 bp, Proteus mirabilis
atgaatttacttaaatcactggctgcagtgagttcgatgacgatgttttcacgagtactgggctttattcgtgatgcgattattgcgcgtatttttggcgcaggtatggcaaccgatgctttttttgttgcttttaaactacctaatctattgcgacgcatttttgccgaaggcgcattttcacaggcatttgttcctattttagctgagtataaaagtcaacagggagaagaagcaactcgtacctttattgcttatgtatcgggaatgctgacgttgatcttagcgattgtcacagtaatagggatagttgccgcaccgtgggttatttatattacggcacccggttttgctgattcagcggataaattccaactcacaacggatctattgaaaatcacctttccctatattttattaatttcattagcatcgcttttctgttccagcttttgcacctacgttgttaaacgtgagtatgatcttttttgctctcgttgttgctccttattgtga

SEQ ID NO: 312477 - DNA, 603 bp, Proteus mirabilis
atgattgaacgattatccccttggaatttaggggcaacgctgtatatgcccgcaacacgaaccgatatcgccgcaacaattattgatcaaaaaattgatggattacgttcattaattatttgtttagaagatgccgtcagtgatactgatattccacaagcattacaaaatctagcaacattattaaccacattatcagactataaaaagcatcatgattgtactgaatggccgttgctatttatacgcccccgccatacagaaatggcgcaatggctggttgagcatgtagatttaaccgtgattgacggcttagtattacctaaatttacccaagcttcattacccctttggtggcgtatcatcaaacccacccatttatgtatgatgccaacattggaaacagaagaagtgttcgacgttcttcaaatgacctcactggcagacttgctactagcccacccttgccataagagaattattgccttacgtatcggtggaaatgatttaatgaatgttatttctcttagacgtaatcgccatttaacactctatgatggacctatggtattgatgatcaacaaattatggatagagaattag

SEQ ID NO: 312478 - DNA, 537 bp, Proteus mirabilis
  misc_feature (505)..(514): n is a, c, g, or t
atgggaagtcttgccatcttagctcgagcgaaagggcataaagtaactggctctgatgcaaatgtttatcctccaatgagcacattattggaaaatcaaggcattgagctaattgaaggttatgatccacaacaattagaacctgctcctgacatggtgattattggcaatgcgatgactcgagggaatccttgtgttgaagcggtacttgaaaaaggattgccttacacatcagggccacaatggttacatgactatattttacctgagcgttgggttttggccgttgcgggtacccatggtaaaacgactacggcaggtatgctggcttggattttagaagattgtggttatcaacctggttttttaattggtggtgtgccgggtaactttcaagtttcagcccaattaggggaaagcccgttttttgttattgaagctgatgagtatgacagtgctttctttgataaacgttctaaatttgttcattactcgccacgtacgnnnnnnnnnnccacgtacgcttatcttaaataa

SEQ ID NO: 312479 - DNA, 285 bp, Proteus mirabilis
atgggtaaagttagcattacagaaattaaaccgttagatatgttagaagtgcttcggaagttagaaaaacgcggtgtgttggataagcttaaaaagataaggcaggcatgtaaccaagtattccgctatgcaattgtgacaggacgggctgagtataatcccgcatcagaattagccggcgcactgtctactccaaaagctaagcattttcctcacttaaatgtgaatgagttacctgagtttttacaggcactatctgtatgtagtggaagtaagatcacttag

SEQ ID NO: 312480 - DNA, 216 bp, Proteus mirabilis
atgtatttagaagttgctccgaatggttctaagtattggcgtatgaaatatagatatgctggtaaagagaaaaggctggctttaggtgtatacccatcaatatcactcgcacaagctagggcgaagagagaagaagccaagcgcatattagcgttaggtgaaaagatatctttccttatatgggtaaagttagcattacagaaattaaaccgttag

SEQ ID NO: 312481 - DNA, 1134 bp, Proteus mirabilis
  misc_feature (1037)..(1046): n is a, c, g, or t
atgaattttaataatcggttacacctcatttcttatcgttattctcttccgttttgtgttgctttggggattggggtgataacaatttcttcattcgctgctgaagaagctgaatttgatcctagctttttgcattcagtgcaaggaaagaatgcgattgatatacgtcgctttaattatggcaaccctattcctgagggcaagtattacgctgatatctatctcaataatgaatggaaaggaaaagctaatgtacagtatttatatactgacaatgcgaatacgtcgacgttatgtctaacgccggaattactttcattaattgatgtcgtcaaaggcactgttcctgaaaacagttataaagccacttgttatcccgcctcagaaggactcccctcagcaaaatttcattttgatttatccactttaaagctgaatatagaaattcctcaggcacaagtgaatactcgacctcgaggatatattgcccctgcacagtggcaaagtggagtccctgccgcatttgtcaactatgatgttaactattatcaatacaatactccggatataaataatgagcagacttaccttgggttaaaagcgggactcaatttatggggatgggcttttcgtcaccgtggtggtgaaagctggaataatggtcattctactgggtatcagaatatcgaaacaaatgtgacgcatgatattgctcagttacgggcacaattcacattaggtgatttttatacgaatggcgagttaatggatagccttagcttacggggaattcgattagcatcggatgaacgaatgttacccaactctttacgtggctacgctccgatcgtgcgaggcattgctaatagtaatgctaaagttacgatttatcaaaatgctcacatcctttatgaaacaactgtgcctgctggcccctttgtcattaatgatttgtatcccagtggatatgctggcgaccttcttgtgcaaataaccgaatctaatggacaaacaagaacatttacggttccttttgnnnnnnnnnngttgcccaacttattcgtcccggatttagccgttggcaaatgtcagtgggacgctatcgttatgcaaatgagacatatcatgatttaa

SEQ ID NO: 312482 - DNA, 1455 bp, Proteus mirabilis
atgtcagtgggacgctatcgttatgcaaatgagacatatcatgatttaattgcacaaggcacatatcaatatggtttgacaaatgatatcactttaaatagtggactgaccacaagctcaaaatataccgcaggattggctggagttgcttttaacacgccgattggggcaattgcatctgacattacattgtccagaacaacatttaatcactctaacgtaacgcgtaaaggctacagtttacatactagctatagcgtcaatattccgaccacgagtacaaatatcacgttagcagcctatcgttattcatctaaagatttttaccatttgaaagatgcgctattggctaatcacagtgaatttattgatgatgtttccataaaaagtgccgcattttatcgccctaaaaatcaattccaagtttcaattaatcaagaattaggtgaaaaatggggaaatatatttttaactggtaccacttataattactgggaacataaaggaagtcgtaatgagtatcaaatgggatatagccatttttggaaaaaacttggttatcagattggcttttctcaatcacgagataatgagcaacaacgccgagatgacagattttatgtgaactttacgcttcctttgggagagcgtgttcaaagccccattttttctactgtcttaaattataataaaggcgagaaaaacagcattcaaacatccatcagcggtatcgctggggaagataatcaattctcttatggtatttcaggtaatagtcaggaaagtggaccttccggctatgcgatgaatggaggctatcgttcaccttatgtaaatgtaaccgcaaccgtcgggcaagatactcaacataatcgtcaaatgtcattgggtgcgtcgggggccgttgtcgtacatccttatggagtgacgttaagtaatgatttaagtgatacttttaccattatccatgcaaaaggagcacaaggtgcggtcattaataatgcaccaggtagccgattagatttttggggaaatggtattgtgccttatgtcacgccttatgaaaaaaatcaaattagcatcgaccccactaatttggatttgaatgttgagttatcagcaacagaacaagaaatcattcctcgcgctaatagtgccacgttagtgacatttaatactcaaacagggagaagcctactatttgatattcgaatgccagatggtagtactcctccaatggcttccgaggttttggatgagcataagcagttagtcggatatgtggctcaagctggacgcttatttacccgcggtcttcctaaacaaggtcaacttgatgtgatatggggatcaaatcatgacgataaatgctcatttacatatcatgcgacacgcaatgaaactgacatgcgacctcaaaccattcctgttcagtgtataccgcactctaattag

SEQ ID NO: 312483 - DNA, 180 bp, Proteus mirabilis
atggaactgaaaaattgtcctcttattaacgaaattaaacgacaaattggctctcatactcatattttagtgggttttagtggtggagttgattcaaccgttttattgcatgggttggtttgcttacgtgataaatatcaacttcctttagaattaacggcaatttatgttcatcagtga

SEQ ID NO: 312484 - DNA, 126 bp, Proteus mirabilis
atgaataaagtggtcgaacaagaaattttacgtgctcctgatcaatatatgtggttacaccgtcgttttaaaacccgcccacctggagaagcttctttatataatgagataaagaaagtacactag

SEQ ID NO: 312485 - DNA, 282 bp, Proteus mirabilis
gtgaatattgaaatgattcagaactttcaaattaaaccatctattcttgatggaaatacgcttaagtttatgctttataccatagtgttttttctgttactgacacaagggacgggtgtacggctcatgtttcctataaatgaaaatgttgcaacatactatgttgaaaaacatggttttcaggatttaactggtgatggttcaaaagaaatactttaccgctcagcagaagatttattaaattggtttgagcaaaataaccgctcagttgatagtgagtga

SEQ ID NO: 312486 - DNA, 507 bp, Proteus mirabilis
atgctaaaaaaggggaaacgtgggctgttttcaccgaatttagatcccttaactttattaggtattgaagctcgtacttatgaggagcgacgttattttgctgaattagtggtgaggcaagaatttcagcgtgttgaagcagaattagcctttcagcgagaggcgaatcaagcatggcttcgtctttatcctgaaattttaccaattcaaaatgaaatgagagaaagtcgtcaggctttatttgtaaaagaaagttgttctatttgtgaggtaaaactcgctcagcttatcaaactaaatcaacctattgatatctatttagtgggaagtggggggaaagatgatgtgatacgaaattgggctaaaaaacatcatattcctatcgaaaaggtaaaaaatcgccatatcacattaaaccatgataacgggatatggctaaagcatggcaatggaataatgcctgttgttttacaacaaggaacgcaaggatggcaaagagtcgattag

SEQ ID NO: 312487 - DNA, 132 bp, Proteus mirabilis
atgtacaaatacatctttacttccatctttaggagtgatgacttcaaatctttgatggaaggccaagaagtttcatttaccatggaaaatggtatgaaaggcccagcagcaggcaacgtggtggctctctaa

SEQ ID NO: 312488 - DNA, 261 bp, Proteus mirabilis
  misc_feature (208)..(217): n is a, c, g, or t
atgaaaataaccgtattaggatgtggttcaattggtaaactttggattgcaggattaacgcaacaagcccatgaagtacaaggatggttaagaatacctcaacctgattttgacgttaacgttgactccattaatggtatcccatttcaacaacgcattatagccaaccaaaaaacatggctacaacacagtgagttactgcttgttnnnnnnnnnntgcacttatccctcacctctctgctgattgcccgattttactga

SEQ ID NO: 312489 - DNA, 642 bp, Proteus mirabilis
atgattatttcgagccgacatcgtcgcgttaattccgttgattcggtgatccactctttagaagtgggtgatggtccagaaaacagtggtagttggttgatcactatggccgatgcagtgacagatgaaataggtgattttgttgaaacacttcatgaccaattaattgagttggaagatatgatcctcgatcagcaaattccggctcgaggtgaattggcattgctacgtaagcaactgattgtgttacgccgttatatggcgccacaacgtgatgtattctcccgactctctatcgaaaaattaccttggatgagcgacagtgatcgcattagtttggttgaaatatcagaacgtctctcgcgtcgattagaagatttagatagtagtatttctcgtacagccgttattgctgatgaaattacttcaatgatggcagatgcgatgaacaggcgcacatataccatgtcattaatggcgatgctatttttgcccacgacctttttgacaggactatttggggttaatttaggggggatccccggcaatgaatttccttatggctttgctatattttgcttttcactgtttttcttgattgtgattgttgcttggtggttaaagcgtagtaggtggttgtga

SEQ ID NO: 312490 - DNA, 534 bp, Proteus mirabilis; identical to SEQ ID NO: 296991

SEQ ID NO: 312491 - DNA, 162 bp, Proteus mirabilis
atggcaaaactttcagaaatattacttaacaatgcaacaggtacaaactctgtcgtattaaatacgaaagcagcaaatgatagaataattaccctgatccacgccgtcttacggattacttcattaatgctattgggtgtggtgatattcataattgtttaa

SEQ ID NO: 312492 - DNA, 225 bp, Proteus mirabilis
atggaatgtgaagcaccagaagctattaattacttactggcagagatagataaatgctggcaattacctaatgataaaaaaccaatgattttacaaccccattaccaattagctttatctcaattatggataaaaacattgcaaacagcaggtaaagccattgatggcacaattgcgccatttaagcgaatgaacttcaccaaaagtagtggacggagaaaataa

SEQ ID NO: 312493 - DNA, 378 bp, Proteus mirabilis
atggaaagcattcaacgagcagttaatcgtgagttctttttagggctgtttgaatatgaagctcatttcgcttgttatgaaaaaggtgctttctataaaaaacatcttgatgcatttaaagaaaatgtcacaagacgtttaacgacagtgttatatcttaatgatgaatggacaccacaagacggtggagagctagttatctatgatctggatgataatcaattggcgacagtcgcccctcaaggtggtcgtttagtggtttttctttcagaacaatttccacatgaagtattacctactcataaagaaaggatcagtattgcagggtggtttcgagttaatggtgtcagagataattttctcgatatcgccagctaa

SEQ ID NO: 312494 - DNA, 276 bp, Proteus mirabilis
  misc_feature (240)..(249): n is a, c, g, or t
atgaatatagcaagtcttcttgaacaaattgcagataaaggttggtgtgtatgggatgatttccttacaccagaggcggttaaacaattgcgtgcttgttttggtaatgatgcacaacaagcacgtataggacgtcatgaaaacctattagcagaaaccacgatacgcagtgataaaattcgttggctagagccgcaaatgggagagccagttcaacattatcttatgcagatggaaagnnnnnnnnnngatggaaagcattcaacgagcagttaa

SEQ ID NO: 312495 - DNA, 459 bp, Proteus mirabilis; identical to SEQ ID NO: 294761

SEQ ID NO: 312496 - DNA, 558 bp, Proteus mirabilis
gtgatcaattttgatctagaaattcctgatggcgttattctttacgacgacagtattaaacttaattgcacccctattgtgaatttatttcctattgatagtgaagcaataaatttgacggggaaaagtgaggagtatgttttaagtcctaattaccaacttactgaatgttttgatattttttcgattaatgaggttagagggttacgttatcctaatgatgctaaaccttatccgatcacctatacagcatttgaaagtttttatcatcaaaaccatcagactcaaaatcatggctattaccgtttaaagataagtcaaaatgaacagttatacggctattcccatcgactttcttttgttcgtcagcaagagcctcagttacaacagtgtgaagaaaccgtttctgttgcactcaactgtactaaccgctatatcgcttcccagttatcgacgcgttctatcgatttagatagtgcatcaattccttatggggctttatctgctaagaatttattcgcaccaacactgcctttatatctggcgcagtattgttaa

SEQ ID NO: 312497 - DNA, 414 bp, Proteus mirabilis; identical to SEQ ID NO: 299331

SEQ ID NO: 312498 - DNA, 435 bp, Proteus mirabilis
atgtttaagaaggcgttattgagtttaactgcaggtgcattattatttaatgctagttcagcattagcggctgattatcaaattgataaacaagggcaacatgcttttgtgcaatttcgtatccaacacttaggttatagctggttatacggcacatttaaagattttgatggaaagtttgtctcaaccaaagtgactcgtgatggtgaaaattatacggtgacgggtgatttaacacttaatggcgttacaaaaccaatttcactaaatgcaaaattaattggtgaaggtactgatccgtggaaagggtatcgcgctggttttgaagcaacaggtaaagttaatctgaaagagtttaactttaaatcagatttaggaccaaaatcgcaagaagcagaattaatcatctctgttgaaggtgtgaaaaaaaattaa

SEQ ID NO: 312499 - DNA, 369 bp, Proteus mirabilis
ttgttttggctcaatattcaggaaatcccgccaatttcttctgccgatgacagtaatgtgcttgctgttgcattaaacacacaagttaaactgatttatcgccctaagattttagctgaaaaacgcgaggatgcagaaaaacgtctgacatatagtggttcagttttaaagaatcctacaccttactattttgcattaactcaagtgtcagtcaataataatcctttggtcttgtcaaaagacattgagcaatctattagtttatttccacctttcagtgaggtaaatgtgcagcgcccattgttaggtaaagtaaccgttgaagctattgatgattatggtgctagacgtgttattgagcttaattaa

SEQ ID NO: 312500 - DNA, 390 bp, Proteus mirabilis; identical to SEQ ID NO: 306771

SEQ ID NO: 312501 - DNA, 360 bp, Proteus mirabilis; identical to SEQ ID NO: 309417

SEQ ID NO: 312502 - DNA, 366 bp, Proteus mirabilis
atgaatgagttattacatactagaaaaataatgcgctttctattatggggaatgctactttttagcggatatacagtattttttactaaagatgcaacagcagaattagctaatacaaatattgttataaaagcgaacattgtggcaaatacttgtagagtcagccctgattcgctaaataaatttgttgacttaggggtttggggaacaaaagattttcagcaaaaaaatacaacagagccagtaaagtttacacttaacttaactgattgcagtattgttactagcggtgtaaaagtaatgtttagtggtgatactgacagtaaggaatgcggctcaaaatataggtattgctattttagataa

SEQ ID NO: 312503 - DNA, 1266 bp, Proteus mirabilis
  misc_feature (1248)..(1257): n is a, c, g, or t
atgaatatagaaattgaagttagtgagctacaatctaggcaaagagtattgcatgaaaaaattgataatttggcaaaaaaactacctgaggaaagtgcaacgcgtaagcagttagctaatcatagagagctttttgacgacgccattcattatctttcaaattcaaagcaaagattggcatttatcggtaacattggtaccggaaagacaactgccatatgtcatctcttaggcttattagatgggaatgaaccaatccttagtactggtagcggtcggaccacgctttgcgaagttgaaatatccactggtgctcaattaaggattgaagtaactccgcactctgaagccgaggtgaagagctatcttaccgattttgcgcaatacttacatgtatcagatatagcaacatcggatacttcagattcatttagactaagcgctgaagttgaaagagctctccgtaacatgctcgaccttcgaatatcacggacgaaaaatccagaaggaaaacgaattgctatagacagcgcgaagaatttcgcagctgattatcaatctgttgaacttttggctgctgggctgttggggcgcattaacttatcgtctcgtcaacaaacgttattcactaacgatgatggggcagagcaaaatctatggttgcattcaacattcaaagccataaataattgtactcacccaaacgttggcttaccaaagcatattcgaatatcagtacctttaaaactttttgatccactagattatgcactatcgataattgatacaaagggggtcgatcagacggttaaccgagtcgatctcgatagctgtctaactgataatcgcaccgtcaatgtaatatgttgccgatttaacgaggcacctgataaaactatgtcaggattactaaaacttgccaaggatgcggggctaagccaacgaatcgcaaatgaaacaattttgttaattctagatagggaaagtgaagctgaaaatattatcgatatagatgagccaattggtgacaaatttgagggacgcgaaattcgtgcagaacagatcacgaatgatctaaagcacacgctacaattggacaacttagatgtacaatttttcgatgtaaagtctgatgatccgaaccaccttagcaaaatattggtagaaaaagtttctaaattacgtcgtcaatatactcagaatgtaattgatatagagaaagctattagtgatatcgaaactgaattnnnnnnnnnnctgaattag

SEQ ID NO: 312504 - DNA, 159 bp, Proteus mirabilis
atgtcatggaaacctttaatcatcattatcagctttatccttgcattactcatcacagtcgctggtggtatttatctcttgattgataactcatgtactaaagaccaagtgagtttagaaaaacgctgtcagattgcactctcacatcatcggtactaa

SEQ ID NO: 312505 - DNA, 345 bp, Proteus mirabilis
gtgaaaagtttcagtaaagacggttcgacaaccgaacaaattgatgtcaccaccatttgcagtgatggcaaggaatatgaatccggtgatacggaatacggctcaattaaattgacctttttcttacggtatagctccagtgatgtgcagcggctcttgcgtaaatatgaaaacagcaaagaaaaatttgcggtgaaaatggtcttaacgcgagatgaaggctccatgttttattacggctctgtcgaaacgggcatgaacattgatggcagtgtagggcaaatgatggattcggggatctcgattaaattgtctggccgtgattatttgaatgtgaagaaataa

SEQ ID NO: 312506 - DNA, 339 bp, Proteus mirabilis
  misc_feature (300)..(300): n is a, c, g, or t
atggcaaagtcaaaaaaccataaagcgacgcctttcctcggcacgaagatctttgtacaaaccggcttaggagaggtgatgaccgtgacggaagcgacgttatcacccgcaaccattaccatcgccaataataagctgaaagccgatgacatgattatgttatcgggactcggggagttagatggacgttttcctgttgcacaggttgatggcaacaaagtgaccctgtgcgacgaagtggattggagtgataaaacgctacccactgattttgcaaacgccaaagcacaacgtattcantggtctaataactttctgtgcggtgaaaagtttcagtaa

SEQ ID NO: 312507 - DNA, 924 bp, Proteus mirabilis; identical to SEQ ID NO: 25590

SEQ ID NO: 312508 - DNA, 153 bp, Proteus mirabilis
atggacttgaagtatgcaaccagccttacagtttcggaagtacgagagcgtgtatgggatgattgtattcgtccgttattacaggagtatcttcgtggaacgggtaaggagactgaactgattagctccttcggaaaggcgtttggggtttaa

SEQ ID NO: 312509 - DNA, 1044 bp, Proteus mirabilis; identical to SEQ ID NO: 309409

SEQ ID NO: 312510 - DNA, 153 bp, Proteus mirabilis
atgtctgtagtcgttggtgttggagtgatcatcgtcaatgaaaaaggtgaagtattattaggtaaacgctgtggtaaacacgccccttattggtcaatttttggtggccatgtcgatccgggggaaacctttgagccaatgtgctattcgtga

SEQ ID NO: 312511 - DNA, 969 bp, Proteus mirabilis
atgtctgcatcttatttaagtcgtgttaatgcgataaattggaatcgtattgaagacgaaaaagatttagaagtttggaaccgtttaaccatgaatttttggttacccgaaaaaattccactttctaatgatataccttcatggaataccttaacccaagctgaaaaacagttgactatccgtgtatttacagggcttacactgctcgatacgatacaaaatacggtcggggcaccaaccttaatgcctgatgctcagactcctcatgaagaggcggtattatcgaatatctgttttatggaagcggtacatgctcgctcttatagctcgatattttcgacactctgcttaacaacagatgttgatgatgcttatcgttggagtgaagaaaatatctatttgcaaaagaaatcagatattattctgcgttattatcaagatagtgatccattaaagaaaaaaattgccagtgtatttttagagtcttttttattctattctggattttatttaccaatgtattggtcaagtcgagggaaattaaccaatacagccgacttaattcgtttaattattcgtgacgaagctgtgcatggttattatattggctataaattccaaaatcagttattaaataaatcatcattagagaaacaagatattaaagactttgctttctcattattattagatttatatgataatgaagttaaatatacagaagatctctacgactctgtcggttggacagaagatgtaaaaaaattccttcattataatgcgaataaagcgctgatgaatttaggttatgaagcactatttccagatgaaataactaatgttagtccagcaatactttcatcactatcgccagatgcaaatgaaaatcatgatttcttttctggctcaggctcttcttatgttattggtaaaacgatcaataccgaagatgatgactgggatttctag

SEQ ID NO: 312512 - DNA, 2175 bp, Proteus mirabilis
gtgttcaatttgtttaatggcgcccgccgatttatctataatagccactttttatattatattcgcataataatcgcacttacgggaacgactttatttccatgggctttaggacaagaaccaaaatatactatacctcttacattaggtgttgtcgcagccgcattaactgacttagatgataggcttgtgggccgcttaagaaaccttgtgatcaccttatgttgtttcttattagcatcaacatccatcggattactctacccttaccctattttattcttttgtggtcttgctatctccacttgggggtttattttattaggcgccttgggtcagcgttatgctaccatcgcctttggtgcgctattaatcgctatttataccatgttaggtatgccgattttcccagaatggcatgaacaacctatttggctccttttaggcgcgatttggtataatttgcttaccttaattggtcacctacttttccctattcgtcccgttcaagatagccttacgcgttattatcagcagctttccgcttatctagaagccaaggccgcattatttgatcccgatattgaaggtgatcaacagcaattactgtataacttggcattggctaataatcagttaattgaggccatgagccaaactaaactaacattactaagccgtttaaaaggtgataggggccagcgtagcagtcgtttcacattgcattattactttgtggctcaagatattcatgaacgggccagctcttctcatattcaatatcaattactgagtgatagattacgccacagtgatgtccttttccgctttcagcgcttactgtcaatgcaagcaagagcctgcgaacaagtcgctcaatctattctttggcataaaaagtaccaacataatcctcattttgaacgtgcaatcactcatttagaaaatgcacttaataatgtaaaaaacagtacttctgatccacaaattattgcgccactctataatttattacaaaacttacagggcatcgatgctttattaaaaagtattagtacagagcaatatcaaatctctcatgaccaaaaagaagaaactcagttatctgatgaagggcttactgggtggcgagatatcgtgctaagaataaaaggtcacttaacaccaaaatcagctctatttagacatgcagtacgaatgtcacttgtcttatgtataggttatgtgatcatccagttttttgatttgcatcgagggtactggattttattaaccagtttgtttgtttgtcagcctaactataatgcgacacgtagacgattaacattacgggtcagtggcactattattggtattttaattggtttccctattctctattttgtgccttccatcgaaggtcaattagtgcttattgttgtgacaggtacgctcttttttgctttccgaaccgtacaatacgctcatgccactttgtttattaccctactcgttttattgagttttaatttattaggtgaaggctatgatgtcgcactaccgcggatcattgatacgttaattggatgtgccattgcctggttcgcagtcagttttatttggccggattggaagttccgtcagttgccattgctcatccaaaaaaccatgaccaataactgctactatcttgatgcgatcctcattcagtattatcaaggaagagataatagcgttaattatcgtattgcacgccgtaatgcacatagcagtgatggtgagttagcatctttaatttctaatatgtcatcagagcctaaaagctttcaaacctctcaagaagaagcatttaagttactgtgtttaaatcatactttactgagctatatttcagcgttaggtgttcatcgttgcaaaattgaagatgaagcggtactcaccctgcttaatgatactgtctgttatattgattcagcgttgagacgtaaaaaaccacaagataatgattttatacaatctcacgatcaacttatcgcacgtgttaatgcacaaccaagttcagataacgcccgtattcaattagtgttaacgcaaatacgcttgttactggatttattgccacaaattgtcaattgcattgagctaattgagcaaacagaatggcaaaacgataaagataaattagctacagcttga

SEQ ID NO: 312513 - DNA, 798 bp, Proteus mirabilis
atgcaactgttccagattttcccgggtggtggtctccagcaccggtgccagcccggtccccggctgggaactgcccggctggtttgcctcaccgccgctctgacaatccgccggattggtgcaggtgcggaccgatttgctgcccagtacctgtgtcacgacctgagccgcctgctcactgttggtaaaccgccggcacgccgccccggtacactggccggccggcaccgaagccgtgctggttgccggcagaccgttcatgagattaaaaccggcctgggcaaaatcctgtgccggcacaatggctttctgaccagctccgccccgtttctcacccccaatccactgcacgccggccttgccgtccggctttttttccacctgattcatcgtcccgaccgcatcaccatccccgctgttgatgatgttcccggcctcttcaagtattgctgcctgagtccactgattgttctcggaaaaatccatcatccgtttggccatgttctggcagctcagctgcgccttatcaaatgccacattggcctgcaacaccccgttggtcagcatttcatacagaccgggattcgcccgctggatagccatcgccggcagactggccaccgctccggtggcattctggatcacctcactcatcagattcttaaagccgtcagtcaccccgttcagctggttgcccacggtggttttgatatcaaaattgccgcacatcagatcactgttccagcccatactcatccccaggcgttgcagattactgcgccccggcggctgggataa

SEQ ID NO: 312514 - DNA, 198 bp, Proteus mirabilis; identical to SEQ ID NO: 296348

SEQ ID NO: 312515 - DNA, 417 bp, Proteus mirabilis
atgccgttagcactgcattttattaatcaatattgtttagagcagaaagcatcaaaacctgttatttcccctgatttatctgcttatttagtacaatatggctggcctggtaatgttcgtcaattaagaaacacaatttatcaagccatggctcagttagtaggcaatacattgcgacctcaagatatcgccttgcctgagcatactgcggatactttatttgatgaagatttgcttgaaggctcgttagatgaaatgactaagcgatttgaagcttctattttaaggcgtctatatcgtgattatccaagtacacgtaaactggctaaacgtttaggtatttctcataccgcgatcgcaaataaattacgtgaatatgatttaacaagtaaaaaagcggataaaacagagaaataa

SEQ ID NO: 312516 - DNA, 534 bp, Proteus mirabilis; identical to SEQ ID NO: 304386

SEQ ID NO: 312517 - DNA, 828 bp, Proteus mirabilis; identical to SEQ ID NO: 306506

SEQ ID NO: 312518 - DNA, 1419 bp, Proteus mirabilis
atgacaaatgattatttcacccctccatacaatcttgaagcagagcaggctgtactaggtggcttgatgatcagcactgacgaagataagcgtcaacatgtgatatcactagttaaatcaggatcattttattcaagatctcacagtagaatttttacagagatagtgaagttaataaaatctgattatccaacagatatcattacagttagtgactctttaacacgtagcggtgatttagaaaaagttgggggatttgcctacatagcggagctttgtagattaccttcagttgctaacattgtgaattacgctcggattgtacgagacaatgcaatacagcgttacgctatcaataatctgaatacttgtgtagagatgctaatggcgaatgatggtcttgatatcaacaataaactatcaaatgttcagcaggttgtatcaagcattatcgaacacgctaaaacaggaaaaagcaaaggcttaagacctgctctagatgttgttggagattggcttgataatgttgataggcgctttagtgatcctaaaaatgcagtgggttttactttgggtatagagtcactggatgagttaatggctcccaagcaggcattgagaggatcattaattgttgttggtgcaaggccaaaaatgggtaaaaccgcattttataatcgtgttgcaactcactttgcattaaaccacaagttacccacattgcttttcagccttgagatgacagaccgtgggatcattgaacgaatgatttctcaagaaggcgatgtatctgcagatattttttatacaggtacacatgatgatatggaaatggccagagcattagctagagcaaaagagattgcagaatcgaatatgtatatcgatagcactcctagtattgatcttaaccatatcattgctgaatgtcgcaaggttaaacgagttaaagggcaaataggcctaatagcgattgactatcttacccttatcaaggctggtccggctgaacgtcgtgatattgcatatggtgatattactacggggttaaaaaacctggcaaaagaaatggattgtgttgtcctgttattaacccaacttaaccgtaaattggaagatagggcagataaacgaccaacacccgctgatagccgtgatacagggcaaattgagcaagattgtgatgtatggattggtttatatcgtgatgctgtttacaacgataatgctgataaatcgctaatggaaattcttcttagattgaaccgtgatggaaatactggtaccgcttatgctcagttggtgaattcttatattaaaaatattagtaagtgtgaggcggaaaggttgtcatttaaaggaaatgacaatagaaaaagctatgcacgaaaaggacagcaagctacagaagcattttag

SEQ ID NO: 312519 - DNA, 429 bp, Proteus mirabilis
atgggcaagctatccccgttatccggcgaatatcgtctcaacccaaattattgctatcttgatcaacatttaactttattagataaatcattacccgttgctgaagcgttatatcaataccagccattaatgaccattgagcagtggcgcacaaaactgggtatgttacgtattcgaggtaacaagtctttatttcctttagaaacactcagtggcggtgagcaattaaaagcaacactattagcattaatttatagtcctcaaccccctgccgttttattattagatgaaccagataattatttagatttagactctaaacagttattggaaaatttattatttcaatatcaaggaacattattattaatctctcacgatgaagattttgttaaacaatgtggtataacaaatacattattactctaa

SEQ ID NO: 312520 - DNA, 927 bp, Proteus mirabilis
atgaccaatttacgcacagtatcaaaacacccagagcaattagaaaccacaccattagttgcagaaagtcatcactatgatgaccctttagcacctcaaaaactggtatttttagaggcggtcaatcaacagcgttgtgtaattaactcaccacagcgcaatagccaactcactaatacaatacccttttttatagtgcttctagtaatgactttttatactctgtttgggtttatagataatcatctaggtaagaaaacatctatggaacagatgtctaaatacttagaggaaaaatatagttatttatctgaggataagaggaaaaataatagatctgttgttctatattcaccattttttaataaagaaaaaattagctggtgggagtatataaaagcgtataactccggtgaattttttattgatagccaatatgataaatacctcgtcattggctggctaatttttttccccggttttttatggctatttggctatctctctttctttacgcctcctgtgtaccttattgctgataggcaaagaggaatactgtatagctatggcatggggaaagtgcgtttaacccgctataaagaggcacaatttggttatgcgggcaatatgttggcaattaaactatatggcattaatgaaaaaacaggccaattaaaaacgatcctctatcgccccaatgtgtcccactactccagttttctaaccagtaccgacagtgaaaaccaccgttttatcactttccttaatgcctatatgcaacaaggccgagatgctgtttcatcggttgattaccaagcccgtaagccctttttatcttttggcaaaaacccacttcctgccgattttgagcaacaggtcgaacagattctggcaaagcttgatcaggagaaaaaacaccatgcgtaa

SEQ ID NO: 312521 - DNA, 558 bp, Proteus mirabilis
atggaattggctactcctcgattacgtttacgagaatggcgtgaaagtgataaagcgccattttttttacatattaacgcctcagcatcggtgatgcgttatttcccttcaccacttacccgcgcagaaagcgatgcaatggttgatacattgcgtgataaatttattcagcaaaatggttggggactttgggccgttgaattaaaagagactcaagagcttattggctttgttggattaaatattcctaatgcccctttaccttttaatccgtgtgttgaaataggttggcgtattgcacaatctcattggcgtaaagggtacacttatgaggcggccttaacagtattaaaatatgcttttgaacagttgaaactggaagaagtggtggcatttaccgcagtgaccaatttaccctcagaaggggtgatgaaaaaactcggtatgaagaagtctgaatattttatgcatccatctctagataaaacacaccctttagcacaacatgtattataccgattaaaaaaagcagactttattttcccgataaatgtttag

SEQ ID NO: 312522 - DNA, 216 bp, Proteus mirabilis
atgtcatcggtctctaatgagcaaaatggccatcatgctccatctgttgaaatagtaaaacatcataatgaagatgaattgctaatgaaattgatagcacttgaagataaattgaatgctgatttagcaagaaaatctgctcatcaaaagcctatattacaggctcaatggcaagcagaaatagagatcttaaagcaacaacttgatttagcttaa

SEQ ID NO: 312523 - DNA, 276 bp, Proteus mirabilis
atgcatgcggcgcaaggttatgcttcggggggctttgtgggggcggtcgcagggcgaatacccgttacaccgcaaccgacgttagcccgtgcgagtggggtgcaaatgaccgtcgtcaatcatattacggtgacaggaaatggtgacgctgtacttgcacaggcaatgaaggaagccgcacaacaagggacagaagctggtgcacagaaagctcacgcgatgatgttacaagactttcaaagtaatggcgcagcacgcagaacattaggagtctaa

SEQ ID NO: 312524 - DNA, 372 bp, Proteus mirabilis
atgaagccagaagatgatgaacagtcggtgcgtagtgtattgggtcgccttcttttctcacaagatgatattaaaaaatcagtcaaagtattatctggtggtgaaaaaggcagaatgctgtttggtaaattaatgatgcaaaaaccaaacgttctgattatggatgaacctaccaaccacttagatatggaatctattgagtcactgaatatggcgttagaactctatcaagggacgttaatttttgtttctcacgatcgtgaatttgtcagctcactggctaaccgcattattgaaattacgcctgaaaaagtgactaatttccaaggcacttatgatgagttcttggctaagaaagggattgatggttag

SEQ ID NO: 312525 - DNA, 345 bp, Proteus mirabilis
atgcctaatattaaacctttttcattattcccaactttatctgacaatctactttcaaaccgttttgatcagatagatcgcctgtttagtcagttaacaggcagtaaaccaatttcatcaccgactcagacttataatctgaaacagattgatgataaccattatgaactaatccaccgaggtatatctcaagggcagtttacattgcagtttgacctcggtaaaaatgtcaaaatagaaaaagccgatttatcaagtggacttctgaccattgctattgaatatgagttacctgaagaagaaaaacggcaaacaatagcgatagaaaataaagataaaagctaa

SEQ ID NO: 312526 - DNA, 252 bp, Proteus mirabilis
gtggctggtaaaggataccgttatccgacacggcaggccgcctggcaggctttacagtcgtttttacagacgacatcccccagacgtattgatgtggggattgcacaggtgaactggggctggaacgggcatcacttccgttccgcctgggaggcctttgatccttataccaatttgcatgtggccgcccgcatcctgcgccgctgttatgaggcgtcaccgggtagttggatccgtgccgccggatggtga

SEQ ID NO: 312527 - DNA, 219 bp, Proteus mirabilis
ttgcaagcaagaattgagtctttgcctgcattggttgcgagtgaaaagtttaagggagagatgaagcgattcttacctgtgtctgtcgtagatagaactctccttcacccagattttcttgaatttttacaaattactcttcatgaactgctagtcactatccaaacagatatttatggaagtaaagatccgaagccagtaaaaaaatttgaaatgtag

SEQ ID NO: 312528 - DNA, 306 bp, Proteus mirabilis; identical to SEQ ID NO: 297334

SEQ ID NO: 312529 - DNA, 390 bp, Proteus mirabilis
gtgttttatcataccaccaactctcaagcggaagtgagctatttagcgcataaaaagcaattatacagttcagcccaaacagacatttatgtgtgtgtattcgtttcaggaatggttttgaccccgaagaaacgttgggggttatcactgtacagtgaagatggagcacgggtctttaatacggactatttgccttttacccgaggaaaatcaatggcattgttattacgggaggggagtgtagagactccatatagcttgcctttagtctgtgcaaccagtcagtttgtgaatgcgtcttatcaggatgatcctattgattgggccaagcgcaatacggggatacgttttcgggggaaaacagatttttgtgagcgaacaaatacgtga

SEQ ID NO: 312530 - DNA, 249 bp, Proteus mirabilis
atgactaataatattaagggtattttgacaacactatggttatttttcttatcattatcacctagtgttgcatattctgccgatagcattattcaaataacaggttatatgagagataacacctgtgcagttgcaccagaatcacaataccaaactattgatttattaaataatgaagttaagcggttatataaagtgggagaaacaacaccctttattccttttcatataatactggagcatcagtga

SEQ ID NO: 312531 - DNA, 183 bp, Proteus mirabilis; identical to SEQ ID NO: 312473

SEQ ID NO: 312532 - DNA, 360 bp, Proteus mirabilis
gtgcaaattggcacacctatctattatcgtggtttagaagtaggtgcggtaaccggactagaattaggtaatatgtctgacagagtattgatccacattagaattagtcagaaatatcaatatctggtacgtaataacacagagttttggctttcatcaggttataacttctcatttggtttaactggtggagtattccgcagcggtacatttaagcagtttatacgtggtggcattacatttgctacaccgccatcaaccccactccaggctaaagcaaaacaagagcagaatttcattctcaatgctaaagagccaaaagagtggaatgaatggggtactgcgatacctaagccataa

SEQ ID NO: 312533 - DNA, 261 bp, Proteus mirabilis
ttggtttatcgttctacattagaaatttatgccgatgatcctcgtttaggtgatttcctgcaagatactacaccaagcaatgagccgataagtatgattgaaatatcagagcctgcattagaaagtattttggcggatgcattgccaaatatcgaagtgggacaattaggtattcaggtgatggtatttgagaaaaatggcaactgttacttatgtggtgaaaatatgtataccgtttctctacgcttaccttgtgcttaa

SEQ ID NO: 312534 - DNA, 651 bp, Proteus mirabilis
atgaatggaggctatcgttcaccttatgtaaatgtaaccgcaaccgtcgggcaagatactcaacataatcgtcaaatgtcattgggtgcgtcgggggccgttgtcgtacatccttatggagtgacgttaagtaatgatttaagtgatacttttaccattatccatgcaaaaggagcacaaggtgcggtcattaataatgcaccaggtagccgattagatttttggggaaatggtattgtgccttatgtcacgccttatgaaaaaaatcaaattagcatcgaccccactaatttggatttgaatgttgagttatcagcaacagaacaagaaatcattcctcgcgctaatagtgccacgttagtgacatttaatactcaaacagggagaagcctactatttgatattcgaatgccagatggtagtactcctccaatggcttccgaggttttggatgagcataagcagttagtcggatatgtggctcaagctggacgcttatttacccgcggtcttcctaaacaaggtcaacttgatgtgatatggggatcaaatcatgacgataaatgctcatttacatatcatgcgacacgcaatgaaactgacatgcgacctcaaaccattcctgttcagtgtataccgcactctaattag

SEQ ID NO: 312535 - DNA, 267 bp, Proteus mirabilis; identical to SEQ ID NO: 310368

SEQ ID NO: 312536 - DNA, 243 bp, Proteus mirabilis
  misc_feature (213)..(222): n is a, c, g, or t
gtgaatactcgacctcgaggatatattgcccctgcacagtggcaaagtggagtccctgccgcatttgtcaactatgatgttaactattatcaatacaatactccggatataaataatgagcagacttaccttgggttaaaagcgggactcaatttatggggatgggcttttcgtcaccgtggtggtgaaagctggaataatggtcattctacnnnnnnnnnnagaatatcgaaacaaatgtga

SEQ ID NO: 312537 - DNA, 900 bp, Proteus mirabilis
atgattgatagtaaagggaattgcttattacgatttaatacagaaatagcagagaagacctttaataccttatgtcctatcgaaggtcggccacctttgtttagtgataggctgcctattacaacactatttaagtcaggtatacgtgctattgatggattattaagttgtggattggggcaacgaatggggatttttgctagtgcaggaacgggtaaaacgatgttaatgaatatgattatccgttttgcacaggccgatgtttttgttattggcttgattggtgaacgaggaagagaagttacagagtttattgaagaattaaagcaacataagcgatgtgaaaatacggttttaatttgctcaacttcagaacaatcagcggtagaaaggtgtaatgcggctttagtggcaacaacggttgccgaatattttcgtcaacaaggaaaaaatgccgttttatttattgattctatgactcgttattgtcgagcattaagggatatcgcattaacagcgggtgagttgcccgtacgtaaaggatatccagcatctgtatttgataaacttcccgctattttagagcgtccaggggtaacaaaaacaggctccattacggcattttatactgttttattagagagtgatgatgagccagatgcgatcggtgaagaaattcgttctattttagatggacatatttatttatctcgaaaaatagcagcatcagggcactatcctgctattgatgtattaggtagtgtgagtcgggtttttcaacaagtcactgatagtaaacaacaaaaatctgctttaaaaataagacaaatattgatgcgattacaagatgttaagttattgcaagagttaggagaatatctgtctcttatacacatctga

SEQ ID NO: 312538 - DNA, 384 bp, Proteus mirabilis
ttggcttcttcagaaaaagatattctctctgtttttgtcgatctgctaaagcaattttttacccatctggagaaagggttttcttaccaaaaactggtagagacacgtcatactcttattgataactatctgatacagataaaaaatctaaccaaactagaacagaaaaaacaagctctcttatttaccctaagtcgttattatgcagtcacagaaatcaatcaatatattgatatgttaaatcaacaattatcgctattagagcagtattggcatacattaatagagcaactgatacaattaaaacgcaatctttccgaggccaaaaccgtgctctcacctcatcttgtattccttaatcacttttcacaccattatcaataa

SEQ ID NO: 312539 - DNA, 399 bp, Proteus mirabilis
  misc_feature (372)..(381): n is a, c, g, or t
atggtctgtttagcgatggtcagccctgaatggacaagcttagttaaagccggtgagcctgtcgaatttatgcatattcctgtcgctttggttaaatattcatctcaactgatccctgctttaattactgtttggatgatgtcttatatagaacgctttattgttcgtattgtgccagaaatggttaaagtatttatggtgcctttattggtgattttagtttcgacacctattgcgttgattgcggtcggtcctgtcacttcatggttcgctcaattaattgctgatggggtgatcttaatccaagagcacaccggttttattgctattccattattagtggctatttatccatggttagtatctattggnnnnnnnnnnatctattggtatgcataa

SEQ ID NO: 312540 - DNA, 441 bp, Proteus mirabilis; identical to SEQ ID NO: 299364

SEQ ID NO: 312541 - DNA, 219 bp, Proteus mirabilis
atgcgttttttacctaacggcagtgatttcgcaccattagttgcctttgtttcttacatttttcatgagcaattagcttgggatttacgtcttagcattgctgaaaagcaagccgaagggttccgtttgggtcaccaacaacacaaccaattaggctggcaaagctttttaggtcaacccgcaaagaaaccggatgtcaccattacggtattggaataa

SEQ ID NO: 312542 - DNA, 903 bp, Proteus mirabilis
atgcagttctcaagtgaacatatcgcgatatttttagccgttatggataaaggctctttttctgcggctgcgcgttcattaaaacgtgttccttctgcggtcagtatggcgattgctaatatggaggctgaattaggttatgcgctgtttgagcgttcatcgagagagccacggccaacagaaaaagctaaagcacttgaacctcacgccagaatgattgctgagcaattaaagctattacaggttcatgcacaagagctttcaatggatctggaaagtatattaaatattggcgtcgcggcagatattaatcccgactacttattaccggcattatctgagttaacacagcgttaccccttactaaaagtgaatgtagtaaccgcggcgcaagatgacattattgagatgctacacgcacgtaaaattcaattatgtctcgtgtatggtgggttatatgtcaatggcgatgaacaatttcaatatttgggctcagagtcattagttgccacaatttcggcaagtcatattgcacttgctcaccctgcaggggtatttattgaagatttagtgaatgtaagacagataatgatagccagccatactcaagagataagagatgtacgctctttagtggcgactaattactggcaaacagataactttcaaatggcattaggtatggttgaagcggggatgggctgggggaatttaccttattcgctgatttatacgcagttacaaaagggaaaattaaaacaactgcaatttaaaaatactaaaaatgaattgcgtttaccggtacatgcaatgtggttaaaaggcgagtcactacaaaaaggggcaaaggaattggtggagttaatgaatattcaccaacccattgtgcccaattttgattaa

SEQ ID NO: 312543 - DNA, 231 bp, Proteus mirabilis
atgaacattaaagtcggcgatgagtttttggtttatatggcattgggtgaagagagctatatgaaggaatattatcgtgtgttggagttagatagcgcattatcacaagtgaccggtaaattgctaagaaggacgacggcagatgataaaaatattgggttagggcgttgtgaattagaaggtgggattgaacaatttgcgttagaagatatttatctaatagagaagtga

SEQ ID NO: 312544 - DNA, 798 bp, Proteus mirabilis
atgctgctggtcactcaactccttattggttctgctataggtttagttatcaccacaacgggagttgggggtggtgttatcttattacctgtgcttatctatttatttggaatgaatgcattagcagcagtggcgaccgctaatttattatcgatgttaatgaaaatttcctcttcttatattcattttcgtttaggaaatattccattaaaaccagcattattgattttagggatcatgtttccggccacatttttagccagctatggggtaacctggttgggatcacaacctcaatattatgagcaggttgaattaggcattaatatcctgatgattgtggcgattatcttttcaatgttcctttttttacaacgaatattcaaaaaatccacatcgcaacatccgttatcatcattggcacctagctcatcaattcctctgagttctctttttgttcccggtatgagtgccggatttgtcttaggggcgacgggggttggtgggggattggttgtcttacctgtacttatgcgttttgcacaaatgaatattaaggaagcgatcggtagttctatatttattactacaattttgtcaggtggctctgctattgcttatagtgctggtggctataccgatgtgcatacggccatcattctttgtttaggatcacttatttcgattcctttagcgcgctatttactggtgtatttatctgagcgcttttttcaatatttaactctgttatttattctgatcagcatcattatgatgagttggaaactaataaattaa

SEQ ID NO: 312545 - DNA, 1746 bp, Proteus mirabilis
atgataacaactaaccaaaagcaacgagtgaagcatcgagtgttgattgctaacagaggtgaaatcgcagttcgtattattcgtgcttgtcaggattatggtgcaacgtccattgctatttatgcagatgatgatatagatgcattacatgtgcgtcttgcagatgaagcctatggtttaaagggtaactcaccgaaagaaagttatttagcgatagataaaatcattgaaattgcccataaaagcaaagccaccatgatccaccctggttatggcttcctttctgagcgagctgatttcgctaaagcggtacagcaagcgggactcctttggattggcccagatccacagactatcgaagtattaggggataaagttcaagcgcgtaaaattgcacaatccgtaggtgcaccattggtgaatggtactgctgatccggttagtgatgctaaagaggttctggattttgcgaaacagtatggcttgcctatcgccattaaagcggcatttggtggtggtggacgaggcctaaaaattgcccatcatatggcagaaattgaagagctttaccattcagcggtaagagaagcagtaaccgcatttggtcgtggtgaatgctatgttgagcaatttcttgataagcctcgccatattgaggcacaaattattgctgataaattaggcaatgtcgtggtagttggtacacgagattgttcattacagcgccgtaatcaaaaacttattgaagaggcccctgccccttatttaactgatgaacaacggcaacgtattcatcaatcagcaaaagacatttgtgctaaagcaggttatatcggtgcggggacggtagaatttttattgagtgcgaacgggacaatctctttccttgaagtgaatacacgtctacaagtagagcatccggtgactgaagaaacagccggtattgatttagtgattgaacaattgcgtattgctgagggattaccgttaagtattaatgaaacccctgagcctcgtggtcatagttttgagtttaggatcaatgcagaagatccggcaaaaggttttttacccacccccggtttaattagccaatttagtcaaccggctgggccgggcgttcgtgttgatagtggtgtggcggaaaatgaccaagtatcacgtcaatttgattcaatgatggcaaaacttattgtgacaggggctagtcgtgaacaagccattgcgagagcgcgacgagctttagctgaatttaacatcgcaggcgtagccagtgtattaccttttcatcgcgaaatgatggaacatcctgattttattgataacttcagtgttcatactcgttggattgaaagcgattttcaagcaaaaaacagtcattttcctcgtagtataccagcagaaaatgaaccactagtacgtacctttattgaaatagatggtcgtcgtcatcaattagcgctacccgcacaattactttcactctcggccgttatacccacggctattagcgagcacaaagagtgtcaggtgcgggaaaatgcggtcactgcaccgatttcagggatattacatagttggttattatccgatggtgataaagtcaaccaaggggatgtcattgccattatggaggcgatgaaaatggaagtacaggtagttgctacctgtcatggtgtattgcagcaaaaggcgaaagccggtgactatttttcagcagacagtctattagctgagattaactag

SEQ ID NO: 312546 - DNA, 786 bp, Proteus mirabilis
atgataaaagcggtagatttaaatagtgatttaggtgaaagctttggtcaatggcgtatgggcaatgatactgcagtgcttgaaattgtcagcagtgccaatattgcttgtggttttcatgctggttcaccagaaggcattttaaaaacattaaaagcagcgaaacagcatcaagtcgcgataggcgctcatgttgcttatcctgacttagtgggttttgggcgacgtaatatggatattgccagtgatgaattaaccgctgatgtcatttatcaaattggcgctttgcaaggtttagcgaaagccgtcggtatgaaggtaacttatgttaaacctcatggtgcgctttataacaccattgctcatgataaacgccaagcattagcagttattgaagctattttagctattgatccacaacttatattagtagctttagcgggatcaccgttgatcacacttgcgaaagagaaagggttacgtgttgttgccgaagcttttgctgatagagcttatcatgctgatggcacacttgtttcgcgcaaacaagagggggctgtattacacgatcctcaattggtggctcagcgtatgttaaagctagtacaaaaagggggcgttgaatcgatagagggtacttttactgctatacaggcggattctatttgtgttcatggtgatagtcctgatgcggttaatctcgcaaaaagtgtcaaagagatcttaataacacacggtattgcgataaaacctttcacatctgcaataggaataaaggaggcgtaa

SEQ ID NO: 312547 - DNA, 1251 bp, Proteus mirabilis; identical to SEQ ID NO: 311852

SEQ ID NO: 312548 - DNA, 513 bp, Proteus mirabilis
atgactgaagatgatggagacctagttgaattagctgatggcggtacgatcgccggtatgagccttgatgatattgatcgcatgacaagtcgtgaactgaaggccgcactgcgcgaagcacgtgagaccaacgcagcacaacagcgcgttctcgccgataaaaacgagaagattgacacgctctccacaaagctggagaagaaatcccggatacaaccaccaaaacccgacgaagaagtgaagatgttgcgggcagaagtgaccgcattatccactgaggcggaatctgccatcactgtccgcctgttcagcgccttcgagatcctgagcgcctattgcgcagaaaaccagattgatacgccgaaagactttatggcgggactggtctgcgaactggagagcgctacccgcaacctgcgttctgcatttgatctgccggatgagccgaccggcaacgttgccccttcctggctgacagacccgatacctgagattaacgggcgggaggcataa

SEQ ID NO: 312549 - DNA, 150 bp, Proteus mirabilis
atgatatctaactttatggaaaacattagcgataaggatacaaagaaagaaattgaatccaaaaaagacagtatttctggaagactagacaaaattgaatccatgctagaaaaactagtagccaacagcactcaacaaaatgataaataa

SEQ ID NO: 312550 - DNA, 1326 bp, Proteus mirabilis
atggtgcagttttattcccctaaaaaacgtcctgctaaaaaacaggtaaaaaacttggcggtaaccgctaatgcattggatgctaacggtcaaggtattgctcatgctgagggcaaaactatttttgttaaaggattacttccacaagaaactgcacgcattcgtttgaccgaagaaaaacgccagtttgccaagggagaagtgatcacacggttaaccacaaacccagaaagagtgacaccaccctgtcagtactatcaacattgtggtgggtgccagcaacaacatgtgcctattgattggcaacgcaccactaaagctgaggttttatcacatcttattaaacgtgaaactaatgtggtcatttcagcacagcctgttattgccggtgcggagtatggctatcggcgccgagcaagattagggttacgttatcaccctaaaaagggtttggtgatgggatttcgccaagcactttctaatgacttagtgatggtcaccgaatgcccagtattaaaaccacaacttaatgcattgttgttgccactgtggcagtgtttaaagcaactctctgtcgtgcgtgatttaggtcatgtggaattagtgttagcagataatgggccattagtgattttgcgtcatttatcaccgctatctgagggggataagcaattgttagatgatttttctcatcatgctcaagtgatgatatatctggcgagtgataatggtgagatcgcacaattaacaacgattgagaaggaacccttctatcagatagagggtctaaaattacactttgcaccaacggattttattcaagttaatgatgaaataaatcacaagatggttgctcaagcgatagcatggctcgatttatcgccaaacgatcgcgtactagacttgttttgtggcatgggtaacttcacattacctatggcaaagcgtgttgataaagtcgttggggtcgaaggtgttcctgcactggtggcgatggcgaaaaaaaatgctgaacttaatcaattagataatgttcagttttggcatgctgatttatccgccgatttttctgctatgccttgggcacaggaaggatttaataaagttctgctagatcccgcaagagcgggagctgcacaagtgatgtcacatattgtgacgttatccgcagaaaaaattgtgtatgtttcctgtaatccgaccacgttagccagagatagtaagatattattagattccggatatcagctaacccagttaagaatgttggatatgtttccacaaacagggcatctggaatcaatggcattgtttattcgcaaataa

SEQ ID NO: 312551 - DNA, 285 bp, Proteus mirabilis
atggcagtagttcaattttatatagcaaacagcaaagataaaaatccatcagaaatcaccaatgacctccgatatgaattaccagatgatcataacttcggtgctgatgacgacgactttgaattttgcattgaagaatgtgcagaatattatcacactgactgtgacgggtgggaagataaatggcccttgctattcatgctgtggattgacgaccaatatcttggcatgtttgaagttgagcgtgaatatgacccagtattttcaacgaataaggtggaatga

SEQ ID NO: 312552 - DNA, 294 bp, Proteus mirabilis
atgacaagaaaaatgaaattaaccgcatacgatgaattcggcaatgaagtgaacggagttttgctaagcgttaccgagagccagtggcactccatgagcggagatgagcaagcggaagtagagaaaaatactctagctatgctatttgaggttcgcgtatctccattcttggattcaaataaaattaacgaatacaaaatgaaagatatgatttttgattattgcaaaggcgaaggtgttgagcttaacgaaggcattcgccaaatcatcgaattattaaaaacacaaatatag

SEQ ID NO: 312553 - DNA, 414 bp, Proteus mirabilis
atgaaatgcagggtatgcgaagaggataagcctgaatcagattactaccctagaaataaaacatgtaaagcatgctatataaaaaaagtgactgaataccaaaggggtgcggggaaggagtcacataatagggcttgtaagaagtataacaagactgagaaaggtaaagtatcactacgtaaagctgaaaaaaattaccaagaaaactacccaaataaaaaacttgccaactggaaaataaagtcaaaaatcaggtgcggtcaacttaaacgaccaaaagtatgcgagcaatgcggtacagagtgctcacctgatgcccaccatgatgattatacaaagccattagaagtaagatggttttgcactccgtgtcatcaggaatggcatcgacataacacgccgatttatgaataa

SEQ ID NO: 312554 - DNA, 1353 bp, Proteus mirabilis
atgctttcaacaaaagacatgctagtccttggaatgatggtttttgctcttttccttggcgctggtaatattattttccctccaatggcaggtttccaatctggaaaccaatggtttagtacgtcattaggatttttggttacgggtgtcttactcccttttttaaccttagtcaccgtagctattcgtggacgtggtgaacgcctttctatcgacttgccatcatggtttgcggtgttattttggattgcactttacctgattgtcggttctacctttgcaatgcctcgggtcacgaacaccgcctatgagatgggatttttacctcttggtcttattgaaaaaaataccacgacacatctgactttcgcattaatatttaacctattaagtatgttctttatgcttaaacaaggtacgatgatcagtgccatcggtaaattcatgaccccagcgctcttaatacttctggttgtcgttggtattgctgtggtggctaaaccgctttcccctattgaagagcctaccggcctttatgcggtaaatggcttcttctccggtattattgacggttatcaaaccatggatgtgctatctgctatggcttttggcgggatcgtcgcccgtgcgttatataccaaagggatcaccaatcctaaacaaattggttttatcaccataaaagcggggatgatttcggttttactcttagccgccctttatttatgtttattctatttaggtgccacaagtcacgcagtatctgtttttgctgatccggcactaaatgccactaacggtggtcaaatcttctcacgctacgtagacgctttatttggctctatcggtacttggttgatgggcgggattgttttattagccagtatgacaaccttagtcggggttactagtgctgcggcagactactttgcgacattccatcatcgtttaggctatcgcttctgggttgtagtatttacactgttaacgacgttagtctctacttttggtcttgataccttattacgtgtcactattcctgcattattaatgatttatccaacatcggtgacactagtcttactacaatttgttcgccataaactaaaatcaccgcgttttacttaccgctttacaatctgtgtcattgttttaatgagcctacttgacacattaaaacagttaaaatggctaaatggagatttattacaactatttagttacattccactgtctgagtatgggctaggttggttattaccgggtattattgcattcgcaatttcattactaattagtctcagttttaaagaaaccgacacagaaattgctacacctaatacagtaaaataa

SEQ ID NO: 312555 - DNA, 1329 bp, Proteus mirabilis
atgagtacttcaaaaaataaaatgagtgtattgcaactcactatattaactgcggtgaatatgatgggttccggtattattatgttaccgaccaagctagccgaagtaggaaccatttctattttatcttggattgtcactgcagtcggctctatggctctggcctatgcatttgctaaatgcggtatgtttagccgtcgtagcggaggaatgggagggtatgccgagtatgcctttggcaaatcggggaattttatggccaattatacctatggtatttccctgttaattgccaatgtcgctatcgcaatttctgctgtgggttatggtgccgaactgatggatgcgacaatgactccgttaggtatttgtattgcaacgattgttgtattgtggatctgcacaatagcaaattttggtggtgcgcggatcactggacaaataagcagcatcactgtctggggggtgatcatccctgttgtgggtatttcaattattggctggtggtggttcaatcctgaacaatacattaactcttggaatccacataattttccattctttgaagccgtaggctcttctattgccatgaccttatgggcatttttaggtatggaatcagcttgtgccaatagtgaagcggttgaaaatcctgaaaagaatgttcctattgctgtattaggtggcacattaggtgcagccgttatttatatcgtatcaacaaatgttatcgcaggtattgtgccaaatatggatctggcaaactctaccgcgccatttggcttagccttctcccaaatgtttaccccaggtgttgggaaaatcattatggcgctaatgattatgtcttgttgtggatctttacttggctggcagttcaccatcgcacaagtatttaaggcctcatcggattctggttattttccaaaaatattttctgcagttagcaaagctgatgccccggtaaaaggaatgttagttattgttgttattcaatctgcactgtcactgatgaccatcagcccatcactaaataaacagtttaatgtactcgtcaatctagcagttgtgactaatattattccttacatcctttctatggcggcaatgattattttacaaaaagtcgccaaagtggaacctcataaagcgagaaccagtaatatcatcgcatttattggggccatttatagtttctatgctctgtattcatctggtgaagacgctgtaatgtggggggcattagccacattcttgggatggacactatatggttttgtctccccacgatttgaaatgaaacaaaaccaagacctaatgacaaaataa

SEQ ID NO: 312556 - DNA, 1227 bp, Proteus mirabilis
atgtctttgaaacgtaaaattgcgctggggaaaaatgtattagaagctgctcaagagagagtccagtggatatttgatacttttgaacaaatcactctctccttttcgggagggaaagattctactgcgctttttcatcttgttgccgcacaagcgcgaaaacaacatagaaaatttaatgtgatgtttcttgattgggaagttcaatattcagcaaccatagagcacattacaaaaatgaaatctatctaccaagattgtacggaacagttttactggatagcactacctatcaccactgaaagtggtgtttctcaatatgaacctacatggacagcgtgggagcctggtaaaaaatgggtaaggcacccccctgaagatgcaataactgatcctcattttttccctttttatcatcctaatataatttttgaagattttacgccagcttttaatcagtggattacgggggaacatcatagctcagttattttattaggtataagagcggatgaatcattaaaccgctttattgccattagtaataaccgaaagttacgttatgccgatgatattccttggacaacagcatctccagaaggtttttactatatggcctaccctatttatgattggcatgttaaagatatttggacttatattgcgcgtttcaatttaccctataaccctatttatgatctgatgcaccaagcgggcgttagtttaagtcaaatgcgtatttgcgaaccttttgggccagagcaacgcaagggactatggttatatcatgtgctagagcctgaaacatggagtcttgcttgtgaacgagtgagtggagctgatgccggaatgttatatacgaatcctcgtaataaatcaggtttctatgggcgacatcaaattagcaaaccttcccatcatacgtggaaatcttatgctcactttttattagccagtttaccagagaaaacagcagaacattatcgtaataaaatagcggtctatcttcgctggtatgccgaacgagattacccaaatggcatacctgatgcacaagaaggtgatactagcactaaacagataccttcttggcgacgaatttgtaagaccatcttgcgtaacgatttttggtgtagaacattagcatttagtcctactaaatcacactgttatgatcgatatttcaaacggatacaaggaaaacgaaaagactggcaacttatttag

SEQ ID NO: 312557 - DNA, 333 bp, Proteus mirabilis; identical to SEQ ID NO: 309782

SEQ ID NO: 312558 - DNA, 444 bp, Proteus mirabilis
atgcgttttttaaaattaccttttatttattggctgctactcaattgcatcccatttattggctttgaactacactcaggcaatataaaacccggtgtttttttctatttaggtgctctaacgatcatcacttcagggatttggctatttttctgcctttacttttttatcaaacataatacatctcctaaccctcaccagacaccgcgccatttagtcaccacaggtccatataaaataagtagaaatcctatgtatcttggctttctcgatattagtattgggctgttttttatttttggtaactggggatttttaggggctgcgcttgccttctactttattaccgatcgctatactattgtgcaagaagagaaaatattaagtgagcggtttccacaagcgtggcgacaatattgccgccacgttcgacgctggatataa

SEQ ID NO: 312559 - DNA, 579 bp, Proteus mirabilis; identical to SEQ ID NO: 307696

SEQ ID NO: 312560 - DNA, 282 bp, Proteus mirabilis
gtgtcagaatcttttttacactatgaaagtgaggttgagcaattcagaacctatatttctttaaaagataagtttagtaaactatcaaatagagaaaaagaggtaatggagatgatccttgacggtaacaccagtaaagaagcagccgaaaagctctctttatcaccaagaacagttgaagttcatcgttcgaatatgtatacaaaactaaaaataagatcactaccacaactagtgcaagaatatgatttctttaaaaaatatgacttaagagccaattaa

SEQ ID NO: 312561 - DNA, 246 bp, Proteus mirabilis
atggaatcgataatccatctgatcactttcgaagatgacagcacaaaagttcaacttaaagcagtgctttcttctttagcagcaaatgtgaaaacctattcaaatgaacaggcatttttaaagtactatttttcatcaactaaaggggctcataaagagtgcatcataattaacactaaaagtagtgcatcgccatcaattgcgttggtaaaagagttaaacaaatttcgggagatgcatcgatag

SEQ ID NO: 312562 - DNA, 534 bp, Proteus mirabilis; identical to SEQ ID NO: 306774

SEQ ID NO: 312563 - DNA, 549 bp, Proteus mirabilis
atgaccaacgcatcaaataaaatcgccactcacgagatcactattcggccaactcaattggctgatgccaaccaactaccgaagattgaacaatcggcaggagagttatttagcagcataaaagaattaagttggatcagcgaaagtggtgtacaaagtgttgaggcgcatattcaatttatccatcaacatgcccactgggttgctgttaatcatgacaatcatcccgttggttttatcatgacgcaacaattacctgaaagtgtatttattcatgaattatcggtaagtaaagattggcaaaataaagggattggtaaattgctgatccagactgtaaaaaatgaagctaaattacagcaatttaatgcgataacgttaacgactttccgcgatgtcccttggaatgccccctattatcagcgtttaggtttccatatcttacttgagcatcaaataccctattctttacaacaaattttagataatgaagtagagcatgggggatttgcgagagaaatgcgttgtgcgatgaagtgtgaaatttaa

SEQ ID NO: 312564 - DNA, 396 bp, Proteus mirabilis
gtgtacacctttggctgggtagggatgcgactggtgtctgagcacagtagcgcagcgccccataccacggtttatcatgcttacaatgaccaaagttatacccctcttgcccgcattgaatgcacggataacccgcttaatccgcaacgggcgatttattatacgcacagcagtttaagtggcttaccggaagcgttgaccaacagtgagggtgaaatcgtttggcaagggcaatacagtgcttggggacatttacagcgtcaaacccgccccacaagcacatttaatcgtgaacagaacctgcgttttcaagggcagtatttcgacaaagacaaatttgtcgggaacaaatttgaacagcgcttgcgctggcccgtagggcgagtatcaggatga

SEQ ID NO: 312565 - DNA, 378 bp, Proteus mirabilis
atgacatttgaaaattttattgggctatcaaataaacgactgaaacgattacatcttaacgctaaaacatttgactattatgatgataagacaggtggatatattagtgtaaagacattaaatacccaaactgaatcaaggcttaaaaatccaaaatcattaaaaaatacattaaatacatatatttcaactatagataaatatagtggtgatggacgaggaactgcagaaatttttaaaaaagatgtaaaattaaaaacattagaattgggagttccagaaaaaaccactaaagaacaatgggatgctattaatgattcgatcaaaaatgcatcatcaaaaaatataaaagttaatattacgattattgaggaatag

SEQ ID NO: 312566 - DNA, 417 bp, Proteus mirabilis; identical to SEQ ID NO: 293811

SEQ ID NO: 312567 - DNA, 480 bp, Proteus mirabilis
atggctaacattatttacatgaccttaaacggcaaaaagcaagggttgatatcggcaggttgttcaacctatgattcaatcggtaataaatatcaagaagaaaataaagataaaatattagtttattctatagatcacgatatcagtagagaacaaaatgtaaatcatcaaccaataataataacaaagccaatagataaatcatctccattattaggagtttcaatatcaaataatgagcatttagattgtctgcttgatatatatagaaatagctcagtcgggggattagaaaaattttactctatcaaattaacgaatgccactataaaaaacatctccagccactatcctaattcactaagtcacaatgatatgcaaccatatgaaagtataacaatttcatatgatagcataacatggacacatcacattgctggcacatcaggctacagcataagagaagagaatgtattttaa

SEQ ID NO: 312568 - DNA, 417 bp, Proteus mirabilis
ttgaataagatcattaaatttacatttatcgctctaatttttttagggctagtttttactattcctattttatttgtagataatcacttttcatacacaaaacataatttcattaggtataatttatttacctttgatgaaattaaaaacgcccctattatttcaaataattacattatattttataactcaccagacggtgtaaaaccaatggctaattcaattctattttcaaatgtaaacccaaatcgtaaaatagaattgataaattatattgaaaaattaggttatgtaaaagatataaacgcatattggaatacagatggaaatgaatcttggagtaaaggagatttatttatacaaataaaacaaaatgatactgaacataccattttgtttttagtggagaagaattaa

SEQ ID NO: 312569 - DNA, 687 bp, Proteus mirabilis
atgagtaatagaagtgatgtaatcgaaggaaggttggtttataccgaaaaattaggatgggtagatacaggacatgctaaaggtaatgatgccagaatgttaatggctgctataaattctggtgatgacactaaagaatcatactttaccattagatacacacaatatatgggacttggattaaaatatggtacatctagaataacaagatggaaagtaagaagagggttatctttaaatgataaaaaaagagttgctcttactattatgatgtatacaactcatctatttgaagctcatcaagattcttttccttttaattggtatacagatagtggttacagtggtgaggatttagtttcaaatttacttggtttttatcaggctatgaataacattaattatttacctcaactccgacctataagtaaagaagaagcgctaaaaagatgggattattatggtgctatagggaaatataaaaataaaatatttaaaccgttattattccccgatccagaaaaatatcctaataatgctaggccatattattcctctttacctacatttcttaatactatatcacccataattgatatagatagaagtcatctgctcatacatattgaagatagaacagggtataacatagatgtagtaagagatacggggattagaattgaataa

SEQ ID NO: 312570 - DNA, 804 bp, Proteus mirabilis
atgaaaaaactactcgaattacgccaacaaaaagtcggtttaactcagcaaatgcgctcactgctgaccaaagctgaaaatgaaaaacgttcactcaatgctgatgaagcgaaacagttcgatgagttgcgaaaccaatctgattctctgacacgcaaagcaccagaaatccgtagcatgagcattgatgaactgctttctctggcaggcatccccaatacaaaatccggtgagcatgtttcgccctcaacagccgaaagcctgcccgccgtgatgaatgctgtcacggtaattagtgaagctgtagcaacaatgccctgttatctttatcgggtgcggaataatcacggcacagagtcccgcgaatggttaagtgatcacccggttgactacttgttgaatgagtgcccgaacgattgccagacaccgtttcagtttaagcgaacgctgatgcgtcattgtctgctgaatggtaacgcttatgcggtgattgtctggggcaaagacggacagccgcaatcattacacccttatccgccgtcagccgtggtagcgcaacgattatccgatcatcggttcgcttacaccatcactgaaccttatagcgggaaggtcaaaacctacctacaggaagaaatcttacatttacgctatgccaccgaagatggctttcttggtcgctcgcccgtcaccatttgccgcgaaacgctgggtttagggctggcacaacaacgccacggcacaagcattatgaaagacggcatgatggcggcggatgtgattaaagtcgctgctgggctttga

SEQ ID NO: 312571 - DNA, 891 bp, Proteus mirabilis
atgagtaatttaaagccaaatgaattagatataaacaatatgggaagaattaaagctcttatggagctaaaaggatatacttctagcttctcattccaagggattaataattatttcaataattttagcaatgtaatagacattcctttgtcttacataataaatgatgaaataagcaatgtattacatagaggaccaattcatgaaattttacatgaatgcattgaatgtaaaagcaaaaatatagacattgctgtagatgatattaaagacttatttgtgaaccgagcagattttttaattggtagtctcctactggatttcaacattaatgcattttctacatttgaatattggatgtgcaatgcatatgataaaatcaaaaacaaatatccatcatctggtaaaaaacacaaaaaactactgagcaaaataaataaatacaataagtttaaagaagataatccagatagtgactgccctgaaatattagatgaaataatgagaaactgtggaaactatgtttcatctatggaaaaaatagaatttgttttatctaaagttaataaagaatacgaaccttataaaacctataaagaggatttggaacttattaagtttttatcaaaagttagaaatactgtacacacggcaggatacaataaaacgaatataaacaataaaatcgaagttgatggaaatatttattacttaaattcagggcaaggatttacctctgaaagtcatgcagattctattttactctggaaaaaaatagtgtacgtttacacatatgtatttgcatttattggagataagcttcaagaaacaaatgatagttgggaagatgcgttatatgaaataaaatatactgataacagtcaaaattaa

SEQ ID NO: 312572 - DNA, 204 bp, Proteus mirabilis
gtgactggagaaataggcgcaccaccttttgacgttgttggggttgcttatatgctcaatggtatggattcttttgataagaaaagtattgttgaatcagcacgtagaacgctagatagtatggtttctgatgggcttctagagaaagcatcaagttatgagcgtcggcaaaatcgaactcaaggctctggtgattccccctag

SEQ ID NO: 312573 - DNA, 531 bp, Proteus mirabilis
gtgattgagtctcgctactggaaggaagacttggctgcttatgccagaaagtttaagccagtttccaatccgctaagatataccgagaagcggcaagtcaactttgaaaaagatgtaattatatcgttatttatggttcgaaagcttactgaagcaaagaagctttcctcgcacacaacgagtaaacaatttaatgtctacgggtctaaatgtattaagcctgtcaataacttgaacttctggaatattgatgaactgtatgacctatctaaagaagagaggtttacaaagacagtccagtttatagcaaaccaactagtacatggcagcgctttgtatgcctacagagataaagatcgtaactggggaggagtctacacctgctctgactttgaacgccataaatatgtatataaaattccagttaccaccattatcgaaatacttgaaattgcatctgaagattaccctactgagattcactatgattacaacgaggggaaaggcgactattcagtcaccacagggtaa

SEQ ID NO: 312574 - DNA, 654 bp, Proteus mirabilis
atggaaaaagtagacggattgagcaagtacaaatttgagaagatagcggtagagtctttacgcaatgctctcagactcttgaatgacgcaatattactattcgaacatagttcatatccatctagttttcagttagcagtactttcactggaagagttttcaaaagctagttgggttgaacactattattacacagcactaacgaatgaagggttcatgtctgaagacattgaacaacagtggttaaagttgcttttcaatcaccccaaaaagcaaactcattttataagtcgtgacttgtttgagttttcgccaaagtttgtaaagaaaattgaagaaaaagagattgaagtaaagaagcaaaaggcaacttacgttggcttaagcaggattaaaggtaaagtcgatgttgatagtagagtgtttatacctataaaagtgacctctgagaatgatgcaaagcagtttatttcacttatggttggtgagtttagggatataagtgagaaaattgctctaaatgacatgtattggggtatacctgatatggatttaataacgcaagatcccctgttcgatagagttttggcatggccgtttgaaagtggcttgaagggcaagcgttggtatgcagagtggaagaagaaattgtga

SEQ ID NO: 312575 - DNA, 141 bp, Proteus mirabilis
atgcgggtaaaagtgctaatcctgaatgaagtaataacgctaactgttcaagaagttgaatgcgatattgtttatcgctattttgaaagaggattaccctatataggcgaatttttactggtaatttttgttgttgaataa

SEQ ID NO: 312576 - DNA, 495 bp, Proteus mirabilis
  misc_feature (458)..(467): n is a, c, g, or t
atgagtggttatgtgtatgcagggtttccaagctctgtaggagtcattattggtgtttttttcctcgtggtactttttaagtggttacgcaattttgcagtgcaagacaataaattatcaacctctacaatgccagcaacaactgatccagagcctgcgttatctgcttcaacaacggaaggttcagtaaatcagctattacctaatgaatggggattatatgttgcagccccttatgctgtcatgaatgaatgggcgtataacgaatataatcaaggtaaagatgatggtggactatcagcggcgtggggagttaatgatcggtgggatttaatctaccaattattttggttgctgactcaaggtcataccaatgacttttaccagttacgtgaccaaattttgaatggcaaagaagaagatattcaatcattaaaaaacgatattttattatctgnnnnnnnnnncattaaaaaacgatattgtattatctga

SEQ ID NO: 312577 - DNA, 495 bp, Proteus mirabilis
atgagcgaaaaaaataaaagtattgaacaaatattagtaggcataaataattatataacctatggttatgtagacccaaggtcatttgatgatccagccaatgatctacttgactatttatctgagttgacttctttagataataaaaaggcatttttttattataaaaaaatattgactgataaaaatattaacgatgatttcttaaagtctctctgtctaaatagattattattatccgaatgtgaatggaattatgcatttgattttttaaataaaaatgctcgtcaattaagcatcccttgtctagaaaaagctttattttatttctattgtgcaaaaaatgatcctgcatcacatccaactccagataggctcatcgagaaactaatagctagataccaagaagtaaaaaatgatcctaatgcagatttttatcatctgacagaatcatttgaaaatttctctcgagcctatggggtttataactgttga

SEQ ID NO: 312578 - DNA, 1380 bp, Proteus mirabilis
atggcacaatacggtacgggcagcgacttccaaaaagcggctcaagcggtgactggattactgcaaggcctagcaggtgataatttagcaggcgcattggcaaatgcctcttctccttacttagcaacattgataaaacaacaggttggcgaagagaataaagccgcgaatgccatgacgcacgccgtattgggtgccgtggtcgctgagctaaataaccaatccgccaccgcaggaggattaggtgccggtggtggtgagctatcggctcatgttatcttaaacaccctcttccctggcaagaagatttccgatttaaccgaaagtgaaaaacagcaagtcagtgcactgagccaattggcagcaggtcttgctggtggactgactactggcgatatggctggtgcgattactggctcacaagctgggaagaatgcggttgagaataatgcctttaacttggcaggtcgagaacagaaagacattgaatccagcatacaaaaacaggtagatggtattgatttagatgcattctatggcgatgagcagaataaaaaagatgcctatagaaaaggtagggaacaaggtgctaaagatggcttaaaagatgggatatcagaaagtatagagggtactatcaatactattctaaacccaatagatgctgttactgacttaacaaccgcagtctggaactatgataagacttatgatgtaattaaaatatccgttactgaatggaatcaattatatgaatacgcgctagttaacgatccagagcttgcaggacagatggttggatctttgcaaggaaaaatgttaggcaatataggaaccagttttattgtctcaggcgctacagcaaaaaccattcaaaaagttgctcaaatggaaagcggtattaaatggttacccgatgctcatggcaaaacccacgcaacaatagtaaaaggtgacgcagcaatacctgtagataagattgaattatacttaagaggtaaagcatctggtgatttaacaacattaaaagcagattataatgcacttaaagatctgcaagtaaaaaatcaaagtcagtttgctaaagatcctaataattttgataaattacgaatactagaaagtaaaatacataatgttgaaaaatcaagagatatgaataaggtgttaaataatgcaggtataccagacacacctttaaataattcaatgattatcaacgaattactaaaatctgctaatgatgtaactgttacaaatagaagaacatctattgttattaatggcccaaaaggaaatgttcgagtttatggtacatggaccatcctgccagatggctcgaaacgtttatctacggtcgaagctggggcttttaaataa

SEQ ID NO: 312579 - DNA, 765 bp, Proteus mirabilis
gtgttggaaagagttgttgttgagaataactatctgagtgactcagaatatcgtcaaaaaatctcattggagctaaaagagaagcaaggcaaaatcactgaagtcgagcaacagaaactcgctgagctgcgaattaaagatacagaaacaacacaaagattacttgatgcctgtgcaggcagtgtttcacctgaatgtaccgctgctagaaaagacgcattcgaaacgatagatacctacgtcagtctaacgtatcaaaatccaaaaacagcacaggctggctatcaagaaattgaaaggctattgaattcgacttcaccggaagcacagcaagcgtacaatctattggaatcctatactaaagcctttaaaaacttcggttataccaatgaagaagcacgaacgcgtgcgggaatgtatgttggttcgatttatttgcttggcggtacgtctgcagttgcaaactcaggcgcattagtaaaacagtttggaaaagatgttgctaagccaaatgtgacgtcgccgaaaggaaataatgcaggagctggtagcaactggactgcggataaaaatagtgcatttagtccgaaggatgatggaaatttactaccttataaagatacgatagttaaaattgatcctaaaaattatgtagatatacaatcacctgaggctaaacaacatacactatatggtgaaagtccaactcaaggtggtcatattttcccaggaaatccgggtaaaacaacattcccgccaaactag

SEQ ID NO: 312580 - DNA, 741 bp, Proteus mirabilis
atgagcatcagtaaatcagttagtcaacaaatagaactattacaacccggtaagttattctcttatcaggatatttccggctatgcagaacacagtgatgcagttattaaagctataagccggaattctgaacggttaggtttagtaaaaataaaaaaaggtttattttataaatctgaattaggtcgctttggtcccatggcacccaaggaaagtgatataatcgaatattttatttttcaaaacaataaaactataggttatataacagggcctgcattgtatcatcggtggggtttaactacacaagtaccagtagaagtgagtattgctacttctaaaaacaaaagagaaaaagcagagttatctggtctaagaatctcaacgtttcccgccaagtataataaagtaaataataataatattaagatacttcaatttttggatattattagtaacatcgatcgtatacccgatgcaaatacaagtgaagttacaataaaactttcaaaaaaacttgaaaattattcacgtgataatattaaagaaatggaaaaaatagctgttaacgcttatcctgaaagatcaaaagcaattttaggtttctttttagaccattaccttggttatgtaagttccactctagaaaaatcattaaataaaacatcatatttttattttccactatcttatgggttaaatagtgctttcaagcgttggaagctaaaacataaagaataa

SEQ ID NO: 312581 - DNA, 294 bp, Proteus mirabilis
atgcgacaaacctttaaaaacgaacaatccgctaaacgtgccgccgcggccaagtggtcaaaattacaaaggggcgtagcagagtttaatatcaccttagccgaggggcgcgctgacctttaccctgagatgcctgtcacagtaaccggctttaaaccgaccattgatagtcaccagtgggtgattagtcgcgtgacgcacaccattgatgggaacgggtttataacccatttggaactggaaataaaaatcaaagatattcaaatgacggatgacgagcaaaacgatggataa

SEQ ID NO: 312582 - DNA, 2904 bp, Proteus mirabilis
atgttaaagtcatttagctatatggagtcattaagagaaatacttgatgaattaaattctttaggtcttattattaattatcatgttaagttgagtgttaatcagcaaataaccgtatttatcattagtaatcaaattcatagtgtagaggatttgaaaactacaataaatgagattgaaaaatttacaggtcttgatattgacttgtataatagttcagtattatttgagtttttcaatagtgaagaaggtgatgaaaaaaattattattttgaaaatggtaaaatgagttttggtcttagacgttcattagataatttgattgataatgaagttaataaaaactcagaactatcaaatattataacattttatagtcataaaggtggggttggtagaaccacgtcattagctttgctatctcgttattactctgatattggtaaaactgtatttattattgactgtgactttgaagcaccaggcttattgaattttttttctatttcacagtttgatacacctaaaaatggagttgttgaatatcttaatgataagaggtttgatcataacacttcattaaatgaagattatgtatatgaaatatcaaatagatatacaggtgatggtaagatttatctaatgccagcaggtaatatattttcagaggaaaaaaatcattatttagaaggattatcacgactagatctgtttgggccatcaatgtttttaaacgatatgaaaaatttaattaatgatattaagattaatttttcaccagatgtaatattgatagactcaagaacaggatttaacaatgtttttggtgtgttatcaaagttatctagtcatattgtagctttatttggtgatgacactcaaaataaaccgggtatagagttcatattagataaattttcagataataaattacatactaaaattacagtcgtactatctattgtttctgctaattttagaaagagacataatgcatttaatgaaatgattaatggatttatggaagagtatgataatgatataataataccatcttttgtttttcctagagaacaagctttagaattaataggaacgccagaagagagtgaggatgattttaaatatttttcatctgttgacagcccaacgtcatattcgccatttttatcacatatgaaaaatgtactaagcaaaattgaagataaagccgaagataaaatcgaagataaagtcgaagataaagtcgaagataaagtcgaagataaagtcgaagataaagtcgaagataaagtcgaagataaagtcgaagataaagtcgaagataaaatcgaagataaaatcgaagataaagccgaagatagtcaccttagtcagcaaataatatctatagataataaatttaattataaagatcagttgttgaaagatttatatgataattttccggaattatatgctgaaaacgtaattatgcgtgaggattatttaaaaggtgagttatatttacgcaaatgtatgcaagatatatttttatatgaatataaatttttgataggaggaaaaggaacagggaaaacttatttttacaaagctcttcagaatagaaattttgtagatgcattgctaattagatcagagaaaaaaagaaatgaattcgatactttaaatatcatatctgatgcgaatagtacagaaggatttcttgagctaacagcccatttttcgaatgaaatgacaaatgagtcttttgtaagaaaagtttgggttatttatatctgggttatgttatctaaatatgaagattttaaagttcacagctcatgtgactttactattaaaaatgacgcaatgactattgcatgtattaatgaaataattggagatgctgataaatatcttgaggtagaaaaggaaatttcaatttttgatagactattaaaaacaaataataaatatctaatagtaacctttgatcagttggatgctgtagttaagccaatatcttgggatttaggaatatcaccattaataagactttgtttaacaaactcatgggaaagaattcatcctaaactttttttgagaagagatctttttcaaaaattaggtaatattacaaataagcaatcattaacaagtcaggctattgatttagagtggtcaaaagaagaaatgtatgcatttttctttaaaatagtttactctaaatcgaacaattcatttttggattttttaaattcaaacttttcaagctcctttgttaatgatcaaatattaaaaaggttaagaaggaaaaatagttataatcaattacctgatgacgagtttatattaagggatttagtgaataaattttttggtaacccaagttatgattatatagatgcatacgaggctttgtatagaaacattagaaatgcaaatacgacaataagtctaagaccattcttggatatgataaaatttgcaatagaggcacaaaatagtgatagcactaaaaaacagaaagatgctgttttaggtatttattattgttttttaagaagtgttcgtgcaaaagcagtcgaacgctatttccaagatatggctcaggaagctggtaacgatattattaagtattttattgaggatattcaaaatgataatgttcccgaaaatttaaaatgctcatctcttgttcaaagggattttgagaagttagttgaagtcgtgaagacaaaccatccagatattgcaaaagttccaatgactacctttgaggaaatgctggtcttaaatggaataatttttgttacactgattccggggggtataaaaaaatactcatttgcttatttatataaattttatttgaatttaaaatcaccagcaagaaggaagaaaacaagtaaaaattactaa

SEQ ID NO: 312583 - DNA, 507 bp, Proteus mirabilis
atgaactattatgaatttttaaattctgcaaggaagcatcaaagcacatgtaatgaaatttttttgattttagatactcagaaagctgaagttagtggacaacaaaaagcaaaaaacaagcagctagtatataatttatactatctgagtgggtatattattgagtgctctattaaatatgctatttatcatctaatatcctatgataggaagaagaatataaaagagcttaatcaagatggaataacatttagccataacattaaacatcataaatatgaacgttatgttgatgtgctaaatattcggcagccgggattagtattaatcgatgatataaaaggtattagtaaggaagtggtttctttatataaattatgggatgcagaagtacgatattggtataatgatatagatgaagataaaaagaaaaaattgaataaagataatatactatctttttataagttggccgaaaaattaatgaaagaaatcgagaggatttaa

SEQ ID NO: 312584 - DNA, 198 bp, Proteus mirabilis
atgagtcaggttattcgtgtgagccatcattgcgctgtgtatcgtgggtttacgattattacgttaccacgcaagaagcaggcatcaatcacacgttatcacgtttggcatttaggggagtcgttcggcaagtttgatgctatggctgaagcgacaaaatatatagatgggctgtggaggatgaaaggtggaaagtaa

SEQ ID NO: 312585 - DNA, 300 bp, Proteus mirabilis
atgtcaagaacgcaaggagagaaattgcggcttattcgcaattccgaacaaatgacaaaaagagagttggcagatttgacggggctaaactatgccacttatcacggctatgagagtgataaatctaaaatgacctttgaatctggcgtgaaaatatttgcagttaaacggttcagaaaataccgagattggttcatgttcgatgaggttaatcccgaagctggccaaatcgcaccggctttagcgcacactgggcacgaaagttcaggctcaccccactcagacaagaaaactggttaa

SEQ ID NO: 312586 - DNA, 534 bp, Proteus mirabilis
atgctgaaagataagcaaattgccaagactatatttttaattgctttttttaatatcagtctatttgcttattaccaactagcaccttttatgtttgataatcaaggttatagtgcaagtacttttggctatagtggtatagtattagcaataggtgtaggtatcggttcttacattaataaagcattattaagccatcattggcaatgtgagaaattagtattacttgcgagtattattgcattaattagtgctgtaggtgtttatttattacgcaatcacattagttttattattccaatgatgacaagtgtcgttgcctatggcattgctattccaaatatcttagcgacggctttagcgcaatataaagatcgcttaggcacagcgggtgctctattaggtttattctactatttacttattggtggtggtttagcactggctggatggggacaaagtttagcgataaccttgctgatttgtagtataggtgctttgttactctctttctctcgccaaacagcaaagtaa

SEQ ID NO: 312587 - DNA, 480 bp, Proteus mirabilis
atgtatgagcactgtccattaggtataaataagaaacaacatcgcttgaaatatgcagaattagtcagcatatttgaaagtgaagctatttttcaagcaaatgtaatgtatttagaacagcatggattattagatacaggttatgaaaatgaacatcaatatcctgctatgcgttggagcccaagccaactttattttttaaggattacgaacaaaggtattgattttctacttgcagatggaggcttaagtgcaattttaggtattaaaacaattaaaattcacaatgaacctattgaaaaacttactgaaattatacaaaacgcagaccttgcccctgaagaaaaacagaaaatatccgagctcattaaagaaaaaggtactgaagccgtcatcagtaaattaattgattccattgcaaataatggaggctctctaatgaatactgtattaaagtgttttatatcctctgcaatgtaa

SEQ ID NO: 312588 - DNA, 897 bp, Proteus mirabilis
atgagccagtggacacttgatgatctgcgcagattggataaaaaatatgctgaggatgggatacacgttcatcaacgtccgttagcagcagcaatggatatactaggaacagattttaggcttggtttttttagtaatccagagattcaaaaaatcgtagatgcatatactgttatgatgcctgaagttgaaacaagctggcctggtgcaggaataggcatgattgcatccatggatcaagttagaaaaatgatatttcctgtcttattcggagataaagtgctagagatttggcaagtggcaggtttttcaagtaatcaagagtggtgggagtggtgtcgagaagatagagcaattgcagcagaagtgtcttttgctactgctgatcttcatgattttactatgggtttgaatgaaatagaggtatatgcctcagaagtgtgtgcctcagaagcattaacactctggaaaatgtctcgctctaatcttgaagatatagcaaatacactgcctaatagctttagtcatgattcagttatccagcccatttgcatggtagcagagctttccattaaagcggcgttgatatggagtggtgttgatttaaacgttttgaaaggtaaaaatgggcataaccttacatatttgtcacaggctatgatggagaaaataccccatcgtgatgataaacaaattaaagccgtgattgataatatgcctcattatgtagctagccgctataagccagtggggcttaaacgtcttcaggttgtgcgattagcattaggcgttcaatttgttgcagcatctactttgcgtagaataacgaaatcagacctagctatacaagtagagtcagagggatatcctagtttacgcccaacatttagtatttga

SEQ ID NO: 312589 - DNA, 324 bp, Proteus mirabilis
atgacaccaatagttaaactaacacaatgtgattattcccttgcttttaaattggcagttgttgaccaagtagaaaaaggcgagctcacctataaacaacctcaatatcaatatagcatacagagacgttcaactgttttggtttggttacgtaagcatggtagattagattggccggaaggtacgcccaatactctttataaaggtgctactatgaaccaaacctcggaacaaaaaacacctgaacaacgtattaaagcccttgaaaaagagcttgaggagatgcagctcaaagctgattttttgaggcggttgtcaaagtga

SEQ ID NO: 312590 - DNA, 453 bp, Proteus mirabilis
gtgcgaaaattacactttcttttgaaacaaaaacaattaattattggtcgcgaccgattattttctttgttgagagaacatcgcttattagtgcctaataagcggtcatatcatcaaacaacactgagtcatcatcgatttcatcgacatccaaatttaattaaatcagggtttatcccttcacaaccggaacaactgtgggttgctgatattacgtatttatctacacacgaaggagatacttatttaagtctgatcaccgatgcttattcgcgaaaaatagtggattatcatcttgatgacaatatgaaaacaaaagccgtcaagaaatcatttgtacaagcattaaaaaaacgaagttcgaccactcccttgatccatcattcagatcgaggcttacaatattgttcgacggagtatcaggaaatccattgtaactatcccgtaaaataa

SEQ ID NO: 312591 - DNA, 261 bp, Proteus mirabilis
atgagcaaacgcatgactgaaagccagattgtggcgattttaaaagaagccgaagccggtatgccggtgaaaggtatttgtcgtaagtacggcatcggtaattcaacgttttataaatggcgcgaaaaatacggtggtatggaagcgtctgatgtgcgccacttgaaagagcttgaagaagagaaccgtcgacttaagcagatgtatgctgagttgagcctcaagtctcagatgcaagaagacatcataaaaaagctctag

SEQ ID NO: 312592 - DNA, 597 bp, Proteus mirabilis
gtggcagaacggaaagtctgggcacacgagttacaggtgcagtataacgcaagcgtagtgaagtgctgtcatgtggttggtatcagtcgtaccgcttactattacgagccaaagctgactgatgatgatgaaatcattgatgccttgaatgctttaatcgacaagcactatcggtgggggttcccgaagtgctttaaacgccttcgaaagctaggccaccgttggaaccacaaacgtgtttatcgcgtttatacggggctaaaactgaatctgcgacgcaaaggcaaaaagcgactgctcaaccgtaacccagagccgttagctgcaccgaatgcatcgggaaaatcttggtcaatggactttatgagtgacagcttgcacaacaaagtcaggttccgcacatttaacgttattgatgactttaatcgcgaagttttagggattgatattgcgaccagtatgccgtcattgcgtgtcatacgctatcttgacaaacttgctgagtggcacggttaccctgagaaaattcgagttgataatggcagcgaattcacatcggaagtgtttgtaaattgggcaaagcacatgacattatga

SEQ ID NO: 312593 - DNA, 252 bp, Proteus mirabilis
atgactgtgccagaagcattgctatatacaaggattaacgtcgctcctgcaaaaaggctgtacgagtattgtggccccaaggcagataaattgtgctgtcaagctaaggcaagtaacaataaggaagattttacaacattacaagtagtacagatagaacggataattttaatttctaagtatctatataattttcactataaatttgcaatattatcctttagagaaataaacccacatcaacaactttga

SEQ ID NO: 312594 - DNA, 147 bp, Proteus mirabilis
atgagaatgactcagcgcaaaaaagagataatggaattatttgagacggataatctagagtgggtaacgggtgaaataacttacgaggcctttttgtcctttggaataaaatcaagttgttgtgatataacaacaactgcaacttag

SEQ ID NO: 312595 - DNA, 264 bp, Proteus mirabilis
atgattgatgttgaaagtatttataaaaacgaaagcgtagaagatgtgcttctatattttgccccaaaaacgacgtacccaagcattgatcgttgttatgtgagatataaatttgaagttgttgaaaaagctatacttataaaaacaatgggtaagcttttacaggaaggtaaattagctaaagataagaaggggctaacaattaaaggccctaattggaaagagcctaaatttgttactcaaaaaaaatacggaattaaatag

SEQ ID NO: 312596 - DNA, 264 bp, Proteus mirabilis
atgattgatcggctagaaaaaatattgcgtggtgaaataaaagctactgatattgacaagcggttttatacacatgaaattagagagttagaacggtatcgtaatttaggtattaaagatggtgaggtaccgaataatattgatgaggtttggaataatactcatacagcgacgctagaagattataatatcaatgaacggacgcagcctttatatacaccagaggctatcgaagcatatgataaatctcaggagataagataa

SEQ ID NO: 312597 - DNA, 810 bp, Proteus mirabilis
atgagtgttcccgttttaggtcttggtacttttcgtttaaaagacaatgtggttataaactctgtaaaaaccgcattagaactaggttatcgtgctattgatacggcgcaaatttatgaaaatgaagccgctgtaggacaagctatttcagaaagtggcatatctcgagatgcgctttacatcacaacaaaaatttggatagagaatttaagtaaagataaattaatccctagtttgaaacaaagcttaagtgatttacaaacagattatgttgacttaaccctagtccactggccatcaccaaatgatgcagtttctgttgaagaatttatgcaagagttattagctgctaaaaagatgggattaacgcgagaaattggtatttcaaattttaccattccattaatggaacaagctattgttgccgttggtgttgaaaatatcgcaacaaaccaaatcgaattatcaccttatttacagaatcataaagtggtaaactgggctaaacagcatggtattcatattacatcttatatgactctagcttacggcaaagcattaaaagatgaaacaatacaaaccattgctaaaaaacacaatgcaacaccagcacaaattattttagcttgggctatggatgaaggttattctgttattccatcttcaactaaacgtgaaaatttagccagtaatttactcagcgtaaatatcaaattggatagtgaagataaacaagcgattgccaagttagattgtcatgatcgtttagttaaccctgaaggtttagcgcctcattgggatcaagattaa

SEQ ID NO: 312598 - DNA, 219 bp, Proteus mirabilis
gtgatccccgccaatttatctttacgtcataatcccacggaagtcgcctctgtctttgaaatgccattaagttatgtactcaatactcagcgctatttaccgttagattttcgtcgtgctggtaaaatgcatcgtatctatttttacccttatgaagggcatttggtgtggggattaaccgcggctattttacataacctcgctttgcatattacttaa

SEQ ID NO: 312599 - DNA, 1131 bp, Proteus mirabilis
atgatagggaatatatttattagaagtgagaatgaacatcttgaatttaactctgacaggactaattttgttgataattatttaactagaaacttaattaagactcttgaatctttaaattattttattcaaaagaatggtgctatattaaaggatgaattaaaacaagaaaaaaaacaagcacctaccggaagagcgttcccaattgacacacctgaagaaccaattattaaaacagcatcaatattaattgacagaagcaaaaatactaacttttatattccctcagaacaaattaacttaattgattatatatctatagctaaagatagcctaggtataaatataaatagaaatgaaattataataagtgtaaacaatgaaaaaacaggaaatatactaagctcaatagaaacaccatgtgatattactataaactttcgatatgatgaccctctaactggtattgtatctaaagatgtctatttatgcttcaaacaaaaaatatcaaatatttctggtagggccaatgaaaaatctttatttacaatacaatcaggctctgactataaagtcgatattgaaattgtatcagatataattcatgctattgataaggtatattccacaaaatcaaaaaatgattaccttcctcttatagcttgttcagttagagcaatctttgaaatatctaaagatagaacaatcaggaaacacaagggtttattcaaaaaatttaataacgaaaagctcagtgaaaaaacaaaaagagaaataaaagacactctattaatagatacattacagatattctatctagttaaaaaaaatgcaaaactgcaaagttatatttctgaagttttagatattagctttaaaacatttaataacttactaaattttaacttcttaggccttaaagaggcgattaaaaattcacatattggagctcaccaatctacgcgatttttatctaaaccaagaatcgagaagagtgctgacatctgtggtcttttcactgttatctgtgacattttaataaaaatagataaaaacaaaataaatgatctagttacaaaaaaaataaatgaagatgatttgaatttttattttaattcattagtagaataa

SEQ ID NO: 312600 - DNA, 207 bp, Proteus mirabilis
atgctagactttatatataacaatttatatagcggtcaatggtgtagaacattgaatattattggtgaaggagtacgtgaatgtttagaaattaaggttgatacgtcactgctagcggagcgtattacaaaagtgcttggacgattaaaaatggaaagaggattggtgaaacagatcagagtcgataatggtcctggacttatttaa

SEQ ID NO: 312601 - DNA, 243 bp, Proteus mirabilis
gtgaatattttgaagtttgcagattcaggcatgaaaattgacgatatttgtcgccaaaatgatgtcagcaatgccacttattacaattggaaatcaaagtatggtggcatggatactaatgatgctaaacgattaaaagagcttgaagaagaaaatgccaaacttaaaaagatgtttgcagaaattagccttgaacatcatgtaatgaatgaactttttgtaaaaaaggttggtggcggctaa

SEQ ID NO: 312602 - DNA, 228 bp, Proteus mirabilis
atggcctttttcattggctcaatatcacgcgcaaccgtaataatttcaggcttatcaacaccatctttattatcatcagtttttttcttaagatttaaagtgatcccttctggagcatctttgatctcattagtttggcgttcaatatcaatcccattaatcgttaactttgcattatttgctttaacgatctgtgtcattgcgccactgtttttttcagtagagtag

SEQ ID NO: 312603 - DNA, 597 bp, Proteus mirabilis
atgtcattagaagaaaaaaatatcgataaaccaagaacaaagccagccgaagttcgtttagaagagttaatgaacgccgcagaaacactatttcttgaaaaaggatttgatgccacaaccgtcagcgatattgtaaaacaagcgggggtcgctaaaggaacgtattatcactattttacggcaaaaacagatattctcgacgcactgcgaactcgatatatggattggtatattgataaagttgagcaagcaatggcaagctgccaacttcaagattttcgcgctaaattaaaacagtggtgtgaaaccagcgttattgcttatgttgaaaaacaagaattacacgatatgctttttcatcaagtctttcatcaaagcggtaatattcatgaaaatagggcgctacagcagttacaaacgatattaatggggggagcagagaataaaatgtggcaagtcctacagcctgaattaacctgcacgcttatttatcatggtatgcatgctgccgttgataatttagaacacagtacggaatacacatcacaaacattaggtgcgctattatatcgacaatttacacaattattaagttaa

SEQ ID NO: 312604 - DNA, 270 bp, Proteus mirabilis
atgcccattcgttgtcctaatccacaacttaataatccatcaatagcacgtatacctgacttaaatagtgtagtaataggtagcctatcactaaacaaaggtggccgaccttcgataggatataaggtctcaaaggtcttctctgccatttctgtattaaatcgtaataaacaagtccctttactatcaatcatgctgcctaatatatgtgggcctagggcaactgaaaatgtttttcctgttggttcaactataatttgtaaagagtaa

SEQ ID NO: 312605 - DNA, 228 bp, Proteus mirabilis
ttggttcgagcccaataccgcccaccacttctttttatatcattcgttatatcattcgataaaaattcttttattattccttatccttatccttatccttatccttatccttatccttatccttatccttatccttatccttatccttatccttatctattatccatggctctcattttgtatttaggacatctgttgctagactgcattgacctattgacctattga

SEQ ID NO: 312606 - DNA, 198 bp, Proteus mirabilis
atgaagctcatttcagcgatattattaactttattttttgtttcaggatgttcgacatcacagtctgatattgataaatatgagcaatcgagtaaagatgcgatgaagccagatccatattctgacagcgtgattaatacgattagacagcaccaaaagatcactgtatgtaataataaaattggtgggtgttattga

SEQ ID NO: 312607 - DNA, 156 bp, Proteus mirabilis
atgttaatagatggctctcttaaagttaattcagatgatgagataaatatttggggtaaaatcaaggggatgggtcgtgttgaattacaaggtaaatatggtaattttaatagcagcgataaagtagagttaacagaagaagagctgctggattag

SEQ ID NO: 312608 - DNA, 516 bp, Proteus mirabilis
atgccgggcaactgcccgcattatgggcgttggcctcaacacgattttacgtcacttaaaaaaatcaggccacagtcggtaacctcgcgcatacagccgggcagtgacgtcatcgtctgcgcggaaatggacgaacagtggggctatgtcggggctaaatcgcgccagcgctggctgttttacgcgtatgacaggctccggaagacggttgttgcgcacatattcggtgaacgcacgatggcgacgctggggcgtcttatgagcctgctgtcaccctttgacgtggtgatatggatgacggatggctggccgctgtatgaatcccgcctgaagggaaagctgcacgtaatcagcaagcgatatacgcagcgaattgagcggcataacctgaatctgaggcagcacctggcacgactgggacggaagtcgctgtcgttctcaaaatcggtggagctgcatgacaaagtcatcgggcattatctgaacataaaacactatcaaggaaggtgcgaataa

SEQ ID NO: 312609 - DNA, 402 bp, Proteus mirabilis
atgaaccctgttccatggctccagatgacaaacatgatctcatatcagggacttgttcgcaccttcccttgtgttgcacagattgcacgtgaaaatggcgtcaatgataatgttattttcaaatggctcaggctctggcagaacgaagggcgtgtttcgcggcgtcttccggtaacgacctcttctgacactggcgttgaattattacctgtagaaataacgccggatgagcagaaagaacctgtggcggccattgcgccgtctttatccacttccactcagaccagagtcagtgccagttcctgcaaggtggaattccgtcacggtaacatgacgctggaaaatccatcgccagagctgctcacagtgttgatccgtgaactgaccgggaggggaagatga

SEQ ID NO: 312610 - DNA, 351 bp, Proteus mirabilis
atgatctcactcccatcaggtacccgtatctggctcgttgccggcgttaccgatatgcgtaaatccttcaacggactgggagaacaggtacaacatgtgctgaatgataatcccttctccggtcacctgtttatcttccgtggccgacggggtgacaccgtcaaaattctttgggctgatgctgatggtctgtgcctgttcaccaaacgcctggaggaagaccagtttatctggcctgcggtacgtgacggcaaggtatccattacccgctcgcaactggcaatgctcctcgataagctggactggcgtcagccaaaaacatccagccgtaactcactgacaatgttgtaa

SEQ ID NO: 312611 - DNA, 1614 bp, Proteus mirabilis
atgagtcagaaatacctcattcgcatcgcagagctggaaagattgctctctgagcaggctgaagccctccgtcagaaagaccagcaactgagtctggttgaagagacggaagccttcctgcgctctgcactgacacgtgccgaagaaaagatcgaagaagatgaacgggaaatagaacatctgcgggctcagatagaaaaactgcgccggatgctgttcggtacccgttctgaaaaactgcgtcgtgaagttgaactggctgaggctctgctgaaacaacgtgaacaggacagcgatcgttacagtgggcgggaagacgatcctcaggttccccgccagttgcgacagtcgcgccatcgtcgtccgttaccggcacaccttccccgtgaaatacaccgcctggagccagaagaaagctgttgcccggagtgtggcggtgagctggattatctgggggaagtcagcgctgaacagctggaactggtgagcagtgccctgaaagtgatccgcacagaacgggtaaaaaaagcctgtacaaaatgtgactgtattgttgaagcaccggcgccgtcccgcccgatagagcgtggtatcgcgggccccggattacttgcccgcgtgttaacgggaaaatactgcgaacatctgccactgtatcgtcagagtgaaatctttgcccgccagggtgtcgaactgagccgggccttactctccaactgggttgacgcgtgctgccagttaatgacaccggtgaatgatgccctgtaccgttatgtaatgaacacccgcaaggttcacactgatgacacaccggtaaaggtactggcaccgggtcagaaaaaggcgaaaacagggcgtatctggacgtatgtccgggatgatcgcaatgtgggttcgtcatctcctccagcggtctggttcgcgtactcgccgaaccggcaggggaaacacccggagcaacacctccgccccttccggggtatcctgcaggcggatgcgttcacaggttacgacaggttgttcagtgcagaacgtgaaggtggtgcactaacagaagttgcgtgctgggcccatgcccggcgaaaaatccacgatgtatacatcagcagcaaaagtgcgacggcagaagaagccctgaagcgaatcagtgaactgtacgccatcgaggatgaaatacggggattaccggagtcagagcgtcttgccgtcaggcagcagcgaagcaaagtgttactgacgtcgctgcatgaatggatggtggagaagaatggtacgctgtcgaaaaaatccagactgggcgaagcgttcagctatgtactgaatcagtgggatgccctctgttattacagtgatgacggtctggcggaggcggataataatgctgcggaaagagcgcttcgtgcagtctgtctcggaaagaaaaactttatgttctttggcagcgatcacggcggcgagcgtggagcactgttgtacgggctgatcggcacctgccgtctgaacggtatcgatccggaagcgtatctgcgccatatcctgagcgtactgccggaatggccttccaaccgagttgatgaactcctgccatggaacgtagtactcaccaataaataa

SEQ ID NO: 312612 - DNA, 888 bp, Proteus mirabilis
atgccactgctggataagctgcgtgagcagtacggggtcggaccgctatgcagcgaactgcatattgccccgtcaacgtattaccactgtcagcaacagcgacatcatccggataaacgcagtgcccgtgcgcagcgcgatgactggctgaagaaagagatacagcgcgtatacgatgaaaatcacaagatatacggtgtgcgtaaagtctggcgtcagttgttacgggaaggtatcagagtggccagatgcactgtggcacgtctcatggcggttatgggacttgccggtgttctccggggtaaaaaggtccgtacgaccatcagccggaaagccgttgccgcaggcgaccgcgtaaaccgtcagttcgtggcagaacgacctgaccagctgtgggtggctgattttacttacgtcagcacatggcagggggtcgtctatgtggcgttcatcattgatgtgtttgccggatacatcgtggggtggcgggtctcatcgtccatggaaacgacattcgtgctggatgcactggagcaggcgttatgggcccgtcgaccgtccggcacggtccatcacagtgataaaggttctcagtatgtatcgctggcctacacacagcggcttaaggaagccggattactggcatcaacaggaagtacaggcgactcgtatgacaacgcgatggcggagagcatcaatggtctttacaaagcggaggtaatacaccgtaagagctggaaaaaccgtgcagaagtagaactggccacactcacgtgggtggactggtataacaatcgacgattgctggaaagactgggccatactcctccggcagaagcagaaaaagcttattatgcttccatcggaaacgatgatctggcagcctga

SEQ ID NO: 312613 - DNA, 327 bp, Proteus mirabilis
atgactaaaaatactcgtttttcccccgaagtccgtcaacgggcagtccgtatggttctggaaagtcagagcgaatatgactcacaatgggcgacaatttgttccattgccccaaagattggctgtacgccggagactctgcgtgtctgggttcgccagcatgagcgggataccgggggcggtgatggagggctcaccaccgctgaacgtcagcgtctgaaagagctggaacgtgaaaatcgtgaactgcgccgcagtaacgatatccttcgccaggcttccgcttattttgcgaaggcggagttcgaccgcctctggaaaaaatga

SEQ ID NO: 312614 - DNA, 543 bp, Proteus mirabilis
  misc_feature (528)..(537): n is a, c, g, or t
atggcagccactcgcattgaaaaagactcaatgggacaaatcgaagtaccagctgaccagttatggggagctcaaacgcagcgttctctagaacacttccgtatttcagtagaaaaaatgcctgttgcactgatccacgcgcttgctttaaccaaaaaagccgccgccggtgtcaatatggatctcgggttattacctaaagaacgtgcagatgcaattattgctgctgctgatgaagtgctggcaggtaaacacccaactgaattcccattagcaatctggcagaccggttctggcactcaatcaaatatgaatatgaatgaagtgttagctaaccgtggtagtgagatactaggtggtatccgtggcatggaacgcaaaattcatccgaatgatgatgttaacaaaagtcaaagttcaaatgatgtgttcccaacggccatgcatgtcgctgctgttatcgcattacgtcaggatttactgccggaattaaaatcattactgaaagtatttaaagagaaagcagannnnnnnnnnccatga

SEQ ID NO: 312615 - DNA, 207 bp, Proteus mirabilis
atgtctgcgggtaaatgggcccttgaaggtattgaaacgcgagctcaattattagattcagatgcaattttacaaaactcatctgatccatatttaatgatgcgtgaagcctatttccaaaaaaatgatttcgatgctaatggcgggaaaacaggtgaaaatccaaacgcaaaagcgattgaagatgatttagattctatcgattaa

SEQ ID NO: 312616 - DNA, 2109 bp, Proteus mirabilis; identical to SEQ ID NO: 305116

SEQ ID NO: 312617 - DNA, 675 bp, Proteus mirabilis
atggaatattatctgcttgtggttatcaagtttattattggttttacaataattttggctcatatgaatatttcagggaagacacaactctctcaactaactcccattgattttattggtaattttgttttaggggggattatgggaggggttatttacacagatgcaatcccgctttaccaatatgttattgtctttttgataggtgtattttttatttcttttctcaattatatcagtaaaaaatttaattttttccgagcagtagcgataggaaatcctatcccgatcatcaagaagggaaggtttattatggaaaacattactgagaagaaaaataagattgatattcttaatatcacctctaggttacatgcccaaggaattcattcttttcaagaagttaattatgctcaaattgaacctgatggacaaataacggtggtgtgtgatggtgctaaaatgccctctatcattattatgaaagatggagtgatcagagcttctgaacttgagcagatagaacgagatgaaaattggttaaacgaagagatgaaaaaacagcatatagataacccagaagatgtttttttagccgaattttgggatggtaaagtcaatttcattttgcaagacggtaagatcaaacacgatttcattccgactgctgagtag

SEQ ID NO: 312618 - DNA, 306 bp, Proteus mirabilis
  misc_feature (255)..(264): n is a, c, g, or t
atgaacacgaaacattggtcacgtgtcgaatatttacacgaaacagtaaaaaataagaatattattattaaaggtcagcatagctattacagtgattgttgggataatggctttgaagcatctgtagtgcgttacctttatggcgatgaatttagccttcagtgggaacctttatgggaaatcgataaattatatatcggtgactatgtttgtattggtgctgaagcggttattttgatggggggcaatcatacnnnnnnnnnnatactcatcgtatggattggttttctctttatccatttttag

SEQ ID NO: 312619 - DNA, 348 bp, Proteus mirabilis
  misc_feature (311)..(320): n is a, c, g, or t
atgtctattatcgctattttagtttatcaatggtatgagttattaggtattcatttaactgttgccccatttagtttattaggtattgctatcgcaatatttcttggttttagaaataatgcaagttatagccgacttgtggaagcaaggacattatggggaaatatgttaattacccatcgcaacatattaagaaatataaaagccttattaccggaagataaacaatttaatcgtgacttttctaatctacttattgcttttagttggagtctaaaacatgagctaagaaaaacaaacccaatggtcgnnnnnnnnnnttaccccgacctttatttgatgagataa

SEQ ID NO: 312620 - DNA, 708 bp, Proteus mirabilis; identical to SEQ ID NO: 10331

SEQ ID NO: 312621 - DNA, 957 bp, Proteus mirabilis
ttgcaagctgagataaatcaagttgatttattgagagatgaagagcgagcactttcggtcgaaactactcatcttatagggcaattatcagttatacagcctacaattgataacattaattataatctgacacaattagggatcaatgatttcaatattatttgtcatgatgagagcttgaaactatatcgcttacatagacaaaaccagccagatgattctgaggtctttaaatctttgagtgaaggcgaaaaaacaatcatatctcttctctatttcctagaatcatgcattggtcacgtacctgatagccagacaatacaacctaaactgattgttattgacgatcctatttccagcctgtcacataactatatttatgaagttgcttcgatgataaaacataaattaattttaccgaagattgcgcaacacattgttatattgacgcataatatatttttctttcaagagattctactttcagtttataaacgattggctcccgaacgtacaacaccaaaggggtgtgcactttatcgcatcattaaaggagaatatagtgattgtatcccattatcgatgcacgacatgctgaatgagtatcaggctttatggcaaaccatacgggatgtccgcgatggaagaagtttaccggtagtattacctaatacaatgcgaaatattcttgagtactatttcagtttttcttgcaaacaggaaaaactggataaagcgctaaataagctagcagttgaatattcagcaggggaatatgactcattttatcgagcaattaaccgtcattcccattctgatggcagaaatatcatggctacaggagtgattaatgtagaaatgtatttccgtttatttcagaaaatttttgaagaaacgaaggattctgatcattacaacacgatgatggggattactgttgagcaaacagaaggttga

SEQ ID NO: 312622 - DNA, 219 bp, Proteus mirabilis
atgaaaatggaagaaagtataaaaattcaaattaatgataattatctaaaatatagaaagatttatattggtgagtatcttatctacaagagtaataaagcttttcctcttggtttttttaccaagaatcaatttgaaaaaaatgattcagaaattatttttttaatgaaagaatttttagagaagagtggggttaatagtgaagtgttaattatctaa

SEQ ID NO: 312623 - DNA, 285 bp, Proteus mirabilis
atgctattaaaaaaaatatttttagtgtcttttttattccctactctctcttacgctaataccttaccaacatcaaatatagataattcactaactcccaaccatgataatcttgcccgtttttcactcggtgacaatagtcaagcatccggcagcggtgccactgctataggtatcaatagccaagccaccaatactcgttcggttgctattggttatggtgcattagccaatgaggaaaatacggtttcatttggtaatagcgaagagaaacaaacagcatga

SEQ ID NO: 312624 - DNA, 129 bp, Proteus mirabilis
atgagtctctcaaaatctcaaaccttaaagtttgtcacacaaagtttatctttaaaagagacactttcgggttgtgaggttaagcgaataagcgtacacggtggatgcctaggcaatcagaggcgatga

SEQ ID NO: 312625 - DNA, 357 bp, Proteus mirabilis
gtgggggagttaagtgcgataaatggtgttgctggcgcctttgcagagcaggttcccattattcatattgttggtgcgccttctcagtcaaagcaagagaaaggaaaaacattacatcattgtttagcgacgggtaggtttgatgcctttgaaaaaatgtatcgtcatatttcaaaaacaacggctgtattaacatatcacaatgcgacggaagaaattgatagagtattagaaacattgtggcgttatcgatatccggtttatttattaataccagaggatgtcggcgtgatgaaagttaataaaccaaagttaccattacaattaacattacctcaaagtaatcccgacgattga

SEQ ID NO: 312626 - DNA, 1140 bp, Proteus mirabilis
atgaaaaaaacaaaacatttatttaaaacaaagggttgtaatattccttttacttctgtgatgatggtaagttttgtcttaatgggctgtaacgatcaatcgactcagccaaccaagcctgctatcccagaagtgggagtctatactgtcaaagaggaaattcttccattaacggtcgatttgccagcaagaacggcatcttatcgtgtctcacaggtgcgcccacaagtcgatggtattttagaaaaacgtctatttactgaaggtagtgatgttaaaaaagatcaaccactgtatcaaatagataaaaaaccttacgaaactcaggtagctaaagcacaagcggcttacgataatgtgaaaaaattagctgcccgttataaatctttacgtgccactaatgccattagtcagcaagaatatgacgatgtagtttcacgccttgatcaagctaaagccgatttaaatcaagcaaagattaaccttggctatacccaagttttatcacctattagcggcaaaatcagtcgctcttttgttagtgaaggggcattagtgagtagtggacaaagccagccattagcgaccatcacacagcttgatcctatctatgtggatattactcaacctattactaatcaactgaaattaaagtcactgatccaacaaggtgtcgtcactgatagtgaagataaaatggatgtgacgctgtttttagaagatggctctcagtacccttataccggtacattaagtttttccgaagtccaagttgagccaagtacaggctcagtgacattacgcgccaaattccctaatccacagcaccaattattaccaggaatgtataccaaagctcgcattatgcaagggactcaagagaaagcgattgttgtgccacaacaagcgattacctttgatgcccgtggtaaatccatcacatatatcgttgatcaacaacaagtattacaagcaagagatgttgaaatattaaaaccacaaggtaatggatggatcataaaacagggattacaagctggcgataggatcatgacagaaggtcatcatcgtgcaaaaccgggcgtaaaagtcaatgcggttcctgctaacaacatttcattaaagaccaccttagagtaa

SEQ ID NO: 312627 - DNA, 891 bp, Proteus mirabilis
gtggttatctttttctcaattattaactgttcctatttagtcttttctacggtattgaaagcttatttttctgaaactttatcaatatcagcaaagcctaaaatattttcactaaactatacttttattaatatcgggtggacggttggcccacctattggcacattattattaatgtatggtactcaattacctttttggttagctgcaatatccgccagtattcctttatttatgatccaatgttttgtgcaacgttcagtggtagaccattccacagaagaaaatagtgtaaagtgggatccgaaaataatgctaaaagataaagcattaggctggtttgtgctttcaactttttttggcacattaacttttggtacatttgcttcgtgtatttcgcaataccttttagttgtttatgatgctaaattggctgaatctgctattgcggtgatcctccccgtcaatgcggccattgtcgtctcattacaatatatcgtcggtaaacaagtggttgctgaaagactacgtaaattaatgaccttaggcacactcttttttatcttaggattagcgggctttatgctggcgggtgataatttaattttctgggcaatggcgatagcaatatttacctttggtgaactgatttatgcacctggtgagtatatgatgatcgataatattgcgccgttaggaatgaaagcaagttatttctctgcacaatctctaggttggttaggtgctgcattaaatccacttgctagtggttatatcctgacaaccttgccccctatttcgttattcgctattttaatggggatcgcagtactagcttggctttgtatgttgcaaggtatgaactacagtgaaaaaagaatagctgcttaa

SEQ ID NO: 312628 - DNA, 999 bp, Proteus mirabilis
ttgcgtcaatgtgatcaggaattagcagaaatacaacaacaattgcaagctgagataaatcaagttgatttattgagagatgaagagcgagcactttcggtcgaaactactcatcttatagggcaattatcagttatacagcctacaattgataacattaattataatctgacacaattagggatcaatgatttcaatattatttgtcatgatgagagcttgaaactatatcgcttacatagacaaaaccagccagatgattctgaggtctttaaatctttgagtgaaggcgaaaaaacaatcatatctcttctctatttcctagaatcatgcattggtcacgtacctgatagccagacaatacaacctaaactgattgttattgacgatcctatttccagcctgtcacataactatatttatgaagttgcttcgatgataaaacataaattaattttaccgaagattgcgcaacacattgttatattgacgcataatatatttttctttcaagagattctactttcagtttataaacgactggctcccgaacgtacaacaccaaaggggtgtgcactttatcgcatcattaaaggagaatatagtgattgtatcccattatcgatgcacgacatgctgaatgagtatcaggctttatggcaaaccatacgggatgtccgcgatggaagaagtttaccggtagtattacctaatacaatgcgaaatattcttgagtactatttcagtttttcttgcaaacaggaaaaactggataaagcgctaaataagctagcagttgaatattcagcaggggaatatgactcattttatcgagcaattaaccgtcattcccattctgatggcagaaatatcatggctacaggagtgattaatgtagaaatgtatttccgtttatttcagaaaatttttgaagaaacgaaggattctgatcattacaacacgatgatggggattactgttgagcaaacagaaggttga

SEQ ID NO: 312629 - DNA, 444 bp, Proteus mirabilis
atgtacttatatctttctgctgctgataaaaatccaaacttaaaagtggaagattatttccaagaattagcaataccttatgttgaaaaagcgaaaacgctttgtatcagtccattaagtcaattagtaatggataataaattaaacgcatcaaatagcttaaaacctaagttttacgagctattagagcaagaagcgtcaagtttaaattatagaaaacttcttgttgataagcccgtatttatagggattggtttagaagatattcatgtgttaactcgttggcaacaagagtttgcaagagatgtattggaagcaggcacaaatgcatatgtatatgaatatccgaatattggtcatttagatgtatacaatgtctctttgcgaaattcagtgccttttgtatttgaactgatgaaaaatgagcatagcaaaatagactaa

SEQ ID NO: 312630 - DNA, 630 bp, Proteus mirabilis
atgagggaaacttcattaggaattcaaaaatatgagctggtacaacttacagagagactggagttgttacttaatagtgaaggaactcaatatacagagattattgaaccagaggtttatggcctatctgacgaaatgctgactctacttcaaagttcgttgacagcatcgtctgatacaccattttcagccattattcagcagttaggtaacgctgattgggttcatagtggaacaggttatattaaagataatatttgtccattttgccaacaaaaatttgattctcagcatcttcttcatgaattgacactcatgtttgataaatcttatgaagatgctctggcaacgcttacccacagtcagacagtcatttcccatgaattagacttattggagtcattccatgagcatttacgacaacaccctgtagttagtgatgatcaccaagtttttagtattattaaatctctgcaacaaactttacgtaataatctacaatcactcagacaaaagctactacagccttcgcaatccatacaacctgacgttattacagatatacgtcagcatttgaaccagatactggtaactttaaatagtaacattagagacaataatcgcctgtag

SEQ ID NO: 312631 - DNA, 159 bp, Proteus mirabilis
atgacaacagaaacaaacaaatcgaatagtgaaaaaaaatatatcgttgctctggatcagggaacaaccagttcacgcgctgtcgtaatcgatcatgacgccaacattgttagcatctcacaacgcgaatttacccaaatttatcctaagcccggctga

SEQ ID NO: 312632 - DNA, 339 bp, Proteus mirabilis
atggcaaaaacagtagcagaacgaaaagcggagcaacgtaagcggcaaaaggaatcaggcgttactaaaatagagttatttcttgatgagcaagagttagaaatacttcaaagaaattgcgcattacgtagaccaggaagagagccttatgatatcgctgagtatctctcaatgttgattagaattgatgaccgctcggtcatgtctttagtctcagagttaaacaaagggcgttgtaaaaagtgtaatgaacaattaccggtagctgagtgttgtcttagtggaagctctgagtgctcgaatacgcaaggttggcatgaactgaagttagcactttaa

SEQ ID NO: 312633 - DNA, 630 bp, Proteus mirabilis
atggaagagaaaaatttaatgccatgctgggatttacagcaagagctagatgaaaaatcagtaatggcattactcagatcaattgctggagtattgattgagattcctcagcatgagcattacttagatagcaattggtcaacaggagttcgggcttatgattgggtcagaaattacttgtgtttagcagcagaacagggaactatacccggcttaaaaatgatatctaaacagcttgattttgttttggctatcaatgaggttcctattcaattctccaaagattgtattagcgcccctaaaaagaaacatcgtttagttagaaatcatgctgaatttgaacaaatgtcattatttggctcaagtgaaccagaaatagatgttatttggagagtactagcagaaccatactacattgaagatacggatgagtatccgcaatgggatgttgcattagttggtataaaccaatatggcgttaagatgagtgaagttagataccatgaaacagtatctgtacctttaactgataattctgattcactaccagaagctgccgatattaatgatgtacctttaaaacgccgcaacgcaccagatgaaactgtgaaaaaagatggaactgtttga

SEQ ID NO: 312634 - DNA, 243 bp, Proteus mirabilis
  misc_feature (226)..(235): n is a, c, g, or t
atgagacgtcgagtcgctaccattacattaaatcctgcttatgatcttgtgggattaagtacccctattgaattgggtgaagttaaccgagtgacaacagcgggatttcatgctgccggtaaaggtatcaatgtagccaaagtattaaaaagccttggtattgatgtcactgttggcggttttttaggtaaagagaatcaagatggctttcaaaaagagtttagtnnnnnnnnnnctaactga

SEQ ID NO: 312635 - DNA, 462 bp, Proteus mirabilis
atgccaaatagcgccctattgaaaggtgatcatattgtcatcttgctattgatatcgctatgctctttttctgtttctgcaaaaaaaatcattcaaggcattactcaagatagtgaaaatattgttgttgctaaaggggatattcccactcctgaaaaatttacaaccaatattcttaactatcggcagaaagctgttgatcagttgaccttagttgaaactgcattaaaaaatgtcattgttaacagtgaaaaaaatcaactgactgatgcccaactcgcctatcaacaagcgcattatcactatgaggtgatccgcccgattattgcattgtttggcgctactgaacgcctattaaataatcgggctgatttctttcttgaaagagaaaactcgccccgttttagtggatttcatttggttgaatatcaactctttaaattagaggatatgcactgttaa

SEQ ID NO: 312636 - DNA, 240 bp, Proteus mirabilis
  misc_feature (54)..(63): n is a, c, g, or t
atgttcctgctaaaactcctatacggatcaaaattcgcaatactggtagtagcnnnnnnnnnnggtagtagccccgttcaatttgaaagcactcaattacgtaaagaaaaagtattagcgcctggggcgagttctgtcgttgtgattgcgcctctaaaacctggacgttacaccttctttgatgattttcatctgtctcaccctcaaggtgaaatcgttgcgactgaaaaggctgaataa

SEQ ID NO: 312637 - DNA, 465 bp, Proteus mirabilis
atgattactgatcatattccagaaaaagaaaagattgcgatgtttgaattcatgtatgcatatgcgagattagaatattgtctaaaattaaaaataaaagacccaacaagacaacctgaaggcaagaacgcagaagctgattgggataagtttgttaaagataataaaaaaataataacatataaagacataccggcaggaaaaaaattatttgatttaagacctaaaaaacaggtgtttggcgatacggcatgggttgaaattaagaatacaggcaacgagttaaataatattgttagtgctttaaaaacagtaagaaacaatttatttcatggaggaaaagagctggaacatggttttgattattctgatagaaacatggagctagtcaataccagtttagacgttgtacatcaaattattaagtttctaaaatgggaagaagatttctcccctaatcattaa

SEQ ID NO: 312638 - DNA, 168 bp, Proteus mirabilis
atgactgtagataatttttattcagaagtggcaagactaatgaggggtgctgggtggaaagcgcaatcaatatctagtacatatgagacttggcatcatattgtgtcaggaaggaaagttcaggttcctaatattttaagagatgccgggttggaagctagattttag

SEQ ID NO: 312639 - DNA, 123 bp, Proteus mirabilis
atggaaagctcatttacgccaacagaagaactactaaacactcgcgctacacaacagaaatcgcttaacaaagatattccttaccaagaaattttgttaactcgcctgtctatgcacgtctag

SEQ ID NO: 312640 - DNA, 1407 bp, Proteus mirabilis
atggaaaagagtaaaaaaataaaatgggctatgcctgatgcctttattattatttttggtatcgttattttagcggccatcgccacctatttgatccccgcgggaagttatcagcgggaaaccgttaatggattaaaccgcgttgtccctaatagctttaattatgttgcacaaaatccagcttcattgatggatgtgttttatgcaatccctgtagggttaaaacaatctgccagtattattttcttgatctttatgattggtggcgcgattgccatttatgatcgcacccgtgctattgattcaggtattaatgcgcttattgttaaaaccaaaggtaattatcaagctcttattattacggttgcttttatttttggtatgttgtcatcccttgggcttgcggccaatgccgttattgcgtttatccctataggaatagccctttcgcgatcaatgaaacttgatgctattacgggggttgcagttgtttatttaggctattatgcaggtaatgcggttggtgtattagatccaactattttaggtactgcacaaacattagctgaagttcctcttttttctggtgttatttttcgagttgtattattcgctatcttaattgttgtcactattgcttatattgtctggtatgccagacgtattgcgaatgatccaacgaccagttatatgtatggaatagctaaagatgatcctgattatgaacagccacacactcaatcattagatagcaccttctcattgaggcaaaaattgagtttggtggtatttatagcgtttataggattgtttttatatggcgcttttgaatataaatgggggattgaacatctatcagccatttttattatgatgagcattgttgtggcggctatgtttaaaattgcccctaatgactatatcaaaacctttatgaaaggtgctcaatctttagtgtatggggcattggtggtggggatcgccagagcggttattgttattttagatgaaggacgagtgcttgattctattgtacaagccacattagtgccattacagcaaacctctcacttttggggcgctcaattactttatttctttaatttactgtttaacttgctagtcacatcaggaacgggacaagcatcgattgttatgcctattatggtgcctattctcgatattcttgatcttacacgtcaaaccggtgtccttattttaaaactcggtgatggctttaccaatattattaccccaacatcaggtgtacttatggcggtactggcggtaggtaaagtgccgtggacgcgttgggttaaatttgtattccctattttaattatttgggtcgtgataggtatggctgcaattggtattgctaccgcaataagttatggaccagtgtag

SEQ ID NO: 312641 - DNA, 198 bp, Proteus mirabilis; identical to SEQ ID NO: 299913

SEQ ID NO: 312642 - DNA, 570 bp, Proteus mirabilis
atggactgtgctgcatctgaattctataacaatgagactggtaactacgaactgaaaggcgaaggtaaaactttcacttcacaagaattcactcattacttagaagaactgactaaacagtatccaatcgtttctatcgaagatggcttaaacgaatctgactgggatggtttcgcataccaaactaaagtacttggtgacaaaatccaactggttggtgacgacctgtttgtaactaatactaagatcctaaaagaaggtatcgataaaggtattgctaactctatcctgatcaaattcaaccaaatcggttcactgacagaaacgttagctgctatcaaaatggcgaaagacgcaggttatactgctatcatctctcaccgctctggtgaaacagaagatgcaactatcgctgatttagcagtaggtactgcagcaggtcaaatcaaaacaggttctatgagccgttctgaccgtgttgctaaatataaccagctgatccgtatcgaagaagcattaggtagcaaagcacctttcaatggtctgaaagaagttaaaggccaagcataa

SEQ ID NO: 312643 - DNA, 285 bp, Proteus mirabilis
  misc_feature (258)..(267): n is a, c, g, or t
atgagtacttcaaaaaataaaatgagtgtattgcaactcactatattaactacggtgaatatgatgggttccggtattattatgctaccgaccaaactagccgaagtaggaaccatttctattttatcttggattgtcactgcagtcggctctatggctctggcctatgcatttgctaaatgcggtatgtttagccgtcgtagcggaggaatgggagggtatgccgagtatgcctttggcaaatcggggaattttatnnnnnnnnnnatggtatttccctgttaa

SEQ ID NO: 312644 - DNA, 2097 bp, Proteus mirabilis
atgatttgtcgtggtgaaaagctttcgattgccattatggagtcggtgttacaagctagaggatataacgttaccgtcattgatccggttaaaaatctccttgctcaaggtcattatctcgaatcgacagtggatattcctgaatcaactcgccgtatttccgcccttaatattccgaaagatcatatgatcttgatggcaggtttcactgccggtaatgaaaaaaatgagcttgtggttctcggtcgtaatggctcagattattcagccgccgtattagccgcgtgtttacgtgcacaatgttgtgaaatttggacggatgttgatggtgtttacacctgtgatccacgcctcgtcccagatgcacacctattaaaaggcatgtcctatcaagaggcgatggaactttcttactttggtgccaaagtccttcatccacgcactattgcacctattgctcaatttcaaatcccttgtttaattaaaaatacgggcaatccagaagcaccgggtacgttaataggtgatggtcaaaaagatgacagcacgccggtaaaagggatcactaacctgaataatatggcaatgatcaatgtatcagggccaggtatgaagggaatggtgggtatggcggctcgtgtcttttctgtgatgtcgcgtgcaggaatatcggtagtattaattactcaatcttcatctgaatacagtattagtttttgtgtaccgcaaaaagagctaattagagcgcaaaaagcactgtcagaagaattctatctagagttaaaagatggcgtacttgatccgttagatattatgaacaatgttgctatcatctcggttgtcggtgatggtatgcgcacccttaaagggatctcagcccgtttcttctctgctttaactcgaggcaatattaatattgttgctattgcccaaggctcttctgaacgctctatctctgcagttattgctaatgatgcagcgacgaatgcggtgcgtttatgtcaccaaatgctttttaacactaaccaaatcgtagaagtctttattgtcggtgtcggtggtgttggcagtgcgctaatcgagcagatccatcgtcaacaagcatggctaaaaaacaaacatatcgacctacgtgtttgtgggattgccaattcacgtgcgatgctaaccaatatgcaaggtatcgatttagataattggcaacaagcgctacaagcagctaaagagccttttagctttagtcagcttattcgcttagaaaaagagtaccacttcctcaatcctgtgattgttgattgcacttcaaacgaaatgattgcacagcaatacgccaatttcttacaaaatggctttaatgttgttacgcctaataagaaagccaatacgatgtcgatggattactatcatcaaattcgccaatcagcggaagcatcacgtcgtaaattcttatatgacactaatgttggtgcgggtttacctgttattgaaaacttacagaacttgcttaatgctggcgatgagttggtgcaatttaatggcattctttctggctcactctcttatatttttggtcagctagatgaaggaaaaagcttgtctgaagcgacactttctgcgaaagaaaaaggctttacagagccagatccaagagatgatctctcgggaatggatgttgcacgtaaactgcttattctcgctcgtgaagcgggctatcaattagagttgagtgatattgatgtagagcctgttttacctagctcatttgatagtacaggtgatgtcgagagtttcttaaaccgcttacctcaagtagatgttgagtttgatgctaaagtcgaagaagcccaaaagtcagcgaaggtattacgttatgtggggctcatcaatgaggggaaatgccaagtcaaaataatggccgttgatgctaacgatcctctctttaaagtaaaaaatggtgaaaatgcgctagccttctacactcgctactatcaaccaattcctttagttttacgtggatatggtgcaggaaatgatgtcactgctgctggggtatttgcagatgtattacgtacactatcatggaaattaggagtttaa

SEQ ID NO: 312645 - DNA, 903 bp, Proteus mirabilis
ttgggcttgccaaagacttatattacaagaaatgatcgtatttcccgcgtaaggggaactataaatgctacagattattttcagaataaatcatctggaaaatatttatgctcgtaccgagagcacagctacgatagccctgcaacttcactttttataaaagcttatgaagcagttgcacattactcattttgtcaccaaacacgaaatatctatagcgcatttctgactgccaatcaggggataaaaaggtcacagcaagaaattttgaggacttctcatttcaccaatcctttctacaatgattataacgtgctcattgacttatctaagcaagttattggccggaagggctctgattttgattcgcagcaggattcgagtgctttctttttcgatatttcgatgttgtttgaatatttcattcgtaagctcatcaagcgagatgggttacgcctgctaggtaagttcgagctatgtcaggaaatagcatctggtgcgctcagcggttatatgagaaaacttgaacctgatcttgttatagaaatcgatgagagattattcgtatttgatgtgaagtataaagcatttgattcacaatttggggtgaagcgtgaagatctttttcagctacatacttacatagggcagtatggaaatattgccgcaatcaaggggtgtggatttatttaccctatatcagaagaacgatgggcttcacttaaccttgaaaaaacacagggggtgatttcagatattattcaccagcaagggcaagagataccgttccatgtgctttttctaaaaattcctgaagatacttatattgattttaataggaaaatgaaagagcagtgtagtattttcattgatgccctttattctaaggttcttaatcagtga

SEQ ID NO: 312646 - DNA, 192 bp, Proteus mirabilis; identical to SEQ ID NO: 306753

SEQ ID NO: 312647 - DNA, 1179 bp, Proteus mirabilis
  misc_feature (1164)..(1173): n is a, c, g, or t
atgtctaatcctatttttcagcaagaagttgctcgccgtagaacttttgccattatttcccaccccgatgcgggtaaaacaaccatcactgaaaaagtgttgttattcggacaagctatccaacgtgcaggaacagtaaaagggcgtggctcaaatcagcatgctaaatcagactggatggaaatggaaaaacaacgtggtatctccattaccacttctgttatgcagtttccttacgctgattgtctagttaacttacttgataccccagggcacgaagacttctctgaagatacttatcgtactttaactgccgttgactgttgtttaatggtcattgactcttcaaaaggggtcgaagatcgtacccgtaaattaatggaagtgactcgattacgtgatacgccaattttgacctttatgaataaattggatcgtgatattcgtgatccgatggaattaatggacgaagttgaaactgagctaaaaattgcctgtagtcctgttacttggccgattggctgtggaaaactgtttaaaggggtttaccatatcttaagagatgaaacctatctttatcaaacaggccaaggtcatactatccaaaactcacgagtgatcaaagggttggataatcctgagttagatgaagcgattggtgatgatttagccgttcaattacgtgatgagctagagttggtgttaggtgcatcacatgagtttgatcatgaagctttcttagcgggtgaattgactccggttttctttggtaccgcattaggtaactttggtgttaatcacatgcttgatggtttggtgaagtgggcgccagcgccaatgcctcgtcaaactgatatgcgagaagtgacagcggctgaagagacattcacgggttttgtctttaaaattcaagctaatatggatcccaaacaccgcgaccgtgttgcttttttacgggtggtgtcaggcatgtatgataaagggatgaaactgcaccaagtacgcacgaaaaaagatgtggtgatttcagatgcattgacctttatggcaggggatcgttctcatgttgagcatgcttatcctggtgatattattggcctgcataatcgctgtctcttatacgcatctccgagcccacgagacaggcagaaatctcgtatgccnnnnnnnnnngcataa

SEQ ID NO: 312648 - DNA, 441 bp, Proteus mirabilis
atgttaaaattcaccggtattcctaacttcgctccggaattattccgccgtattcgtctgcgtgatccgctaaaacaaaaacaattgttaaaaggtctggtgcaattatctgaagaaggtgcggtacaggtgtttagacccctagctaataatgatttaattgttggcgcagttggggtgctacagtttgatgtcgtggttgcacgcttaaaaggtgagtataacgttgaagccatttatgaatcagtgaatgtatcgacggctcgttgggttgaatgtagtaacgaaaagaaactcgaagaatttaagcgtaaaaatgagcaacatctggcattagatggtggtgataacttaacttatattgcaccaacgatggttaacttaaatttaacccgtgaacgctatcctgatattgagttccatcaaacgcgtgaacactaa

SEQ ID NO: 312649 - DNA, 345 bp, Proteus mirabilis
atgaacatttcaaggagaaagctacttttaggtgttggtgctgcgggcgttttagcaggtggtgcggctttagttccaatggttcgccgtgacggcaaatttgtggaagctaaatcaagagcatcatttgttgaaggtacgcaaggggctcttcctaaagaagcagatgtagtgattattggtgccggtattcaagggatcatgaccgctattaaccttgctgaacgtggtatgagtgtcactatcttagaaaagggtcagattgccggtgagcaatcaggccgtgcatacagccaaattattagttaccaaacattgccagaaatcttcccattacaccattag

SEQ ID NO: 312650 - DNA, 471 bp, Proteus mirabilis
gtgggtgctgcaacaccggcacaagtgaatgaggccaagactgccgcaaacaatgctaacaataatgccaatgggcgggtgcctaacacgcgtaaagtaaatggtaagccactaagtgctgatattcgtttaacggcgggtgatgtgggtgctttaactcaagggcaagctgatgctagataccaaactaaaggaacaaattctaaattaaaattaatatggaataaattcgtcggcagtggaggtgttgttgacttacctgaagatattcgtggaaagtttgcgcttattgcaacaaatattaatgttgaaatttatgcattaacgtatttccccactatggataatatagaggttgaagtccatcgtggttctacggctttttgtcgattaaaaatcactaatggaggtaagcgaatcacagtagcatccatggattgtgggttatataaaatcatactattagattag

SEQ ID NO: 312651 - DNA, 1173 bp, Proteus mirabilis
atggcacaagattatcatcacggtgtgcgcgttattgaaattaacgaaggcacccgccccattcgcactatcagcaccgctattgttggcgtggtttgcaccgctgatgatgcggacgaaaaagcctttcctttaaacaagcccgtcttattgaccgatgtatcacagggtatcggtaaagcagggaaaaccggcaccttagccagtaccttaaaagccattgcagatcaggctaaacccatcactattgtagtacgtgttgcacaaggtgaagaagaggcagaaaccaccactaatattatcggtggtactaccgaagaagggctaaaaacaggattacaagcactgttagcatcacaagcccaacacggcattaaacctcgtattattggcgcgcccggtcatgacacgttagcggttgccaatgagattgcggtgatttgtcaaaagctccgcgcctttggttatgtgtctgcttacgactgtaaaaatatcagcgaagcaatcaagtaccgtgacaactttggtcagcgtgaattaatggtcatttttcctgattttacctcatgggatagcaccaccaacagcgaatcaaccgcttacgccacggcgcgggcgttaggtctgcgtgccaagttagacaatgatatcggttggcataaaaccctatcaaatatcaccgttaacggtgtgacgggcatttctaaagatatctattgggatttacaagatcccgcgactgatgccggtttactgaatgaaaaaggggtgacgacacttatccgccgtgatggttttcgtttttggggttcgcgtacctgttcggatgatccgctatttgcctttgaatcttatacccgaacggcgcaagtcctagctgacaccatggcagaagggcaaatgtgggcgattgataaaccgttaacaccgtctttggcgcgggatatcgttgaaaccatcaacgcaaaattacgttcactggtcagtcaaggctacttgttaggcggtgaatgttggtatgacccaacatcaaatagtaaagaagcactcaaagacggcaaactcacactggattatgattatacaccagtgccaccaatggaaaatctgatgttacgtcagcgtattaccgataaatacctgatggatttcggtaacaaaatcaaggggtaa

SEQ ID NO: 312652 - DNA, 516 bp, Proteus mirabilis; identical to SEQ ID NO: 311885

SEQ ID NO: 312653 - DNA, 348 bp, Proteus mirabilis; identical to SEQ ID NO: 311884

SEQ ID NO: 312654 - DNA, 393 bp, Proteus mirabilis
  misc_feature (378)..(387): n is a, c, g, or t
atgaagggaggacaatatcaactggttatcggtaatgatgttgataaagtatttaatgaactaacaaaaatgataaaaacaaataatactcctcatgataataataaagaccagaagaaacagtctatcgtaaataaagtattatcagcaattactggctctatcgctccggttatccctctgttagcgggtgccggtatggggaaagtgttacttattgtattaacgatgctaggttggttggataaaagtgaccaaacctattatatccttaactttatctttaatacggccttctattttatgccggtatttattggtttctcggcggcgaaaatatttaattgtaaccaatatttagctgcaatggtctgtttnnnnnnnnnnggttag

SEQ ID NO: 312655 - DNA, 849 bp, Proteus mirabilis
atgcatattcctgtcgctttggttaaatattcatctcaactgatccctgctttaattactgtttggatgatgtcttatatagaacgctttattgttcgtattgtgccagaaatggttaaagtatttatggtgcctttattggtgattttagtttcgacacctattgcgttgattgcggtcggtcctgtcacttcatggttcgctcaattaattgctgatggggtgatcttaatccaagagcacaccggttttattgctattccattattagtggctatttatccatggttagtatctattggtatgcataaagcacttagtcctgtcagtattatgttagtggagcaaaaaggttttgacccgattattcgtgttatggcgctatgctccaacatgtctcaggctgctgcttctttagctgtttctgtgcgtactaaaaacaaaaccttaaaacaattagctttttctgccagtattaccgccttttttggtggtataactgaacccgctatgtatggggttaacctcaaactgaaaaaaccaatgtacgcttgtatgattggtggtgctattgcaggattatttgctggtattgttaagttaaaagcgtttgtctatgtcactccggggttattaagtttaccaatgtggatatctgatacagataaccaagtagtaaatgcaataatcaccttattgattgccagtgtagccacttttattgcaacgcttattattggttttgatgatcctactgacgatccaatccgtgacgaagaagaaaataataaacaagctgcatcaaccaacaaaaaaccacaaatagcgaatagtaaattacctggctaa

SEQ ID NO: 312656 - DNA, 486 bp, Proteus mirabilis
  misc_feature (468)..(477): n is a, c, g, or t
atgaataggaaaaaaattgtttcttttaaaattaatttattagttttctctgtattatcaacgttaaatatggcgacagtagtacaagctgatccgtctgctcatattgttgtgcaacaacagcaaaaaaatagtagtgttgatattcttaatattgccgcagcgattaatggctattccagtaattcattaaccagttttgatgtttctgaagcagggttaatattaaataatagtcctgatggtgctgatactcaattatcggggcatattgacggtaatagtaatttatctagcggtgcggcaaaagagattactcttgaggttaacgctaaaaaagccattacgttaaatggtcctgttgaggtggccggaacaaaagcacgggttattttatctaatcctgctggaattatttgtagtagctgtaactttcttagtgctgaccgtgttgtgttgactactggnnnnnnnnnnacaaaatga

SEQ ID NO: 312657 - DNA, 1485 bp, Proteus mirabilis
  misc_feature (1458)..(1467): n is a, c, g, or t
gtggaaaaagggaatattactgttaaaggtaatgccacttttgataaaagtgcgcaacagattgatttaattgcccgcaatgtttctattgaatcgcctcttgatgcatctggtattaatgtgaatgtgataactggcgctaatgaagttaaagcacaagataatacggtggttgcacaaaagccaacaggcgttgctagtaaatatagtttgcagatagtcaagaatgcaggagtgagaagctcatcgctaaaatttataggtactgaagctaactcaccactgaaaaataatggtaatgttgaaactgctgggggagggatcgagcttattcatagcggtgcacttgataataataaaggtaacttcttatctgagggggatatctattttgctttcgataaaggtgttacaaatagtactggtgaaatacaaagtactaaaactatctcaatagaaaccaaagaagcgaaagttgataatatctctggtggtaatatttctgctgatggaaatgtaatcatcaatagtggtgaatttaaaaacaatgcctcctatattgcaagtaaagataaattagatattcagacaaacggtaaaccaataacgaatactgcaacggtcggtgaaggtgtcggtatttctgctactaatggtattaaaattaatagtggcttatttaataataaagagggtcaaattaattctaaaagtgtcattgatattaatactaacctaaaagatttcaataatattgatgcttatattgatgcgtcaggggatattagtattaatagtggcgcaatgaataatacccatagtcgcctacgctcagttactcgtgttgaaattgatactaatggtaaggcactgaaaaataccggcatgacggcagatactgctagcgatgattcattaggtattcttagtggtctggatggtatgacagttaatattgctggattgaataatgaccaagggattattgccaccgatggcgatatgaacttcactaacaaaggcgacattaccaataaatggggacatataaaatcaggggggtacttgacatttagtagtgataagatcaaaaacctctatggtggcttagcatctaaaaccggtgctaatgtgactttctcccagacattagataataactttggtgttttttacttagaaggcgatagcgtcaccatcagtgcgccttatataaataataataaaggtgttattaaaggagacgctatttattttaaaacagataaatttaataacacatcaggatttgtgatcactgaacagaaattagagattgatacaccagaactgacgaataacagcagtttagatttcaaaacagaaatgggcttttatctggggcaacctgatcagaaagggggattaattagtaaaggagaaatgaaattaagcggtaataaattagtgagtaataannnnnnnnnnataaaggacgtattgtaa

SEQ ID NO: 312658 - DNA, 1116 bp, Proteus mirabilis
atgaacaaagaccaaatctttgataaaacagggttaaccgttggtgtgcaaaatgccaatctggccattgaagaaggcgaaatatttgtcatcatgggattatcaggctctggtaaatctacattagtgcgccttctcaatcgtctgatagatcccactaaaggcgaagtccttattgatggtgaaaacatcaccaccatgtctgataaagatttacgacaagttcgacgtaaaaaaatcagtatggtgtttcaatcattcgctttaatgcctcatatgaatgtactcgataatacagcatttggtatggagcttgcaggcattagcaaagaagagcgctatgaaaaagccatggcagcattagagcaagttaacttaagctctcatgctcaatcttggccggatgagttatccggtgggatgcgacaacgtattgggcttgctcgtgcactggccaatgatcctgatatcttattaatggatgaggcattctccgcacttgacccattaatccgaacagaaatgcaagatgagttattgagcttacaaggtgataaacaacgcaccattgtgtttatttctcatgatctggatgaagccatgcgtattggcgatcgtatcgcgattatgcaaggtggtgtggtggtacaaatcggtacccctgatgaaattcttaataatccagccaatgattatgtacgtaccttcttccgtggcgttgatatcagtcatgtatttagcgctaaagatattgctaaacgtcgcccagaaacactactgcatattgcgccaggttttggtccccgttcagcattaaaagtactggaagatgaagatagaaactttggttatttaattgagcgaggacggaaatttgcaggtatcgtttctgtcacttctcttgaagaagcattaaaagcgaagcaacctattggatccgctattttaactgaaccttgtgcgattaatggtgatacaccattaaatgaactgatttctactgttgcgcaatctccctgtgcgatccctgttattgatgaaaaaaaccgttatatcggcttaatttcgaaaggaatgttgttacaagcactggataaggagacaccaaatgagtaa

SEQ ID NO: 312659 - DNA, 381 bp, Proteus mirabilis
atggttttatctcccggtgaatttattttgtcagggcaatctgtttttactttaattgactctgatacttggtttgcttcggcttattttaaagagacagatttaaataatataaaaattggtagctgtgtggtgatttactccatgattgataatcaacaccccattaaaggtaaagttgaaggaattagtcggggagtcatgtcgaccgatctgattaatattccaagagacttaccttatgtacctaaatcattaaattgggttcgggttgagcagcgttttcctgtcaaagtcattattactgaaccaccagaagcactcatgcgcatcggtgccactgctactgtaaatattgtacctaacgatgatgactgttaa

SEQ ID NO: 312660 - DNA, 273 bp, Proteus mirabilis
atgaaaagtaagcggagtagtatattaaaacttcaattatcaatgataatactcttatcatcaggaatggcaattggcgcttcaaataagacagtagaatttttattgacagagcaggaaagtggttcttctaatgcaatagccgaacttaatttacttgcgaagcaacaaaacccacatgcattgagtactctaggttttatttatgaacatggggttaatacacctaaggatgtgttaaaagcgatagattattatcagcaatttagctaa

SEQ ID NO: 312661 - DNA, 255 bp, Proteus mirabilis
gtgtatgcttgggatgcaaaaccgagtagtaaccctatttatgaccaaagtaaacgtattagagaaagcgcatggaatgccgacatcatgtataccgttcaagaggggagagcgaaaggtacgttatttaaactccactacactcgttatgataaccattccgatataccaagctatgaaggtggttttggtaatatcttccaagatgaaaaagacgttaaattcaatgtgatcatgccatttacgattttctaa

SEQ ID NO: 312662 - DNA, 777 bp, Proteus mirabilis
gtgtatcgttgggcactaataccacttttattattattatttttgatattgggatcacttattgcattaatttgccaactctcttatcacgaactcaccatggttattactgatgctgaatttcattttgccgtattgatgtcactgagcaccgcgttaacatcattgtgtttagccgtgctcttagctgtacctgcagcttgggtgatggcaagatcgtcatttaaaggacagcgttttattgatgcgttactcgatttacccttagtcacgcctcctttggtaataggtattggattattattattgttaggtcatcaagggcctttaacaggggttttccctcaattatctcgcgcccttttttctcccttggggattattattgctcaaacatatgtggcaagtgcaatcattatgcgtaatagccttgcggcgtttaaagccattgatcctgcttatattcaaaccgcacagaatttaggattaacaccaacaaaaacgcttattttggttgagatcccactttgttggtctgtattaatcagtggttgtattgtggctttttctcgagcattaggggagtttggggcaacattaatgttggcaggggccacacgattaaaaacagaaaccttaccaatggcaatctatttaaatatagcgagtggtgatttctcgcttgcgataggttgcgctttagtactgatagcaattgcaattactctattgtttgctttacaccgtttacagcatgataggaaattagcatgttaa

SEQ ID NO: 312663 - DNA, 324 bp, Proteus mirabilis
  misc_feature (253)..(262): n is a, c, g, or t
atgttaaccattcactcgttaactaccggtattttaacagaggtttcattacacctagagcaagggtgttgtttagggatcagtggctcatcaggtagcggcaaaacaacgttactcaatgctattgcgggttataccggctatacaggggatattgttttagctaaccaaaatatgaataaattacctgtttggcagcgcccctgtcgttatttaaatcagcgtctttatttattcccttttctcactgtannnnnnnnnngcaaaatttatggctggcacaatatgcggctaagcaaaagcgcagtaaagaaaaagagatag

SEQ ID NO: 312664 - DNA, 294 bp, Proteus mirabilis; identical to SEQ ID NO: 296567

SEQ ID NO: 312665 - DNA, 1305 bp, Proteus mirabilis
atgaaagtgatcatcttaggtggcggcgttattggtgtaacaagtgcgtggtacttagtacaacaagggcatgaagtcattgttgtcgataggcaaagtagtgcggcagaagagacgagtgccggtaatgcagggcaaatatctccgggttatgcaacaccttggggtgccccgggtattccattaaaagcagtaaaatggatgtttcaaaaacatgcacctttagcgatccgacctgatggctcactgttccaattacgctggatgtggcaaatgctacgtaattgtgatgcttctcattatgcgatgaataagagtcgtatggtgcgtattgctgagtatagtcgtgattgtatccgtcaattacgccaagataccggtattgaatacgaaggacgccaagggggaacgttacagctatttcgtgatcaaaaacaatttgataatgccgctaatgatattgctgtattaaagcaagaaggtgtggcttatgaactgctaacagcagagcaactaaaatcagcagaacccgctttagagcatgtgagtcataaacttaccggaggattacgtcttcctaatgatgaaacgggtgattgccaaatctttactaagaagctggctaaaatggctgaagaggccggggttaccttcttatttaataaagaaataaaacacctactttttgatggtgataaagtcaccggtgtgcaatgccatgatggtttattgaccgcagatcactatgttgtcgccatgggatcgtactcgactgaatttttgaaaaataaaatcacaattccggtttatcctttaaaaggctattcattaaccatgcctattattgatgcaagcagagcaccaacatccactattttagatgaaacatataagattgcggtgactcgctttgataatcgcattcgtgtgggcggtatggcggaagtggtaggttttaatttgaatattttaaaatcacgttgtgaaacgctcaaaatggttgttcaagatctctatgagggtggtggtgatatcagtaaagcgacattctggacaggcttaaggccaatgacgccagatggtacaccgatagttgggccaaccgcatatcgtaatttatccctaaatacggggcatggtacattaggatggacgatggcatgtggctcaggacagctgttagctgatttaatatcaggtaataaaacggcaattgctgcagatgatctctccgtgttccgttatatcgatggatttaatactaaattgctccgtccagggcaaaaacttgacgctgtttattaa

SEQ ID NO: 312666 - DNA, 372 bp, Proteus mirabilis
  misc_feature (343)..(352): n is a, c, g, or t
ttgcgttatatcgttgaagtggtgaataacgatttaaacgtctcaacgacagcagagcgtttatatacctctcagccggggatcagtaaacaaattcgtatgctagaagatgagttgggtatacaaatattctctcgcagtggtaagcacttaacacatgtgacgccagcgggggaagaaattgtcagattatctcgtgagatattatccaaaacagaagctatccgctcggctgcaggggaacacacttatcctgatcgcggttcgctttctattgccaccactcatacacaagcgcgttatgttttacccccagtgattaaaggttttatagaacgttatnnnnnnnnnncgaagtgtcattacatatga

SEQ ID NO: 312667 - DNA, 642 bp, Proteus mirabilis
  misc_feature (630)..(639): n is a, c, g, or t
atgacaaaaactatatcagtttttaataacaaaggtggtgttggtaaaactactataatttggaatctcgctgtctcgctggcagataaaggaaaaaatgttttattaatcgacttcgatccacaatgtaatctttcaattgcctgtattggcgacgaagagttctctgagttattagtgccttctgatgaatttccttttggaaaaacggtgaaagcatttgcgttaccttatatacaacaaaatactataggtgaagtatatacaactgagccaaagactcaaacagatgcaggtactttgcatattgtccctggtgatttctggttgaatacattttctgatattttaaacgttggtactgatgttataagtggagcaggtttgtaccgttttattttaccagcattgataactgaaaaagcatcagaaaaaaatgaaattgattatgattatgtcttaatagatttaccaccatcattcaatactcttgtcagatcatcattgtattgttcggattatttcttagtaccatgtacacctgatttattctcttcatactgtgtagggttgattggtgagatgttgccatcatttatacgtgattgggaacagggtaaggaaaggtannnnnnnnnntga

SEQ ID NO: 312668 - DNA, 540 bp, Proteus mirabilis
  misc_feature (494)..(503): n is a, c, g, or t
atgtcagctattacaacgacattaatggcttttacacaacctggcgatgttattttacattctcaaccactttatggtggaacagaaacattaatagccaaaacattcgctaagttcggtattcaagcaacaccatttacagatggtttaaatttagcacatatccaatcgcaagctgaaatggctagccaaaaagggagagttgcggtgatatttgccgaaactcccgccaatccaactaattcactggttgatattcaagcgttaaaaatcgttgcggataaattagaaacaagccaaggctatcgacctattattatttgcgataacaccctattaggacctgtttatcaacatcctatagagcaaggcgctgatatttcactctattcattaacaaaatatgtgggtggacattctgatttagtcgccggtgctgcaatgggatcacgcgagcttattaatcaagttcgcctattaagaggtgcaatagnnnnnnnnnngggacacaacttgatgcgcattcttgctggatgttag

SEQ ID NO: 312669 - DNA, 201 bp, Proteus mirabilis
atgaaaatatttaaattagcggtgagtttgggaggaaccgagtcattggcatgtcatcctggctctaccacacattcaggtgttcctatggaattacgccacaatataggtattcaagaaacaaccattcgtttatctattggtattgaaaatccttatgatcttattgctgacttatctcaagcattagatcatgtttaa

SEQ ID NO: 312670 - DNA, 414 bp, Proteus mirabilis
atgaggttaatccccctatccacggcacagcaagtgggaaaatggtcggctaattatatcgttgagaaaatcaacgcatttgcgccaagcgccgatcgtccttttgttcttggtttacctactggtggtacgccattagcaacgtacaaagcgctaattgaactacatcgtgcaggtaaagtaagtttccagcatgttgtcaccttcaatatggacgaatatgttggcattccagcagatcacccacaaagttatcgtacttttatgtatgagaacttttttaatcatattgatattaaagatgaaaatatcaattttatggcaaaatcaatctgtttatgggaggtgttggtaatgatggtcatatcgcttttaatgaacccgcctcatcactcgcttctcgtacacggatga

SEQ ID NO: 312671 - DNA, 1125 bp, Proteus mirabilis
atgaattcagaaagcccaattaagcatgtccgctgggcaatcatgtgttcggtaatcggatttgcattaacaggctgtgccgacacgccttatcgtcctgcaccgataacctctgtcaatgatagttcgtcaaatcgtaccgtttctacatcacctgttacaactaacagtaatgcaggagtggcaacacctattgaaagaggttcaaccccgttacaaacaacgcctcctccttctattagagtgaataacacaaccgcgcagcctcaaagccagcctcgtacgcaaaatgttacccctcaaaatgtcaatacggatggtagcggacgcattgtgtataaccgtaattatgacaatatccctaaagggaattacagcggtaacacttatacggttaaacgtggcgatacaatgttttatattgcgtggatcacggatagtgatgtaaaagatttggcctcaatgaacaatattccagagccatatagcttaaatgttggacaagtacttaagattggtaaccgtcaagttaataccggtaccaataccaatgtaaatacttcagtaattaataaaccaagtagtgaaggcgttcagacggcacaaactaagccgtcaaataataatagctcaatggggccgttgatcacgaaaccaacaacaacgacaccgccaaagacaacgacttcgacaccaacaacttcggcaacaaccagtaataacacaacggcaacctctaaacctgcagccgcaacaggtaaatgggtatggccagcacaaggtaaaattattgagagctactcaaatgcacctggtggtaataaaggtattgatattagtggtacacgaggctcacccattgtggcaacagccgcaggtaaagtggtttatgcagggagcgcattacgaggttatggtaatttagttatcattaaacataatgatgaatatctcagtgcttatgctcataacgatacaatcttggtacgtgaacagcaaaatgtaaatgcaggacagcaaattgcgaccatgggaagtactggtactagttctgttcgattacactttgagatccgttataaagaaaaatcacttaacccaatgagctatttacctaaaagataa

SEQ ID NO: 312672 - DNA, 615 bp, Proteus mirabilis
gtgacgatacatcaaaatattgtctggcatcctcatcaaatagggttaaaagagcgtgaagcacaacaggtacacaaaggatgtgtactttggtttactgggttatctggctcaggtaaatcaacactggctgatgcgctagagcaaaccttatatcagtactcgacactccatgcgcctatccgcacctatttattagatggtgataatctacgccatggtttatgccatgatcttgggtttagtgaacaagataggcatgaaaatattcgccgtgtaggggaagtggctaaattaatggttgatgccggattaattgtcttaacagcatttatttctccttatcagcaagatagacaacaagtaagagaaaggtttgctcaagggcgatttattgagatctttgttgatacacctttagccctttgtgaagcacgtgatcctaaaggcctctatcaaaaagcacgacgaggcgagatcaaacagttttccggcattgattcaccttatgaacgacccattgcgccagaaattcatttagacggctcactcgcgattaatgagcttacacaacaaattctcgcttatttacagcaacaacaaatttaccgctaa

SEQ ID NO: 312673 - DNA, 462 bp, Proteus mirabilis
atgaccccgataaaagaagttgaaagtctcagacaaacaagaaatacgatagagatgaccacactcaataaccaagcgcttaaattactcgataagacaccggctattgagttaaatttaacctggtcattagatagccaagcggaaaaatttggattatggctaggaaaaggtttagaggtatttgtcgataatcaatcaaatcgctttgtgatccgtcgccattatccacaatataatatcagtggatcacgtagcacaccgttgccagtaggaagcgaaattaacttacgtatatttattgatcgctcatcaatagaggtttttatcaatcacggagagctgacctttagtagccgttattatgcagatgaaaatgatcgcgatttatcgctatttgccacagatggcagtgccacattaatcgccggtgaatattggacactatcaacgataagttga

SEQ ID NO: 312674 - DNA, 309 bp, Proteus mirabilis
  misc_feature (295)..(304): n is a, c, g, or t
atgaacaataatcgcgcactactatgtctggaaaaaattggctttcaactcgatagcaaaattattctagataatgtgactttctcactacaaccttctgaatttaaattgattacaggcccttctggctgtggaaaaagtacgttattaaaaatcattgcctctttattatcaccgacaagtggcacacttttctttgacggaaaagactacttaaccctttctcctgaacaataccgacaacaagtttcgtattgtactcaaaccccgatgttatttggtgaaacggtttatnnnnnnnnnncttaa

SEQ ID NO: 312675 - DNA, 234 bp, Proteus mirabilis
gtgtcagataatgggccgggtatcagtgctgaacatttaacgcgcttaaccgaacgtttttatcgtgtagataaagcgcgctcccgccacaccggtggtacagggcttggattggcgattgtcaaaaagtccttacaacatcatcactcaatactgaatattgaaagtaaagtcggtgtaggaagcactttttcttttatcatgccgcaaacattgttaacagaaaaaaaataa

SEQ ID NO: 312676 - DNA, 294 bp, Proteus mirabilis
  misc_feature (237)..(246): n is a, c, g, or t
atgcgctttataaagctattacctgctattttagctgttattttagcgggttgtgtgacacaagcacctgaagttaaacaaccattaaaaccgcaagcaaaattagttgaaggcgtatcttgtattttacctgatgtacctactgccaattatgactatattgcgacaaatgatcgttatggtcaaaatagtaaagcatcaacagattactttaaattagccattaattactcaccnnnnnnnnnnactcaccggctttttgtgattataaaaaaaataatattaagcgtttaa

SEQ ID NO: 312677 - DNA, 1611 bp, Proteus mirabilis
gtgaccttaccttttgttaaaaaaagcatactcgcggggatcattgccacgtcatgtttaagccttccaatatcagcccatactggtggcacacctgaaaaaccgaatgtactgttaatcgtaatggatgatttaggcacaggacaacttgattttgtactggataccttagatgtagatgcattagctcagcgaccaacacctcctcgttataaaggtgatatcaataaaatgatagaagccgcacgtattgcgatgcctaatgtcagtgatatggcagaaaacggtgcaaaaatgactaatgcatttgtagctcatcccgtttgtggcccttctcgtgcaggtatctttacaggacgctcgcccgccagttttggtacttacagcaatgatgatgccattttaggtataccccaagatatcaaattgttaccttcacttttccaagaaaatggctatgccactgccagcattggtaaatggcataatgcaaaagttatccgtaaaccgaaaataaatgaaaataaacaaacccgtgattatcacgacaatatgatctcaacccctgaagcgggttatgctcctcatgagcggggctttgattacgcctttagttattatgcatcaggtgttgccttatggaattcgcctgcattttggcgtaatggtgtcaatgttcctgctccgggttacaccacccatctattaacggatgaaacactaaaatttattgatgaacataaagataaacctttttttatcaatctttcttatagcgttccacacataccgttagagcaagcatctcctgctaagtatatggataaatttgatacagggaatgtggaggcagataaatattttgccgccttaaatgcagcagatgaaggtattggacaaatcattgcgaaattaaaagaaaatggtgagctagaaaatacattaatttttttcttatctgataatggtgcagttaatgaatcccccatgcccatgaatgccatggatagaggctttaagggccaaatgtttaatggtggagttagagtaccttttattgcttatcaacccggaactattcccgcgggaacaaaaagcgatgcgatgatctccgcacttgatattttgccaaccgcgttacaagtcgctgatattcaaattcctgatagcctgcaagtagaaggtaaaaacattatgccattgcttaaaggtgaaacaacgcgttcgcctcatgcttatctgtattgggctggccccggcactaaacattatagtgaagaaaaccaagagttttggcatggttatcaccaatggatcacctatcaacgtcaaacgcctccagtaaaccctaacttagagaaactgtctaaaggtgcttgggcagtgcgtgatggtgaatgggcgctctatttttatgatgatggtaaaaatcaaccacagctttttaacgataacaccgatcctggcgaatcaatcgatttggcaaaacaaaatccacaaaaagtggctgaactaaaaaatgcgtattaccagtggatcaaagataaacctaaacctgttatttgggggcaagatcactatcaaatactagtagattcagccaaaccttaa

SEQ ID NO: 312678 - DNA, 1968 bp, Proteus mirabilis
gtgataaaaaaaatattagatattctccctatttttgggaaaaaagacgtcgatattactgaacaatatcttcaaggctctcttgtcctactggctatatttgatgaaagtttacctaagcgtgcattagattatgtacttacaggtacaaaccctgaaattctatttgaattaaataaactagatgcagcgaaagccgccgtttattttcatcgtgcaggaacattagagtggtggtatgccagtaatgttgatacaggaaagtacggtaaggttatcacccaaggccttaatgcccgccataaactctactcaaaggttggtgaaagtttttccttagagcaagtggcccgttttgccaaagtcatcgctgccgcatgtcaagatatcaatattaaagtaacaacaacgcaagtccccacttgggttatctacctgttagttgatgcgttttataccacttacgataatgcacgtaaccttaatttagaacatcgtaaacattggagtatggagtttatcgccaatatggtcgaagcagaggccaatattggcggtgaaaacgcgttatttgcaatttttgatagaaaagatgtctctgaatattatgccgctaatcttaagcgtatttatgaactgtgtgatttaaaagactatctactttcacatcaagaatttgttagaaaagaattagttgaaaaactttcagcgaatggcttagtcgagctaataaattatctaaataaaaatacgatattacgcgatacttttgcagatattattgttttacttgccactagcagtttaagaaccgtcaaaaaaacggctgaacctattttaaataccttacctgctgaaatcgtaaaagaaaatttaacccatgttttaatgaatggtactcccaaacaacgtacacaagccgctgatttattcgcgcgccaaggtgaaaaccgtgatgtgctggcagaagcattaaaacatgaaacctcaaaagcagttatcaagagcattgaaagtgcgctacaacgtttttgtgttgctgataatgcaaataccgttgaagccattaaagcgcctgattttactcccttagaagacacaccattacccgatagtgcccgcgatattctggtgaataacttcaatgaaatgttagtaaaagcaaaagaaaatgctgaacgtgaaattgaagaaaataaaacgtctaaacactcttataattgggcacaacgccattataaagatctctctaaaattgatgaaaaacagtgtcgagcattagtggataaactcaatagcggacaaggcactattcaagtcaatgagatccaaataattaaacacaaaaaccgtattcctaatttacctgaatacacctttttccatgccgtgcgcgtgatcaccaataaccgccaacatgcggatcacttttcctctcactattttaatagtgatattcctgaacgtttattgagtgatattgaattacgacacgttgaaaatgtattagaacgatgtcatttcaaacgtgcaacgcgtatcacagcggcgctgtgcttagaatcttatcaagatggcttacgtcgtttccgtaaaccagaacaagtttggcctttcttctctcaacatactgattatattgcagaagcgctaaacttaatgccaaatcaaagtgaacaccgctatcgccaatttgaaacttcacaaggtattgaagtattaagccgttttccaaccattcctgcacaattcgttccgcgtatcatggaattggctctaggtgaaaataaaacacaccgagtttcagctcagaaattattagaaaccttaccgaatattcacttaagtgcacaagaaggcttaacttcaagtaaacaagaaattcgagtcaccgcgattgaatggttagcacgtttaaataaccctgactcattacctgcccttaatgccaggcgatccctgcattaa

SEQ ID NO: 312679 - DNA, 630 bp, Proteus mirabilis
  misc_feature (544)..(553): n is a, c, g, or t
gtgaaacagaacactactttggtacgcaaaggtgacagtacattagtacctgtcgcgggtttaacggtatttgctatcgcatcaggctatttaatgagtttaattccactatctatggatagttttggtattgatactttttatgctagctggttagcaagcatttactttattggattacttataggttcagtgatgatcgaacctattattgcaaaaatagggcataggctctcttttgtgctgtttttattgttgttagcattcaccgtgagtattttgccactgttaccttatttatcggtatggctagtatctcgctttttcggtggtatggcggttgcgggtatctttgttgtagtcgaatcatggttattaattggtgataatcctaaagagcgagctaaacgcttgggcttttatatgacatcactttatggtggcacaacattaggtcagcttgctattggtgccattggtacgcaaggggcgattccttttatcgcggtattggcattgctattaattgcagtgttacctcctnnnnnnnnnntcctttgttttttaaacaaggacaaccccaatgccacgagcataaaagtttgtcacttaaacagattagccggctga

SEQ ID NO: 312680 - DNA, 1428 bp, Proteus mirabilis
atgttatcactttcaagggttagtagtgccagtggtgcatccagttactatgagcaagaagataattattattttcttggtgaagccacaacagcatggtttggcaaaggtgctgaaagtttagggcttagtggtgctgttaatcgagaggattttaagcatgtattagagggtaaattacccaatggtgaaagtttagagcatatggttaatggtgaaaacaaacatagaccaggctatgacttaactttttctgccccaaagagtgtttccattcttgcattagttgttggtgataaagcagtattagacgcgcataacaaggctgtaaaatttgctttaactgaaatagaaaaatcagcgtcaacacgtataatgaaagatggtgtggtcagtattgagcaaacgaataacatcaccgctgcgttgtttatgcatgatacaaatcgaaatttagaacctgctttgcatactcatgctattttaagcaatattacagagactaaggatagtaactggaaaacattgtcaacggacaaatcattagaatctaatgcatttattgaaaccatttggaaaaatcccattgcatttggatctttgtatcgtcaacatctaaaagctgatttagagagtcttggctataatttaattgaagctggtaaatatggacaatttgaaatagaaggtgtaccaacggaaatgttttcatctcgaagaaaagagattgaaaaggctgttggtaaagatgctacagcaaaacaaaaaagtattgctgctaaagacacacgaaaaaagaaagatttttccaatatcgacgaagttaggaaaagttggaaaaaacagttatcacaaacaggctttgatcatgaaaaaatcaaaaatcatgaaaaaatcatcaatacaaaagacaatgatgttgatattaaagctgttgttaagcaggttattaaaaatttagagaaaaataatgctaagttcacgcacgataaacttttatcacaagtgattaattctattggaatagaacgttttgaaagtattaacagcctaagagatatcattaaagaagaaataaaagaaggttatttagtccctcttaaaagcaatggcgatctctttacaacattaggtcatttaaaaagtgagactaatgttgtaaagctagttcatcaactctcaggtgaaaaaataaaattatcatcaaaagatagttcatctttagctaactatatggtcagtaatgatagtcaatttaagtctatatcaattataggtaataatgaattcttgattcaaacattaggctcaatttctcaactggcaaaagaaaatgagaaaaatagtgttgtgattgttcctgataataagacaaaacgattcatttcctgtctcttatacacatctccgagcccacgagactcctga

SEQ ID NO: 312681 - DNA, 207 bp, Proteus mirabilis
ttggcaccgagttatcatcagctttatattattagtgcattaggttcacgtggtttatgctctgcacctttatctgctgagatcttagcaagccaaatctttgatgagccatttcctgtagaagatagtgtgttaaatgccttacatccaaatcgtttctgggtaagaccattactacgcggaaaagctattgaattaaaatcatag

SEQ ID NO: 312682 - DNA, 891 bp, Proteus mirabilis
gtggcaatccattcaagagctgggcaacatactcgtcaaagcgatctgattaatgtagcgcaattaaccgcacaatattattcactaaaaccacaagcaaatcagaatgctcatcgtgtgaaatttggtacatcgggtcaccgaggcagtgccaaacgtcatagctttaatgaagcacatattctagcaattgctcaagctattgctgaagtccgagctaataatggtgtaacggggccttgctatgtaggtaaagatacccatgcattatctgagcctgcttttatttcggttttagaagtgcttgctgcaaataaagttaacgtgattattcaagagaataatggttataccccaacgcctagcgtttccttctctattttaacttacaatcaagggcaccaagacattgctgatggtatcgtcattacaccatcacataatcctccagaagatggggggataaaatacaatccatcaaatggtgggcctgctgatactgatttaacctctgtgattgaaaaacgcgccaatgaattattggaaaataatttatcgggggttaaacgtctttcttatgatgatgcattagcgagtggttatattcacgagcaagatttaattatgccttatgttaaagcgttaggtgacgttgttgatatgaaggcaattaaaaaagcgggtttgaaattaggtgtcgatccactgggtggttcaggaattgaatactggaaacgcataggtgaatattacgaacttgatcttgagttggtaaacgatcaggtggatcaaactttccgctttatgacattagatcatgatggtgtgatccgtatggattgctcatcacaatggaaggtttattgcaactgcgtgataaatttgacttag

SEQ ID NO: 312683 - DNA, 294 bp, Proteus mirabilis; identical to SEQ ID NO: 295186

SEQ ID NO: 312684 - DNA, 282 bp, Proteus mirabilis
ttgaatattgaaatgattcagaactttcaaattaaaccatctattcttgatggaaatacgcttaagtttatgctttataccatagtgttttttctgttactgacacaagggacgggtgtacggctcatgtttcctataaatgaaaatgttgcaacatactatgttgaaaaacatggttttcaggatttaactggtgatggttcaaaagaaatactttaccgctcagcagaagatttattaaattggtttgagcaaaataaccgctcagttgatagtgagtga

SEQ ID NO: 312685 - DNA, 174 bp, Proteus mirabilis
atggcatatttattaaatgaatcagacttagcatggtgtattgcaagtactagaaattttccgccagagaggcaacttccttgggatcacgcaggacaaacatttcaaaatgataatggatttagcttttgttttaagtttttagatatgcaaaataggcctgctggagcctga

SEQ ID NO: 312686 - DNA, 558 bp, Proteus mirabilis
atggaattggctactcctcgattacgtttacgagaatggcgtgaaagtgataaagcgccattttttttacatattaatgcctcagcatcggtgatgcgttatttcccttcaccacttacccgcgcagaaagcgatgcaatggttgatacattgcgtgataaatttattcagcaaaatggttggggactttgggccgttgaattaaaagagactcaagagcttattggctttgttggattaaatattcctaatgcccctttgccttttaatccgtgtgttgaaataggttggcgtattgcacaatctcattggcgtaaagggtacacttatgaggcggccttaacagtattaaaatatgcttttgaacagttgaaactggaagaagtggtggcatttaccgccgtgaccaatttaccctcagaaggggtgatgaaaaaactcggtatgaagaagtctgaatattttatgcatccatctctagataaaacacaccctttagcacaacatgtattataccgattaaaaaaagcagactttattttcccgataaacgtttag

SEQ ID NO: 312687 - DNA, 939 bp, Proteus mirabilis
ttgtggatctgtacaatagcaaattttggtggtgcgcggatcactggacaaataagcagcatcactgtctggggggtgatcatccctgttgtgggtatttcaattattggctggtggtggttcaatcctgaacaatacattaactcttggaatccacataattttccattctttgaagccgtaggctcttctattgccatgaccttatgggcatttttaggtatggaatcagcttgtgccaatagtgaagcagttgaaaatcctgaaaagaatgttcctattgctgtattaggtggcacattaggtgcagccgttatttatatcgtatcaacaaatgttatcgcaggtattgtgccaaatatggatctggcaaactctaccgcgccatttggcttagccttctcccaaatgtttaccccaggtgttgggaaaatcattatggcgctaatgattatgtcttgttgtggatctttacttggctggcagttcaccatcgcacaagtatttaaggcctcatcggattctggttattttccaaaaatattttctgcagttagcaaagctgatgccccggtaaaaggaatgttagttattgttgttattcaatctgcactgtcactgatgaccatcagcccatcattaaataaacagtttaatgtactcgtcaatctagcagttgtgactaatattattccttacatcctttctatggcggcaatgattattttacaaaaagtcgccaaagtggaacctcataaagcgagaaccagtaatatcatcgcatttattggagctatttatagtttctatgctctgtattcatctggtgaagacgctgtaatgtggggggcattagccacattcttgggatggacactatatggttttgtctctccacgatttgaaatgaaacaaaaccaagacctaatgacaaaataa

SEQ ID NO: 312688 - DNA, 402 bp, Proteus mirabilis
atgatcggcttattagttgatagcgcgataggtgccaatcctcatttaagtttaattgataatatgctggcatttctgacattccaatcactgcctattgcttcattgattattgttgccatttcaattgtgttgctgattattgttcactttaaagggcataaaatcatgttgacgggcatgaaagcgcgactaattaatcctgaagagccattaaatgcccaagagcgacaattattaaatattgtggaagagcttagtttaagtgcgactttgggctatatccctaagctttatattttagatacaccagaagccaatgcctttgctgccggctggtctgaaaaaaatgcctttattggtgtcactcgtgggttgttaaatagccgtattagcccatga

SEQ ID NO: 312689 - DNA, 132 bp, Proteus mirabilis
atgaggcgtagtaattttgggattgaaccacctaattcactactttgtgcagaggctgttgcaaaattcactctatcagcaatgtcatttgaacatacagggcaagtatttagcataaagaatgatttatag

SEQ ID NO: 312690 - DNA, 132 bp, Proteus mirabilis; identical to SEQ ID NO: 312689

SEQ ID NO: 312691 - DNA, 816 bp, Proteus mirabilis; identical to SEQ ID NO: 195523

SEQ ID NO: 312692 - DNA, 600 bp, Proteus mirabilis
atgaatcagggttcaccgacacaaattgcagaagatgtttgccgtggtaaaagtgattttgctatagcgacagaatcactacatctgtataacgatttagtgatgttaccttgttatcgttggaatcgtattgtggtggtaactaaagatcacccattggcgcaaaagcgtgaagttaccttacaagagcttgcaacttacgatatcgttacttatacccatggttttactgggcgttctgatcttgacgaagcctttggtaaagtgggtttaaagcctaaaattgtttttactgcaacggatgcggatgtaataaaaacttatgtcaggctacacttaggtattggtgtgattgcgagtatggcatttgatccgatgcttgatagcgatttagtcgctattgatatgcgtgataaatttagttatagcaccacaaaaattgcatttcgacgtagtggttttttacgcggttatatgtatgactttatgtggcgttttgccccacatctaacacgtaatttggtggaacaagcgacagctttacgcaccaatgaagaaattgaagagttatttaaagatatcgagttacctttagtttaa

SEQ ID NO: 312693 - DNA, 360 bp, Proteus mirabilis
  misc_feature (258)..(267): n is a, c, g, or t
atgaaattacaacagttgcgttatatcgttgaagtggtgaataacgatttaaacgtctcaacgacagcagagcgtttatatacctctcagccggggatcagtaaacaaattcgtatgctagaagatgagttgggtatacaaatattctctcgcagtggtaagcacttaacacatgtgacgccagcgggggaagaaattgtcagattatctcgtgagatattatccaaaacagaagctatccgctcggctgcaggggannnnnnnnnnaacacacttatcctgatcgcggttcgctttctattgccaccactcatacacaagcgcgttatgttttacccccagcgattaaaggttttatag

SEQ ID NO: 312694 - DNA, 1014 bp, Proteus mirabilis
atgattgatagtaaagggaattgcttattacgatttaatacagaaatagcagagaagacctttaataccttatgtcctatcgaaggtcggccacctttgtttagtgataggctgcctattacaacactatttaagtcaggtatacgtgctattgatggattattaagttgtggattggggcaacgaatggggatttttgctagtgcaggaacgggtaaaacgatgttaatgaatatgattatccgttttgcacaggccgatgtttttgttattggcttgattggtgaacgaggaagagaagttacagagtttattgaagaattaaagcaacataagcgatgtgaaaatacggttttaatttgctcaacttcagaacaatcagcggtagaaaggtgtaatgcggctttagtggcaacaacggttgccgaatattttcgtcaacaaggaaaaaatgccgttttatttattgattctatgactcgttattgtcgagcgttaagggatatcgcattaacagcgggtgagttgcccgtacgtaaaggatatccagcatctgtatttgataaacttcccgctattttagagcgtccaggggtaacaaaaacaggctccattacggcattttatactgttttattagagagtgatgatgagccagatgcgatcggtgaagaaattcgttctattttagatggacatatttatttatctcgaaaaatagcagcatcagggcactatcctgctattgatgtattaggtagtgtgagtcgggtttttcaacaagtcactgatagtaaacaacaaaaatctgctttaaaaataagacaaatattgatgcgattacaagatgttaagttattgcaagagttaggagaatatcatgaaggagataacgaattaaatgatatcgcggtaagaaaacaagccaagatagaaagctttcttactcaatcctttaaagaaaaagccgattttcaacaaacattagaacaaatgtatgagattaccgcttaa

SEQ ID NO: 312695 - DNA, 375 bp, Proteus mirabilis
atgcctaaacaagtcggtatcgatcttgttcagatgcacttaaaacgtggtgatactgtttatttcattaccggtcgtacacagactaaaacagagactgtgactaaatatgttcaagaaggtttaaatattcctgcagataaaatgcaacctgttatttttgccggtgaccaacctggcgcaaataacaaagtaagctggatgcgcgatcacaaactgaaaatttactacggtgatgcagatgctgatatcgcagcagcagatgagctaaatatccgtgggatccgtatcttacgtgctgctaactcttcttaccagccgttacctaaagcgggacaatttggtgaagaagtggttatcaattcagagtactaa

SEQ ID NO: 312696 - DNA, 222 bp, Proteus mirabilis; identical to SEQ ID NO: 295791

SEQ ID NO: 312697 - DNA, 336 bp, Proteus mirabilis
atgttcgcgcttttaatagtgacaagacagatcacagctattcataatcctattcacttatctattcataatcctattcacttatctattcataatcctattcacttatctattcataatcctattcacttatctattcataatcctattcacttatctattcataatcctattcacttatctattcataatcctattcacttatctattcataatcctattcacttatctattcataatcctattcacttatctattcataatcctattcacttatctattcataatcctattcacttatctattcataatcctattcacttatctattcattaa

SEQ ID NO: 312698 - DNA, 219 bp, Proteus mirabilis
  misc_feature (195)..(204): n is a, c, g, or t
atgataaatattcatacattgggtcctgcaggaacaaactgtgagaaagccgcttattattggctaaataaaaataatcaacaaggaaatattattcttcaccctacattagaaaccgcagtaaaagaaatggaggtaagccaaaatagtattctattaggttgtattgtttatccttttttacacaatattgtnnnnnnnnnncaatattgtttttaa

SEQ ID NO: 312699 - DNA, 435 bp, Proteus mirabilis
  misc_feature (14)..(23): n is a, c, g, or t
atgaatatgctcannnnnnnnnntattttgaaattatctgaagatgaactgacttggatgactcaggaaattacgttagaaaatgcattaaaaaaattagctgattatcctgctcgtttaaaagtgatcacccaaggctctaaaggatgtttagtgttgacgcctacaacacaagttgccttgagtgcctttaccgtcaattgtgttgataccacaggggcaggtgatgcctttatgtcaggattattagccgcagttgcagaatatggttttgctgatgatgaacaatatttattaaaaattattacgcaagccgcggcctgtggcgcattagcaaccactaaaaagggcgctattgctgcagcaccgagccgaaaagtattgcgtgaatttgtcagtaaacaaccgccgttacatgtacgagatattttttaa

SEQ ID NO: 312700 - DNA, 1347 bp, Proteus mirabilis
atggcaagaaggggcgtatttgcttgggtatctaatacgctaggggagcgctggggatttgcggcgatctcttttggttatttacaaatagcgattggttttattccaatgctttatttcgtattaggagcattatcttatattcttgattggcctgagttaaataccgatccgctcaccaaaacgattgccgcattagtgattttatggggattagctttaactcaatttggcggaactaaatacacggctactattgctaaattaggtttcttcgcggggatattattaccagcaatcattttagtgcttttagctattagttatctggtcagtggtgcgcctttagcaatagaaatcagcagtaaaacctttttccctgattttactcagattggtactttagtggtttttgtggcctttattttaagctatatgggcgtggaagcctcagccactcacgtcaacgaaatgaaaaatccgggccgtgattatccgcttgccatgtttttattaatgattgtggcaatatgcttaagctctattggcggtttatctgttgctgcagtgatccctcataacgaaatcaacttatctgcggggggggttgaaacctttagtgttttagtcagccattttagtagcggattagtttgggcggttaaaattattgctgcactattattgcttggcgtcttggctgaaattgcgtcgtggatcgttgggccttcacggggaatgtttgtggctgcacaacaaggtattcttccgccaacactggctaaagtaaataaaaatggtgtaccggtagctttagtgatcactcagctaattattactactattgctatagtggtgctgactaacaccggtggtgggggcaatatgtcatttcttattgctttagcgctgacggtggtgatttatctatgtagctactttatgctgtttattggctatatgcatttggtttgcaagcaagctgataaaaaacgtgcatttaatattcccggtggtaaaggtgttaaattattagtggccgttgtcggtctgattgtgtctattttagcttttgttgtttcattcttcccacctagctctttacccggtggcagcagtgatacaacgtatgtttcattgctagtggtgagttttattattatttttgctttaccttttattatttatgcgtgctctcgcaaaggtaataaagccaatgtatcgatgatccatattaagagtcataatgcaccgaaaggacacttttttatccatcctcgtgctcgttcaacgcattatttagtgccaatagataaaacagatcatgatagtcagcaacagaaataa

SEQ ID NO: 312701 - DNA, 195 bp, Proteus mirabilis; identical to SEQ ID NO: 14548

SEQ ID NO: 312702 - DNA, 168 bp, Proteus mirabilis
gtgaaaccagatagtgatcaactaggtatgacagcatcaggtatgattgttattaacccaccttggaaattggcatcacaaatggcgtctatcttgccttggctacataaaaccttggttcctgaaggtactggacacacattagttgaatgggttgtaccagaataa

SEQ ID NO: 312703 - DNA, 624 bp, Proteus mirabilis; identical to SEQ ID NO: 297939

SEQ ID NO: 312704 - DNA, 837 bp, Proteus mirabilis
atgatcgatgacccattaccagagaactggcaagacctccagacaggggttcaacgtatattccgtaatgttggcttacttgcagaagttgaggtcgatttagaaaccccacgtggctcggtgaatgtggatgttctcgcgacagatgttaggagcgtggacaaaatcagatatatcgtagaatgcaaaaactggggtagttctataccacagacagtggtccattcgttcactacggtaatgcatgaaactggggctaacattggatttattatttcaaagcatgggcttcagcgaggtgctaaacagtacactcaaaacaccaatattattgggatgacatacctggagttccaacaaaggtattttgaggcttggtggtataggtacttttgtccacgtatcggtgatgctgcagacgaaccacttcagtacgtcgaaccaatcaactctaagcgagatcgcgaatacgccaagcttagccttcaagcacaagagaagttcgatcagttaaggcgagagaaaggtgcatcagtcatggttctttctatgttcaattacaagtttatgtcaaaagcattaaacactggcaacttgctagaagtcccaaagaatttggatgattttaagaccagagttctctcccaaatttgtcctcacattgaactgtattgcgatacgtacagagagctactaaagatcatattagaatacttatcagacaccaaagcagagtttgatacaatatttggtggagccatctttgaaccgccaattagtataacgggggttactgctgatggtccccctttggaagatggcagctatcatcattag

SEQ ID NO: 312705 - DNA, 1452 bp, Proteus mirabilis
gtgcaatcattgcctgactcattagtatcaatcaaacctgaacaagaggtagacaataattttgaatactcattattgcttagtgccgccacaaaagagagtctaaaaaaacttgctggtgattatgcaccattaataaaaattaccccagcaaacattctggctcataatgcattacagcaaagacaactcaacttaccatggcgcttatctatccccttaacaagtgagagtgatatttcactgttagctttctctcaaggaagtgctgattctttaatacaatatggtcatacatcaacaaataagaaaatagcgtggctattttctggtatgggatcacaatatcctgctatgggtaaagtgatgtaccaacattcaacaacatttgccgaaacaatcgatcgttgtgagcaagcatgcctgcaacacttaacatttccgttaaaagaagtcatgtttggcctacatagcgataaacttgttaatgccagttatattcaagcggctattgtcgcctatgaaatcgcaatggcagcacattggcgagcaatcggtattttacctgaaataattgtaggtcattcttgcggagaatatgccgcagccgttatcgctggtttctatacaatcgaacaaatgatgccacttgctgtatatagtggacaattaatggaaagtcatgttaatggtgaaatgattgctgtatttgcagaatatcaagatattcaaatcattgctaaacaatgtcatgttgaattagctgcaattaatggccataacaacttatcattcgcggggcaacccgatgatatgcaaaagtttactcaaatattgaaagcaaagaatattcgatttagagaaatgaataacgtgtgtgctgctcatacctcttatattgataatattcttgatcaattgatggaatttactgagtcattatcagcctcacaaggaaaaatagccttagtctcaggctatacagggcaattaatttctcaaaaagaacttcaacatccatcatattgggctcagcaactacgcaatacagttatgtatcaagatgcaatacaaacgttagtcaatcatggtgtcacccatgctatggaattaggaccaacttctgtattaagtgatcttggtgaacgtgaaggcattactgagattagttggataccaactgccagaatgggagttgatgaaattcagatgaaacaacaggctgcaacaaccctatttattgcaggctatgatttaccatggcagtcactgtttaaaactcaaggaagttatataccattacctctctatccctttgaaaaacaatattattggtatgaaaaaaaggatagtgaaaaatatcaaccacaaaaaagcgcatttgatttacctattagccaaggtcgtgaaacggcattaaaagcgcgatcttcctcgtttaaactcatttaa

SEQ ID NO: 312706 - DNA, 678 bp, Proteus mirabilis
atggttattactgatgctgaatttcattttgccgtattgatgtcactgagcaccgcgttaacatcattgtgtttagccgtgctcttagctgtacctgcagcttgggtgatggcaagatcgtcatttaaaggacagcgttttattgatgcgttactcgatttacccttagtcacgcctcctttggtaataggtattggattattattattgttaggtcatcaaggacctttaacaggggttttccctcaattatctcgtgcccttttttctcccttggggattattattgctcaaacatatgttgcaagtgcaatcattatgcgtaatagccttgcggcgtttaaagctattgatcctgcttatattcaaaccgcacagaatttaggattaacaccaacaaaaacgcttattttggttgagatcccactttgttggtctgtattaatcagtggttgtattgtggctttttctcgagcattaggggagtttggggcaacattaatgttggcaggggccacacgattaaaaacagaaaccttaccaatggcaatctatttaaatatagcgagtggtgatttctcgcttgcgataggttgcgctttagtactgatagcaattgcaattactctattgtttgctttacaccgtttacagcgtgataggaaattagcatgttaa

SEQ ID NO: 312707 - DNA, 1338 bp, Proteus mirabilis
gtgtcattaagaagccaattacaaattggtgatagttatacctcatcaacactttttgacagtgttaattttcgaggtatttcattagaaagtgacgacactatgttacctgatagccaaagaggatttgcacctgtggtcagaggtattgctaaaggcaatgctaaagtggtgatccgccaaaacggttatgtgatttatcaaacctttgtttctccgggtgcttttgaaatccgtgatctctatccaacgccaaatagtggcgacctctatgtcaccattgaagaaaatgatggtagcaaacacagctatgttgtgccttattctgctgtacctattttacagcgagaaggccaaaaacagtttgtcatccaagccggtgaaatacgccaaaataaccaacataaaaaacctcgctttatacaaggtcatcttatttatggcttaccctatgacaccactgtctatggcggtgcattagcaacaaaagattaccaatcttatgccctaggagcaggtaaaaatatgggtaccctaggtgccttctctaccgatatcacctttgctcatagccaattgccaaataactcaacatcagatggttattctttacgttttctttatgccaagtcgttaaaccaatttggcacaaactttcaattgctcggttatcgttactctacttcgggtttttacacattagatgagacattaaatacacgtatgtccggttatctgtatgaagataatcaaaaaaaaccgttgagttattttaatttgcataatcgcaagaaagggagcctacaaattaatttatcacaacaactgggggattatggctctatttttatgatgaccaactggcaaaattattggggaactaatgagaaaaatgtcctagtacaaaccggctacaatggcaatattaaagggctctcttataacgtcatttatagttataacagaatgatgaatagtggtcagcgtgaccaaacattgtctgtgggtctttctatcccattacaattgctaatgccgacaagttatcaatccatcaatagcacttatctcacatataattacagccacaataataacggttactcgacacataatgcggggattgctggtacattattggaagacaatacccttaattacagtgttcaacaaggttatagcaatcaaggcggaaactataccggtagtgcggcgttgggttatcaaagtcgctatggcaatttaaatgctagctataactatcatcaagatgctcaacaaattaactatagcctcgctggaggtatgctactccatctgtctcttatacacatctga

SEQ ID NO: 312708 - DNA, 1092 bp, Proteus mirabilis; identical to SEQ ID NO: 301499

SEQ ID NO: 312709 - DNA, 660 bp, Proteus mirabilis
atggttgtttatatgtttaaccttagtcctgctatgctcgggttcctcggtggtgctgttgctatcggatttccacttttattttatttgctcaaagaaatagcttttgatcggaaaaagatgacagtagaacgcaattatattggtgttcagcttgtatttattttggataaatttgttagtgaatgtgcagaagtttcatgggatagagggtttgatgaaacctatcatgaacctgactcccctgaatgtttaagccctcgagtcgaacctcccatcttcgatatgagtacagtgaggggtgagtacaaataccttgaaccagcactcatttacaaattgcaatccatcgatattgaattattgaaaatcaaacaagaacttcaagaaatgacatctgatctaaattttggtccagaatttatggatcgctatattttgttaagacgtgaacgttatatagatctaggattgcacgttaatcaattatcagaagatatccgtgataaattgaaaatagattctgatcatggatggaaacctaaagatagcttgcttagaagcaagaaacagattctccgtatcaaatcaaaatcagctttcaacaaaaagttaaaaaaagctgaacggatgatgcactcgaaacaacatctattttaa

SEQ ID NO: 312710 - DNA, 657 bp, Proteus mirabilis
  misc_feature (621)..(630): n is a, c, g, or t
atgctgaattttgaaactttctatggtaatagtgaacctatagctgttattggtctttctggtcgcttccctgatgcacaaaatattgatcaattttggcataacataattaataaacacgatagctctcgtcttttttctgaagaagaactaaaagccgcaggtgtcgctgaacaaacttatcattcacctgattttgttaatcgtggcgcgccgttagatgaagcggaatattttgacgctactctatttaattattcacgctcagaagctgaacttatcgatccccagcaaagaatttttttacaaggtgcttggcatgctttagagcatgctggatatgccccttgcaatataaccatcaaaacaggcgtttttgcttcagcaagaatgagcagctatcctgcccagcaagatttagcattgcacaatattggccatgtccgtggcatgcaaaaattattagggaatgataaagactatctcgcaacacgtattgcatataaattaaatttaactggtccagcattaactatacaaaccgcttgttctagctccttagttgccgtacatatggcttgtgaaagtttacgctctggtgaatgcagtatggctattgcnnnnnnnnnngtggttatctatatcagaaaggcatga

SEQ ID NO: 312711 - DNA, 804 bp, Proteus mirabilis; identical to SEQ ID NO: 297629

SEQ ID NO: 312712 - DNA, 438 bp, Proteus mirabilis
atgtatttagccatcgtgatggacttatactcatgccgtattgtgggttggcacatcgataaacgaatgacggcagatttagtcagtaaagccttgatgaaagcgtataacttacgccatcccgaaaaaggcttagtctttcatagtgatagaggctctcaatatacgagtaagcgatatcgccgcttgctaacaagctatggtattcgagtaagcatgggcgatgttggagcctgttggaataatgccgttgtagaacgattttttggtagtttaaaacacgattgggtactgaaaatcccaaagccgactcggaaacagatgaaagaagatgttaccgcgtatatgcgctattacaacctagaaaggcttcatactgccaacggtgatctgcctcccattgagtatgaatataattccttcagaaaagtgtcctaa

SEQ ID NO: 312713 - DNA, 189 bp, Proteus mirabilis
atgaataaatttaaattttatgcggtgtgtgataatgacgggaatattgtctgtatcaacaatagtaagtacccatcactaaaagcaatattctatttgcgcgaagatgccgaaagagttcttagtaagaatattggagaaaatcttcacattcacgaagttaatgttattgaggctgataatgaataa

SEQ ID NO: 312714 - DNA, 189 bp, Proteus mirabilis
atgccattcctaaatttgcttcaggatgctcaggcatcactgacagcactttttgaaaatgatattgggctatctgatattgttgctcagccagataagcttcccctaattgaagacgaagaggcactgcaacatgttttttatttgctgttgattggcagcctattgtcaataacaccaagcagatag

SEQ ID NO: 312715 - DNA, 300 bp, Proteus mirabilis
  misc_feature (243)..(252): n is a, c, g, or t
atgcctttattacaagatgactcttcttcaccacgtcctttagaaattgcggctatagaccttggttctaatagttttcatatgatcatagcccgtgttgtcaatggtgccttacaggtattaagtcgtttaaaacaacgggtatatcttgccgatggccttgatgataatgataaactcagtgaagaagcaatgttgcgggggctttctgcactttccctttttgctgaaaggttacagggnnnnnnnnnnagcagaaaatgtcactgtggtcggcacacatacgttacgggttgctag

SEQ ID NO: 312716 - DNA, 1119 bp, Proteus mirabilis
ttgcgcttgttgggcttttttagcttttacgcgggcaatagcagcggcgacagcagctttacgcggatcggtttccacctcagcctgagtttcagcaggtgtgtctatttctgcagttgcttgtgcttgttgagcttttttagcttttacccgagcaatagcagcggccacagcagctttgcgcggatcggtttccatctcagccggagtttcagcaggagtgtctacttttgcagttgcttgcgcttgttgggcttttttagcttttacgcgagcaatagcagcggccacagcagctttgcgcggatcggtttccacctcagctggagtttcagccggtgtgtctacttttgcagttgcctgtgcttgttgggcttttttagcttttacccgagcaatagcagcggccacagcagctttgcgcggatcggtttccagctcagccggagtttcagtaggtgtgtctacttttgcggttgcttgtgcttgttgggctttcttagcttttactcgagccaatgctgccgctacagcggctttgcgtggatcggtttccacctcagcaggggtttcagcaggagtgtctacttttgcagttgcttgcgcttgttgagctttcttagcttttactcgagccaatgctgccgctacagcggctttgcgtggatcggtttccacctcagcaggggtttcagcaggagtgtctacttttgcagttgcttgcgcttgttgagctttcttagcttttactcgagccaatgctgccgctacagcggctttgcgtggatcggtttccacctcagcaggggtttcagcaggtgtgtctacttttgcggttgcttgtgcttgttgggctttcttagcttttactcgagccaatgctgccgctacagcggctttgcgtggatcggtttccacctcagcaggggtttcagcaggagtgtctacttttgcagttgcttgcgcttgttgagctttcttagcttttactcgagccaatgctgccgctacagcggctttgcgtggatcggtttctacctcagcctgagtttcagcaggagtgtctacttttgtagttgcttgcgcttgttgagctttcttagcttttacacgagctaa

SEQ ID NO: 312717 - DNA, 291 bp, Proteus mirabilis
atgaaaatcaaagtagagttcccattgttatcaaacaaattttcaggagtggaaattacaggggatgtgaaaagatatggcattggggctataaaaataagtgaaaaacctatattaacgtcagaaattacagtaacggagatagtgggaaataatacccaagatgaagaaccaaagttacaatttaagtacacagaggattataacccaaatgaaacatttacttcatttatggggagagcggaaaaatatgcaagaaccatgatagatcgcataaaggcggcacagtaa

SEQ ID NO: 312718 - DNA, 2940 bp, Proteus mirabilis
atggcagatatagcaacaatatcattaaaggctgatacgtcagatctggagcgtggcacacaaaagttaaaggagttcggcgatacagcagagaaggtaagcggttcttcgcgaaatttaaatgaccagtttaatagaggggttgatcatcaaaagagagcagccgacgcgataaagaggcaaaagaaagaacttgatgacttattaaattcaataaatccaaccaataaagcatttgatgcgcttgataaagccactcaaaaattaatagaggcaaataaaaaagggatattaccaaaggatcagtttgcagactataacgccatacttgagcagactagagataaattaacacgagttaatatgtctcttacggctgaagggcgggcgctattagctcaagaggcggcaacaaatagagccaagcaagctgctgatgattttttaaattcactgaaaaatcaaactgaaattataggcaaaacgaggacagagattttagagctaaaagctgctcaacttggtgtgtcgcaacaagctgcgccgatgatcaataagctaaaagagcaagaaaaagcctttatgaatggctcaattaccattggtcaatataaacaagcaatgcgtcaacttcccatgcaaatgacagatattgttacgtcattagcatcaggaatgccagtctggatggtgatgatacaacaaggggggcaaataaaggactcatttggtggtgtcggtaactcactaaaagcgttagcatcacttattacccctgcaagagttgctatgtttggttttgctggtgctgcggcagctgtggcgttagccgcgtataaagggtcgcaagaatttggcgagtataataagcagctaattcttactggtggttatgcgggaagaacagcggcacagctagatgctttggctagaagcttgtcggggaatgggatcgctcagtatggaatggctgatactatctcaaaagtagttggatctggttctttctcgggtcgagatgttgatatggtatctaaaactgctgctgctatggaaaagaccgttggtcaatcggttgatgagacaataaagcaatttcagagattgcaagaagatccagttaaagcggtcactgaattagataagtcattacattttttaactgctacccaattagaacaaataaccacacttcagacgcaaggaaaagagcaagaagcggctaaaatggctatggaatcatatgccaatgctatggatgagcgaaccaaacagataaaggaaaatctaggccaccttgagagagcgtgggaaggggttaaaaacatggctagtagcgcatgggatgcaatgctagacatcggcagagagaatactctagagcagcaaatcaaagagtatgaagaagctctgattgagtttcaaataaaccctgcctccaaggggctgtattataacaagactggattaatgccagatgaagttaaaagtaaactcgctctactaaaagaagaaaaatttcaacgtgacattaaaaacgcaagagaaaaagccgcaagagatgaggaagagcgtaaaaaagcgcagtttagagccgatcaagaattaaagcgacaatacgaaaccgcagaggaaaagcaccaaagactactcaaggagataataaataatgcggatgcatctcaagctgcaaaagatgaagccatccgccgagagaaagagcgttacgagaaagaaaaagccaaaggtaaaggtaaaaccccaacctaccgaccagattatggtactagagtagatgaatcagcaaatcaagccctattatccctacaagcacaattaaaggtgctaaaagagcataaaacagtcagtgatgtgattagctctgagcgtaaaaaactttgggatatggaagcgaaaatatcaatccttgaggaggctcagaaaacaagacagttaaccaaggacgaaaaggcgttgcttgctaaaaaggactacattcttgcttctcaagaagcattggccatagctggtgatgaggttaagcttcaggagttacataatcgtgagttagataagcaacttaaacgcgttgaagaaattaatgccagaagtcgcgccttagagttgggagctggtaagtctggccgcatgtatcaacgagacatcgcactagagaaagctaaatcaccagacgagagaaaagccttagaggagtattatgctaaggaagactctattcgtgctaactgggagttaggcgtcaagaaaggctttgctgaattccaagatcaggcaacaaacgtttacggtaacgtagctcaaattagtcaatcagcattccaaggcatgagtaacagcctctctgattttgtattgacgggaaaagctaattttgctgacttcactcgctcattcttagaaatgaccaccaagatgttaatgcagatggctatgctaaatgctatgaaagcggcttttggtggtaatgcggtaggtaatttctttgggtttgcaagtggtggttatacaggcgatggtggaaaacatgatccagcgggtgtagtacataaaggcgagttcgtctttaccaaggaagcaacgcaacgattaggtgtagataatctctatcgactaatggatgcaggaaagagaggttatgcttcaggtggtcatgtcggtggttctgcgcccatgtcggttacacagccaacagcatttatcgctcgcaatcctcaaattgctggtggtggggtgaatgtgacaattgatatgagcggcgtcaagattgaaaccgaacagcaacaaagtgcaatgccaaatatagatgtgagagctgctgagcaatcgttaaagaataaagttaaaagcctttttattagtgaagggcgagaaggtggtgatttgtacaagatcattaaagcagtatcaggaaatagataa

SEQ ID NO: 312719 - DNA, 534 bp, Proteus mirabilis
gtgtacagcggtgaagtcagtacgcagcgtgacagtcagagcgtcagacgcagcgggcaggctgcgggggcagcagccgatgccgtaccggaaagcgtggaccgcaaagcgaaaacccgttatccggcgccgttaccggtcttactgacccgttatgccgcccagagtctgtatgcaccgttaagaacagtggagccggtgtccggcgtacaacctttgccactgaccttaccaaaaacactgacagcactctacccgtctgaaccactgatcgcgcggccgctggccggctggcaggcggcggagtaccgggtggtggcggtgaaactgaccaatcagtccgctcagaaagtcgtgctggatccccgtcagttgcaggggcagtttgtcagcgccacgttccagcatcagtggctggacgcgaagggcacaccggaggataccaccacagtgtatctggtgatgaaaggcaaaccggataaggcgtttcctgcggagccgcctgtccggaggacgggagggaaagcccgatga

SEQ ID NO: 312720 - DNA, 450 bp, Proteus mirabilis
ttgatccctaatctagtcaatacagttaaagggtactcaaattatgaaagccaagtattacaagatgttgtaaaggcaagagcgtctgttggacaaattaatgtcaatacgcgtttatttgaaaattctacacttgctaccagttatcaaaaagcacaggatgatttgggcaaatctttatcacgtcttttagctatttcagaaagatatcctgacttgaaagctaacacattatatcaagatctaatggtgcaattagagggagccgaaaatcgtatctctgttgctagagggcgatatatcgaggcagttcgtcattataatactcagattagacagtttccttataacttcatagctatcgttatgggatatgataaaaaagtcaattttactgttgagagtgaacaggaaataaaagtaacaccagtggtggactttgcctcatga

SEQ ID NO: 312721 - DNA, 1257 bp, Proteus mirabilis
atgactcaaccaaatacagcaacagacttttcaattaatgacatgaaaacattaattgaaacaatgcaaatttataaaaaagataaccatgacaaagggataactcgtattgcctatagcgaagaagatgaagcagcccatctctatcttgctagtgtaatgaaagaggtaggccttgaagtctatcgtgacggtattggcacactctacgctcgcttaccggggcaagatagaacgttacccgccgtaggaacaggctctcaccttgataccgttccccaagggggggcttatgatggtgccttaggagttattgctggtttttatgctttgatgcaatacaaaccacaacaactgaaacgtgatctagagttaattgtattccgagcagaagaatcgagccgatttgggttttcatgtatcggaagtaaagtgctaacagggaaaattgaccatactcgatgggaacaaaatagagatgatgaaggtaataatttctttgatgttttaaaatcccttggttatcagcatgaaaacttagatcaatgtttacttaaatcagaccgttatagtgcatttgttgaattacatattgagcaaggtaaacgtctagaaaacgatcaaaaaacaattggaattgtcaatggtatcgctgcgccaacacgtttttcagtcaccgtaaatggccatgcagaccactctggtgcaacgccaatgtatcaacgtcaagatgcgttagtggcgagtgcgggtattattactgatatcaatcatgctgcctgtacagaagcggtatacggcaccgtaggtaccattggtaagcttaatgtcataccaaactcgatgaacgttattccaggacaagtaaaattctccgtggatattcgtggtattgatacggacagtattcaacgtgttgtacagcgtttaacaaacagtgttgagaaagcagaaaaagattttggtgtaaaaataatagtgcaacctatttcggctgaatcaccagtaaaactggatgactcaatttgccaagttattgaaaatatttgtcaaaaacacgatatcaattatatgactatgttaagtggtgccggtcatgactcaatgaatatggcatctttatacccgacagcgatgatttttaccccctctgttgcggggattagtcatcacccagacgaatttacggagtttagtgatattgcaatagctgcagatatcttagcagaaacattaggtgttctagctaatcaataa

SEQ ID NO: 312722 - DNA, 621 bp, Proteus mirabilis
atgcgtcaacttgaaacgcaatcttcccatatttatacccatttcgaacccttttcctatttattaacctctgattgttatgataaaacgcttgtcgagatgttaacagaagcctctcctgagaatgcgctaacaaagaagcaacaagaagttttatctattttaaaagagcgtaaaaagcatcaatcattacactcaccgcatatttataatctaattagccagcagcaaatcgaaaaatttctttatgttggtatgctaggctctgttaatgtaagtaaagccattcaacaagaaagaaaacaacgcgcaaaacaagaaatcagccatttaattgaaaagttagagcaaaaaaatagtcatcttaatattgcaattatttcagatacgatgccatctttaacctttcaattgttttatcaaaacaaagcacctctctctttagcggttagtccatttcgcttaggtgaatttcctaatgtaagtacgggtattgcgacagtatcttcatcaacggaagcaatatttcaatatcaatctctctttgatacgttatgggcaaaagcaataaaaaatgatgatgccattacacgcttaaaagagattatcagtcattattga

SEQ ID NO: 312723 - DNA, 891 bp, Proteus mirabilis
atgaacagagagcaactattacaagcaatatctcactatcctgcactcgctcagcgaaatatgggaaatacacataaaggcacttttggtacattagccattatcggcagctcagaaggcatgagtggtgcgattgttttggcgggaaaaagtgcgcttaaagcagggtgtggtaaagtctttttgggctttgcacaaccacaattgccactgccttttattgatagtgcacccgaactgatgctacaaacagccataacattattagaacaaccacaaatatcagcatgggcgattggctgtggtttagggctttcacctgattcggaacaattgctgactacagtactagcacaacgtaacgagaaaataccttatgtttttgatgccgatgcgctggtgttattggctcaattaaacttatcgcatattaacactaagttaaccgctaattgtgtattaacgccccatccgaaagaggccgcaactttacttcattgtgatgttgctgatattcaaaataaccgtcaacaagcagcaatagaaattacacgccaatatcattgctgggccatagtgaaaggacaaggaacggtgattgcttcacctcaaggagatatcacagtaaatacaacagggaacagtggattatcgacagcagggagcggtgatgtattaaccggtgtcatggcaagttttttagcacaaggtatgccaatcgcagaggctgtgccgagtgccgtatggatacatggtatagccgcagaccaattaataaaacaaggaatagggccaataggattaaccgcatcagagcttattgataccatccgtgcggttcgcaaccaaatgtgggcaacccaccaacagcacagcgctgatttattttaa

SEQ ID NO: 312724 - DNA, 1305 bp, Proteus mirabilis
atgataaataatcaaaaaagaacaaaagtcaggttttctattgcaatattaatgacgcttgctattgcaattaattatcttgatagaacggttatgtcagcagctgcacctacgctatcagaagagctacaaatttctcctgaagcaatgggctggataatgtctgcattctttcttagttatgcattatgtcaaataccagcaggttttattgctgaccgatttgggcaaagaaaaacccttgcaggtgctgtactatggtggtctatggctacggcggctacagcgttagctaaaacaccattcagttttatatctactcgtattttgatgggaatgggggaagcaggtgcttatccttgtaacagtggtataacagctaaatggtttcctgatagagaaagaggaaggatcacagcactatttgacagtggatcgaaatttggtactgcttttgcgatgcctttagttgtctggatcatcgctaaatggggatgggaatctgcatttattttttgtggcgcattaggatttttatgggtcattgcatggttaaaaatttatcatgatccggaacaacatccaaaagtcagtgaagccgaattaaaatatattcgtgatgggcaaattaaaaaagaaggtatcgataatattcaaccaatgaaatggtatgaactatttcgttatcgtaatgttcaagcaatgtgtatggggtttttcttgctcgattacgctatctatttctttattacatggttccctgcttatttaatgatggaaagagggatgagtttagaagaaatggggtttgctgctatgttaccacctttatgtggtattgcgggtcaatggctaggtggatttacaacagattatctttttattaaatacaataatatcaatatagctcgaaaagttccaattgttggggggatgttggtggcaaccagtattgcattctcaggactggtggagtcaacgtcagtaatgatgttcttactttgcttatcctatgctgcattagcttttgctgcttcagcaatatggtctttacccggtgatgttgcacctagaaatatgacgtctgtattaggtggaatgcaaagtgcagtttcaaactgcggtggtatattggggccaatagtgacaggttatattattggtgcaacaggctcttttatgtgggcattaatagtatcgggtattgcatgtgcagtaggggcacttatttatttagtgatgttgcgtgatattaagcctattacagcaaatgaaatagaggtacaaaataatcagataaattaa

SEQ ID NO: 312725 - DNA, 306 bp, Proteus mirabilis
  misc_feature (292)..(301): n is a, c, g, or t
atgatgatccaagcgttacattcgctttatcaacaacacaccgataatggtggtcatggcatcggacgttgtggtggtaaaggtaaacacagaggacaacaccataatggcaataatgaacattgttgtcatggtgaaagagaccatcaccaagaaggtcatggcaaatgttgccaacagggtgagcaaagtcatgagcataatgatcatgccgaacatggctgttgtcacggtgaaaaacagcaagagcatggtaaacgacatggccgaggttgtggtgctggtaaaggannnnnnnnnnggtaa

SEQ ID NO: 312726 - DNA, 858 bp, Proteus mirabilis
  misc_feature (845)..(854): n is a, c, g, or t
ttgaataaaaaacttggtttaatgtcactaacagcgttagtgctaagctcaatggttggtgcaggtgtattcagtttacctcagaatatggctgaggttgcaagccctgcggcactgattatcggttggataataacaggggttggcatcctttttctcgccctatcattgttattgctttctcgcttaagacctgatcttgatggcggtatttttacctatgcaaaagaaggatttggtgaatttattggcttttgttctgcttggggctattgggtctgtgcggtagttgccaatgtctcttatttagtcatcgttttcgctgctgtgagttttttcaccgatagccctaataatattatttttggtgatggtaatacatggcaggcattattgggtgaatcaatcttgctttgggttgtgcactttttagttctacgaggtgtacaaacagccgctagtatcaatttaatggccacgatggcaaaattaattccattggggttatttattattgttgccctacttgcctttaatatggatatttttacccttgatttcgaagggataaaaatgggcgtgcccgtttgggaacaagtaaaaaataccatgttaattactttatgggtatttattggtattgaaggtgccgttgtcgtatccgcaagagcaaaaaatagaagagatgttggtttagcgacaatatttgcagttgtgatcgcgctgattatttatattctcgttaccctattatctcaaggattagttagccaaccagagcttgctatgatgaaaaacccatctatggcacctttactggttcaactaattggaaatataggtgnnnnnnnnnngtga

SEQ ID NO: 312727 - DNA, 954 bp, Proteus mirabilis
atgaagctgaaaacctcagtcatcgcagcagcggtgttatctttaactaatattactgttgcgcaggctgcacaggaactgtctccagaacaagcggcagagctaaaaccatttgaaagaattacagtcatcggtcgttttaatgcgatttatgaagcagctgacgcagtatctcgtcgtgctgataaaatcggtgctgatagtttttacattcaaggtctagatgatatcagtgatagtggcaacatgagtgtgactgccgatctgtatcgaaaagatgcaccaaaagcaactgaagaagaataccgcgtatttcatggtgtaaaagaattaccaaaacctgaagctattttgctacagccttttgataccgttactattcatggttactatccaacaacacctgatattaataacgaaatcggaaaagaagcagcaaaaaaaggcgcagcatcattctttattgtccgtaatatctcggtaaatgatggtggtaaccaagaagttactgcttatatctataaaaaagatgcccctaaaagagccatacagtcttcagaagccgtggttccttatgactctgatgcgggtcgagcgcttattgccgaaggtggaagtgcagccaataaagttgaaaaaccaggacttgcgtcaaatagtgactttgatagaaatgtaggtgtattttctgaaacacaatcatcaggtaaaagcggacgttacactgtcaccttacctgatggcactgaaattcaagaggttaataaagcagcggctgcattaatggaaccttttgataccattactttcagtggttattttgtaaactctccagaagtttcttatcaagttgctaaacgtgcagcagagaaaggtgcaaaatactaccatattactcgtgaatggcagagtaatggtggtacggtaacaatcaccgctgatttatttaaataa

SEQ ID NO: 312728 - DNA, 360 bp, Proteus mirabilis
atgagcacattattatctacacaaaatctctcttttcataataatcacggtatattgctgagtaatatttctttggccctcactaaaggtgagaaaattggtttaattggctacaacggttgtggaaaaagtacactattaaaacttttatcacaccaattaataccaacagatggctctattactattgccaatcaagtcattatggcttatgtcgaacaacagttaccaagtgagctacagtcaatgcgcctcattgatgcggttcttcataaattacctgaagaactacgcatatctgaaagttggcgcagtgaattattattaagtgaaatgggatttaaaaccaataaaaagtaa

SEQ ID NO: 312729 - DNA, 573 bp, Proteus mirabilis
gtgcaacgtgaagcattattagaccacgtacttatccaattagagcaacatgggcttgccgctacgttgcctgagttattgcagggatttgctattactgaatctgaactccaacctttttggcctgataaagacgcgttaatttttgattgtctacgccatcatggacagcaaattgatatttggcaacgtcaagtgatgttagatgaaacgctgaccacagagcaaaaattactagcacgttacgatcagctggctatgcgcttagaaaaaaatcgtttcccaggctgtttgtttgtcgcggcttgtagtgcttatcctgatgagcattcacaaatccatcagttaagccagcgccaaaagcaaagctcatttgaatactctagaacgctactacgcaagcttgatcttgaagatagtgagttagtcgctaaacaaatggaactcatcttagaaggctgtttaagtcgcttaatggtcaatcgtcacgctgacgatatcacgacagcaaaactattagctcaagatattcttaaaatcgcccaatgtcgtaaaaatggtgcgctaagctga

SEQ ID NO: 312730 - DNA, 153 bp, Proteus mirabilis
atgcaacaaggccgagatgctgtttcgcctgttgattaccaagcccgtaagccctttttatcttttggcaaaaaccctcttcctgctgattttgagcaacaggtcggacagattctggcaaagcttgatcaggagaaaaaacaccatgcgtag

SEQ ID NO: 312731 - DNA, 678 bp, Proteus mirabilis
atgaatattattaatcaaccttggttgccttttcgttttcgtggtggcgagattaaaacacttccaatatcagctatttcacatcctgatattattgatttctcattaaatagagccgattttaaaggtgctgcttatcaatttgcaatagggttattacaaacgatatttgcaccagaggatgaagatgaatgggaagaatattttgaaacaccaccttcaagtaaaaaattacaatctgcatttgataaagttgcacatgcttttaatataatgggtgatggccctttatttatgcaggatttttcaactttagaagagcaaaaaaatattcctatagctcagttgctaatagatgctcctggtgaaaatggaataaagcaaaatacagaccattttattaaacaaggtattgcagatgtaatgtcattagagatggctgtgttagctttatttaccttacaaataaatgcccctagtggtggcaaaggtcatctagtcagtctaagaggaggtggacctttaacaacattagtttatcccgcagaagaaaattcaacattatggcaaaaattatggcttaatgtaattaatagagaattttgggaatatgatgaaccaaattttgatgctgtctcttatacacatctgacgctgccgacgaagaggatagtgtag

SEQ ID NO: 312732 - DNA, 651 bp, Proteus mirabilis
ttgtggtttccattaaaaaatagttttgcagtaaatgtaggtaatataacagagataatatcttctgatgaaagtactcttgccaaagaaattgaaaatacagtaaatacggcaagattagtcaatttgacaatagaaaaattagactcaccacttgaaaatggtaaagttattccggttactgatcccaatgaaattctatcaacaccggctaatctgattcttcccggtcatgcaagtgatgtatttaaaatcatttatcaagggcctaaggatgataaagagcgttattatcgattaaattggaaagatgatcctattgctgaaaatggtataacacaaagctcaaaatcagcgacagcaacaacatctgcaactattagtacaattttagtggttgcacccagaattgagaattttaattatcagtatcatgataataaagtttctaatatcggtaatagttcatttcgtgttgtggcttcaggcccttgtctagcagaaaaacaacaatatggtgtggaggggatgtgtcgcgagcgttattaccttatgccacatttagccgttaaattacaacttgtcgatctcacaaataaaaaatctagcgtaggcatttggcacaaaggagagttcattgttgtcaaataa

SEQ ID NO: 312733 - DNA, 459 bp, Proteus mirabilis
atggtaaaacggaaacaccgtactgtatcccggcaccggcagattgccggccgagagatgcgggaacacatacatcaccatgtccgggttcggcagacgcggaaactgctgatggatctcactgctttgtgtccgggtatacgcggtgtccgcctgctgaaggcgcgcggcttcatcattcgtcagggcgcgtcgcagggcgctgcgggcggtctccgtcaccgtccggctgtccgccgcaccgttcggatcagcctgtctgccggaccagatggccatcatgtcgctgtttcccgccggcagcagctcctctttggaggtggcacagccggccagcaacaacaccagtgcgcacagcactctgcttttcatcacacatttcatcattctcatgatatgacgcctcccgcgcccttcaggatcgccccccggcaggtcagccgggcaaactcaccgtga

SEQ ID NO: 312734 - DNA, 288 bp, Proteus mirabilis
ttgattagttcaaatgccgttgctttaacacttgatgaggcgcgcgcgcaaggtctagtaggggaaacctttagtggttatgttgagttagtgcaaccaaaccataagcaagctcaaatattggtgaatgacatcaatcaagccagaaaagccaaatacgctgaaattgctaaaaccaatcaagtgactcctgaatctgttgcccgtttagccggtgaaaaattagtagcaagagccaattcaggtgagtttgttaaaggaattaatgggcagtggattaagaaataa

SEQ ID NO: 312735 - DNA, 183 bp, Proteus mirabilis
atgacttggctaactgaaattaacgccgttaaggttcctaatttattctcacatctcaatacaaaatatagctgtttttctgttattttttttgtaccaaagatagaagataatattaccatgtcattaattttatttgtttcctgtctcttatacacatctccgagcccacgagactcctga

SEQ ID NO: 312736 - DNA, 780 bp, Proteus mirabilis
ttgaaggtcaataaaggcagacgcagcacaaagccggaattgcctgcgccggtggagagtgagggtgatacaacaaccgcgcattcagaaaccgtacctaccggtatgacctccggtttttcggcagaggatttgttaacggagcccctatcttctggttcaggtcaggaggcttcagtatctcctgtcgttgaaaagaaaaaatcccgtccggttgtggagatccagacggatttatacggcggggcacctgtgctgagcggggataccgacgaggcggatattgagcctgtcgatggcggaagtctgtttgtcacgaataacccggagcatgtcacaccggtggaggcgcccgtctccggtcatgcggtgacggcactgacgtgtcaggatctctggccggtggcatcacatctggatgatattgaacatcttcagacgcaaatttaccgtactttgtttgaattagggaatgagctggatttatcttccgcctttatggcggcttccggggtgcattctccgggatttattacgttgtcagcacattcggtgctggggcgtgtgatgacggctttctcagaacctgatgagtcccatgatgatattccggatgccctcagagccctgctgacggggggatatcagcccggtatgtcgccggtattgaatgatacccagtttatgacatggatgaaactgatgtacttgttgcgttgtttgtatgccaaacaaagagatgttgatccggatgtgaatgatgaagaggaatgggaataa

SEQ ID NO: 312737 - DNA, 3393 bp, Proteus mirabilis
atgcataaaaaggatatttcgcgaaaacagcgtttaataagctattgtgttatttatttaaccgctatttacccattgcatcctgcttggggctctgtcattacttcatctgataaaacgataacaataaaccagcaaaataatattcctattattaatattgcaacacctaatgacagtggtgtttctcataataggtttaatgtctttaatgttaataaacagggggcagtacttaataattcgcaagttgatgctaatagtcaattagcaaaaaaaatatctgctaataaaaatttaaaaggtaatacggctaatttaattattaatgaagttgtcggtaatagtcgttcacagttattaggtaaattagaagttgcaggacaacaagcggatgttttaattgctaatcctaatggaattagttgtgatggttgttcatttattaatactccatcaattactctcacgacgggaaagcctcaatttagccctcaaggtacctattcggcactagaagtaaaaaaaggcagtattgttattggtaagcaaggtatgaatgccgatttgcaaaattatgccgatattattagtcgtagtattgaaataaatggaaagataaatgctaaaaatctctctttaatgcaagggaataaccatattgatttcggcaaagggacagtaaatagcattaatggagaaggtgtaaaaccgaccgtcgctattgatacaaaagcattgggtggaatgtatgccaatcaaatacgcttagttagcacagaaaagggggtcggtgttaatttaactgatattcaaacaaaacaaaatagtatcaatttaacagttgatggcaaaattacctttaatggcaatattcaatctgagcaagatattaatgttagtagcaaagcgctacaaatgaatagtaatgccagcttaaaagcgcaaagagatattacattagcaactaatacgctaacgaatcatagtgatattatcgcagaaaaggatatgcgtttattcgtagataaattcactaataaaggtgaaaaagcgcttattcaagcaaaagataatttatggatacaaaaaaatgcacagggtgaaccaagtagtttaattgaaaatcaatcagccaccataaaaacagaaaagggtgatttgattattagaaccaagaaattggttaatgaatctattactcctttatttaaagaaataaagcaagagcctgattctacatcgtctataaatataggtactcattttcttcatccttacaatagtcctacgaataatttccttataattattttacttgctgaattaaaagaactctctgataaaaagtggtttgatatattagatttaaaaaataatggaggtgttaatgtagaacgctcattatttgaaaagaataaaaagtatgttcctagtgttatttattctggtaaaaatttatatatacaatctaacgagttttttaatacccaatctgatatttttgcaactaatgatcttatcgcaacgggaaacaatgcaaaagtatactattatcggtttggacaccttaataaatgggatctttattctcatgataatgctcatattttttatcgagatgatgtaaataaatataatattgatgaaactaaatttcaaaaaatagttcattttattccctttactaaaactggaagtcattatgaatttattgtagatagtgcttctgaatatatgataaaagcaggtaataatttagttttagattttaaagatagtatagcgttagaacgtaaatttccatttttagaaaaagaaattaaaaagtatagaagaatatctgattttgaaagtactatattagctaaaaatatactattaaatgctaataatttaaatatctcattaaatttaaaatcaagtaactctttatctgttattgctaataaaaatataaatataagtaattcaaatttattatctggtgatattataaatttaacagcaattgataatgttaattctgaaaatatagatgtaacggcaaagcatttttccatcataactaagaatggagatattaattattcatttagccctatagcctcttatactctgaatagcattaaggcaccatttattgatgtgtctgaaaaaatagacttttattcaggtaaaaacatttacatttcaaatgtaataattaatgaatcaaatgaaaaaagtttatcagcattagagaatattaaaataaaacgtgatgagtctttatttttcaatctaatgccaacttttagagatgaacaatatattccagcgtttttatttaatatggggctttggaaaagtaagaataatataagcttgatggctggtaaagatattgttagtcagggaataaaatattatagtaacaaagaaataacttttaatgcaggacaagatatttttcttgcctccaaattaataaaagaagccgctccttttttcagtgatattcattacccccaactacaatctaaattattttcagataataaccttattttaaatgccgcgcgtgatattgatttaagttcaacagtattaaattcaaaagataaaatcattgtattagcgggtagaaatataaaactgggtgcaaatgcttattccgccatcgaagatccccacgaagatgcgcaagacattcaatataccaccacatccattatgggaaataaaggtatttctattgcatcatcaggctcactcacaacagaaggaagttcacttaaatcagagggggatattgctatttccagtggtggcaatatccaattgggatcagtaagaacacattttcgtaaagagtcggactcagagttagaagaacttcgtaaacaagtcagtactgaaattaatagcggtaatcatctaacactattatctgagggcagtattttatttcaggcctctcaattggctgctaataaaaagatggatattgctgctaaaggtggatttctttatgcacaggcaatggaagaatccagttactatgaagaagaaaagaaaaaatgtaattggtggacactgtgtgcgactaaaaagaaatataccaaaacatttaataacacaacgaataaagttaccgagtttattgctaatgacgatattaatttaattgctaaagatgatatcactttagaagcaagcaaattagagacagcaaagaatgccaaattaaccagtaaaacaggaggcattaattttaaagcggtgaaagatactgcttttaaacaagttattactcgttcaaaagatatatatatcactcaacgtaatcagggatacaccaagggaacatggctattacctgaactctatattggcgtggcggaaagctga

SEQ ID NO: 312738 - DNA, 1641 bp, Proteus mirabilis; identical to SEQ ID NO: 300602

SEQ ID NO: 312739 - DNA, 567 bp, Proteus mirabilis
gtgaataacactgctataaataccgcctctttaagttggaatgaacttggtactccgatttcaaaacagtttgatgacatctatttttccaaccaagatggtcttgaagaaactcgacatgtattcctacatggaaatcattttccatctcgttttggtacacatgtacgctctgagtgcgttatagcagaaaccggatttggcacaggattaaactttttaacactgtggcaagccttcgagcaatttcgtcatcactcacctgatgcgtcattaaagcgtttacattatgtcagttttgaaaaatttcctctgactaaagctgatttgcaaacagcccatagccattggccagaactagcacaatattcaacagcgctttgtgcacagtggcctttacctattgccggttgtcatcgtcttattcttgctaatggcgcgataacgcttgatttatggttcggtgatatcaatacattactgccacaaactcgccaagctttacataataaagttgatgcgtggtttcttgacggctttgcaccaagtaaaaacccacacaagtaa

SEQ ID NO: 312740 - DNA, 957 bp, Proteus mirabilis
atgaatattattactatttataattatgaaccgttttatgggttttacttatcaactgaacagtatcaacaatgtcatggcactggactacctgcaaatagtactgatatccctccatctatacttatttgtacagaaggttatataccagtattcaaaatgggcaaatgggttattgaaaaagataagttttggagaccagtttataaaaaggtcacttataactcgacattaccttcgggcagctacgaaccaatccaaatatccttaatatcaggtgattttcctacatatccaaatttaccacaaatttgcaatagtaatttggtatgcatgctgataggtcaaaaagtgagagctgcacaagcgaaatatcaagaagcttgtgattattattattcgatagtaaataccaatgaattactccatatccctgttgatggtccaaaagaaagtttgtcaaaattttgtacgactccaacagtaatataccaatatcattttcttgttgaagaaatggtcatgtatatgcgtagtgctatagacaacttagttcagcttacatatgtacttacaaactttgaggaatacatagaaacgatgaaagttaaactagataaaattggtagacttggaacaattgaagaggctatcactgatctagaaaaaattttcattggtgacaatggaatatataaaagtgaccctagctctgtgagttttttatgggttattaatcagttatctaatagtatgaaacactcgatgatgcacgcggaagtatacaaccagctaggcaatgaccgtccaactatagtttcctattatgcagattataatgaccataaacgagtaattatgcatcatctacatgatctagaacaaatgatgttaggctttcaaagaacagtgttacgcattttggaaaatcaaaaaacttatgtaacacaattataa

SEQ ID NO: 312741 - DNA, 264 bp, Proteus mirabilis
atgtcgtggggaatagaaatatatgaaaaagggaaaccaataaaaatcacagggcgttcgtttatttttgaccaaatagcggtcactcaaaatggcagtaaaacttataataatattcctaaagggcggtcattggccgcctatattgtagctagaaatcgaggatcttatttcactgttagagtcgagaataataaaatctcgtggaattctctacgtggtagtcaatcgattaatggaattattatggtactaattaaatga

SEQ ID NO: 312742 - DNA, 252 bp, Proteus mirabilis
atgaagtttattgttttaattacagcattattattgtcagggtgtacctctggatataagaaagttgattgccaaggtgtttaccaaataaaaacttttcattatcaacaacctgtattagtaaagtttgataaaaagagagaaaccattaaagggcctctttatcatgctgtacctcaattaggatttaaattcttgggaggatgggtatctcctgatgccgtagaggatttctcatgtcgtggggaatag

SEQ ID NO: 312743 - DNA, 2415 bp, Proteus mirabilis
ttggggattagtgggctggaatttcgtattgccgaatggtcatttcatgcattagacggtgtggctttaacgttggaagaggatggtgcctatctatatgaagatgtgattggcaagccttttgagcgtccgccgtttgtgagtttgcccactggtggtgtagcagcaccgattaatctgacctttgttccacttgccgtcagtgacatcgtacaaggtacactttcttggcagaatgttgctactgatgtgcgctataacaccgtcactattcttcaagaaggcaacgttattcaatctattcaggtgccagctgaacgtgttgatattaacggattagcgcgagggacttatcgtgttgaagttagggcgacaaatgtggctggcgcgatgtcggcacccgctatcagtgattttgccattcaagcaccaccgcctcctgagcatattgatgtcacctctggcttatttaatctgaccattgcaccgaaacaaggcgatagtgctgtctttggttatacctttgaattttggtttagtgaggaaaagctcgctaatctttctgaaaatgaagtgatcaccaaaacaaataaagttggccaagggaatttctggacgcaagagaatttaaaagcaggacatacctattatttttatgttcgaacaatcaacagctatggtaaatcaccttttgtggaagcttcggggacttgctcttctcaaaccgatttaattcttgaggaattagcggggcaaattagccgagatcaactcgcacaagacctattgggtgaaattaacagcaaagctgaccaatcagctgttgttgaattaaacacgcaagtgaaagcaaaccatgatgcgattttagcggagcaagttgcgcgaggagctgtaattaaccaagagcaacaagctcgtgctgaagctgataaagcggaggctcaacaacgccaattcttagctacacaacttcgtggtgattataccggcaatgatttatcgaaagtcaccgcaggacttatctccgccgagaaacaagcgcgtgttactggcgaccaagcggaagcgaaagccagacaatcattggaaacacggatgaatggaaatgtttccgcgattaataaatcactagaaaccctcacctcgaaacagcaagcacaaacgcaagagatttcaacgctcaattcaaatttgaaagggaaagccgatagcagtgcggttaatgcgttaaatacccgagtatctaatcttgatggcaaagtgacgtccgcaacctctctggtacaaacgttatccagtaaattagataaagtgaaagccgatttaacggagtctgtggtggtggatttagatttatcaaaactcaatgaaaacacctattatccgattattttgcctttagtgacctctcgtcgttatgcctttaaggtttttagaaccttagggcaatattcagacaataaacccagctatgccactcatagcaccaaaggctttgccatgattgtggaatggcaagccagtggttctggatggggaacccagtctgaaaaccgcattattgataactttgattggaaatggacaaatcaatctcctgtgatgggacctgctcaattaacgaatggttctgtggaatttatttatttgcggggaggggctaaataccaactcactaagcataaaagtgttaaccatcaaattatcaccagcacttacaccaataacaaacaatcggtagcgccgaaagggtttgtggcgaatgaagtacctaagtccagcgaacagacagccaatgcaacggcgaatgcggtaagccaactcgaaaccaaagtgaccgaggtttcaggtaaagtgacttctaccgcccagcaagtcactcgcctagaaagccaagtgggtacaagttcagccaaaatcgaacaaacgtcgaaagtggtcacagacataaatggcaaaatttcggcatcatggacaatgaaagtccaacaagatagcaaagggaataaagtcattactggcattggcttaggatttaatgcgcaaggaaatagccaatttctggttaatgcccaaaactttgcagtgatatcgtcattaaacggcaaagtggtgacaccgtttgtgatccaaaatggacaagcttttttcaatgatgcgttatttagcaaggcaactattgataaattatcagtaggtaaaaaaatcacatccactaattattcagcgggcaagaaaggatttaatattgatgccacaacagggaatgtggaattaaatgatgcagtatttcgtggacggttagatattaactcaggaggaacaaaagggcggttagtgatcacgaataatactatttatgtttacgatgaaaacaatcagttagcggcaaaaataggttatttagggtag

SEQ ID NO: 312744 - DNA, 1362 bp, Proteus mirabilis
atgaaccgtaaaaacctgtttactcgcacagctctcgctgccattgtaggaacactttcctcttatgcaagcgctgccggttttcagttaaatgaatattcaacttcagcactaggtcgtgctttttcaggagaaggcgttattgcagatgatgcgagtgtaggtagtcgaaaccctgccgcattgaccatgtttgatcgtcctgagttttccattggtgctatccatattaatcccagtgttgatattaaaggtaaatccccactctctggcgccagcactaatgccggcgatatcgccccaagtgctttagtccccaatattcactttgttgcgcctatcaacgataaatgggcaattggtgcatcaggtactactaactttggtttagctaccgactttaaaaaagattacccagcaggtttaattggcggcaaaactgatttaaaaaccatgaacttaaatttaagtgcaggttatcgggttaataaacaatttagtgtcggtttaggcttaaatgcgctctatgctgatgctgaaattacccgccatgtaggtgaagccggtaagctattgggtggtgccttatctcaacatccagatattaactatcagggattagaccgttatttatcaagcttatcgccaagtgatcgctttgcacaattaaaaggggatgcttggggctttggctggaacgccggtttattatatgagtttgatgaagataaccgtatcagcttcacttatcgctctaaagtaaaagtgaaatttaaagatggtgagtaccaaagtgatatccgctcattacccgcactagaaggtatgggagtgattggtactaatggagacaccatcaaaggtaaacttgatcttaacctaccggagatttgggaatttgccgcttaccaccgtgtcgcccctaaatgggctgtccattataatttagcttataccagttggagtgagtttaaagagttaagagcaacacgtaaaagtgatggccagcaactcttcaacaaagaagaaggcttccgtgatgcatggcgtattgcattaggaaccacttattaccatgatgataattggacattccgcaccggtattgcctttgatgatagtcctgttcctgctgataagcgctctatctcgatccctgaccaagatcgcttctggttaagtgcgggggcaacctacgcatttaataaagatatgtctgtggatgttggtttagcctatatgcacggtaagaaagtgacaattaaagagaagctatctgaaagcttaccattgccggcttatgaatttgaatcatcaggtaaagcatggttatacggtatgaactttaactatcgcttctaa

SEQ ID NO: 312745 - DNA, 408 bp, Proteus mirabilis
gtgcattgtccgacggggtgggttgatccgtttgggttgagtggtacttcaaaacttaataatgcatcagttgaaaataacccccgattcttggttgatgctaaaggtcaagttttagatttagagtattttagaaatctaaaatttgatgggcagataattaatgctggaagaagtggtaataagttacctgcaataggagagcctggtacttactctaaaacaacaggcggacatgtaattgtttacggatctgatggtagacgaatggctgacatatctaaggagcgaattaaaattgtcgagtggaataaggatccaagaggacagtatcattatagaactggaagtgatacgaaatttgcaaatagagaaatacccgatgaaattaaaaagttattggagtga

SEQ ID NO: 312746 - DNA, 2280 bp, Proteus mirabilis
atgagtattagtcgtcgttcttttattaaggggatgggtataggatgtgttggttgtacggtgggaagtttaccaccaggggccctcgcacttaatccagtaacatctcttaagggtcagtctaaattaacaccaagtttgtgtgagatgtgttcttaccgttgtcctatagaagctcaggttgttaataacaaaactgtctttatccaaggtaaccgaaattcaccacatcaaaaaactcgagtctgtgcgagaggaggcagtggtgttagccttatttatgatccgaaacgcattgtaaagcccatgaaacgcaaaggccctagaggtgccggagaatgggaagttattagctgggaacaggcttatacagaaattgccgaaaagatggcaagcatcaaacaatattatggtgctgaaagtatctttttttcatcaaaatcaggctctctttcctctcatttatttcatttagcggcggcatttgggtcaccaaacacctttacgcatgcatcaacttgtccagcgggcaaagccattgctgcatcggtaatgatgggtggtgatttaaaaatggatctcgcaaattctaaatatattctttcttttggtcataatctttatgaaggaattgaagttgcagaaacctatgaattaatgacggcacaagagcgtggtgcaaaattagtcagttttgatcctcgattgtctgttgtttccagtaaagcaaatgagtggtttgctatccgaccaggaggcgacttacctgttctaatggccatgtgtcatattatggtaaaagaaaatctttatgataaagattttatagaaaaatttactgtcggtttccctcaattagtggaagtattacaagataccacgcctgaatgggcacaagctcactctgatgttcccgcaaaagatattattcgcataacacgcgaaattgcagctaaagctcctcacgcattagtcatgccaggccatcgcgcaacctttaataaagatgaaattaatatgcgcagaatgatcttcaccttcaacgccctactgggaaatattgaacgtgaaggtggcatgtatcaaaagaaagctgctgcaaaatataataaattagcgggtatcgacgttgcccctgaattagctaaaccaaccgttaaaggcatgcctaaaattacggcaaaacgcgtcgatgctacagcgcctcaatttaaatatatcaataaaggcggcggtattgttcaatctatcattgactccacactccatggtgtaccttaccaaaccaaagcttggattatgtcacgccataatccatttcaaacagtaagttgccgacctgatctagaaaaaacagcccaaaaactcgacttaattgtcagttgtgatgtgtatttaagtgaaagtgcatcttatgcagattatctgttaccagaaagcacttatttagaaagagatgaagagatttctgatgtctctggtttaaatcctgcttatgcattaagacaacaagttgtcgaacctattggtgataccaaaccaagttggttaatttggatggaattaggaaaaaaactggggttagcaagttattatccttgggaaaacatgggagttcgtcaactttatcaagttaaaggggatgaaaatctctataaagagatccaccaaaaaggctatttatcttatggtattccgctacttttacgtgaaccatcctatgtaaaagcctttgttgcacaatacccagatgctatcaaacatgttgatagtaacaatatgatggaaaaatctctttcttttaaatcaccaagtggtcttattgagatctattcggaagagttagaaagtctattagagaattatggtattcctcgtttccataacttcccattaaaacaaaaagatgaactctattttatccaaggaaaagtcgcagtacataccaatggtgcgactcaatatgtacctttattagcagagctaatgtggaaaaatcctgtctggttacatcctgataccgcaaaaagtcatggaattaagcatggtgatgagatcattttagaaaatagcgtaggcaaagaaaaagcccatgccttaattaccacaggtattcgtcctgacacagtgtttgtctatatgggttcaggctctaagaccggcgaaaaaacgccagcaaccacaaatgggatccactgcagtagtttattacctcatgaaattagccctgtttcaggcactgatgtacatacttcaggcgtcaaaattagtctggcttaa

SEQ ID NO: 312747 - DNA, 690 bp, Proteus mirabilis
atggctgttagacctgtttttataccaaaattatctgaaaacatcttatctataacaaaagatatagatttcacttgggctgctggcatggcaaaagtacaaaagcaaaaatcaattagagcattgcatgaagcagctagagctcaaggactaaataatttactggaaatttcaagtaaatcagaagatgaacacggtatagcccttagtgcatttaatcttaaaatcaaaactaaaaagcttggtaaagaatttactgtcgaatcagcatttcaagcaagtaaggtgttcgaaaatggagggccttatgttgacttattagataaagcgtcaagagaatcaaagaaagatataagattaaaagaatcagggaaccttgtaagttttaaattctatagtacaacttggccccttattccacgaacagctttttatgattggttatatttaagtgctctcaatcaaaacaaaaaactagcagaatatttgttaaattttgatggatttactgatattgaatttaatccagccaaatcgataaattgccaagctagagcagctgctttatatgtctctttggtcaagagaaataaattaaaagacgtactatcatcacaaagtagctttttatctaatttatcatctcattacggagtagaaaattattcaatccaacacaatctgatataa

SEQ ID NO: 312748 - DNA, 417 bp, Proteus mirabilis
atgaaacctgcttttattgtttttatagtgactacacttttagctggttgtgccagtatctctactcctgtagtaactgaaaaaaggaacgataatttctcgaaatattcagatcttcaattatgtaaaacgaaaaagcattatgaaatggacgaattgaatgttaatccatcatcccatccagaatacaatgaaaatctgaggcgctataaagctatttcaaatgaaattgataatagaaatacacaaagaatcgtaaattactgctataaattaattaacaaagacctattggataatttaactccagaacaaaaggaaaaattagaactaaccccacgacagaaaagagcaagagcattagccacttgccaagcattaggtggcactaactgcaatcctaattatgaatattag

SEQ ID NO: 312749 - DNA, 255 bp, Proteus mirabilis
atggccagtagaccaagaagaaaggaatttaggcttctacctgactttctgtattacgattcatccaaaaaacagtatcgcttaacactgactaatggtattcgaaaatgcattggtgctgataaagcaaaagctatcgcaatagccagagaatacaacaatattatgcgaccagaaaaatgcgtttctgttaactcattaattattgactcgggagggcaatatggagaggctctccctctctcagaacattga

SEQ ID NO: 312750 - DNA, 255 bp, Proteus mirabilis
atgcagaccgctcaaggagctgtttctttacctatggttcaacgctatgtagaccgtttaattaaaggcgatatagctccaccgataaaagttgatggtaatattattgttgaaggaaatcatagatatgttgcaggtaaagtatttggtaaattgcctgaaacagtacctggtacattatctcctagccaggctgcacgcgttaaaccaatgtctgaaactaaagttgatacttttgattggggaggtaagtaa

SEQ ID NO: 312751 - DNA, 1257 bp, Proteus mirabilis
atgcaaggctacgataaagccttacaagcggaaattgaggcacaactggcacagcaagccaaacggacgtataagcccagccataaatcaaccattgattatgccaaacagtacaccaaaatcttgacggaattagaggaaaaacaagcctcactgattgcggatgggcaaagtattcagcggtatggcactacctcttcctttaatgaatacacatccgccttagccgatatcaaacagaataaagataagtttgatgccatcttaaaaatcgatcccaacgccattgagacgatcaaagaaaaagcgaaagccattgatgacttagcgcgtgccaattcggtcgcgcaatttgcttatgatcgcggtaaagaaattgagcagatgcaatttgaaaccaccctgataggaaaatcacgcgcagagcaagaaaagcttaatgcccttcgtcagattgatgtgctgtatcagcaagccagtgtggatttaggtgagaaagagctggcgaacttacaacgtaatgttgaactcactaaacagcagattgaggaagaactgaggaagcgagaggccatgaaaggtgatccgatggtgggattaaaacaaggcttatcggatttcagtgagtcagccatggatgtgatggagaacgtcagaaacgtcactaccaatgcgcttaataatatgtctgatgcgttagccgattttgctttaacggggaaaggaagctttaaagattttgccaatgcggtgatctccgatatcactcgaatggtgatgaaaatgctggctttcaaagccattgaagcaggcgggcaggcaatgggctttgatatgggatggatgagcaaagggcatgcttatggtggctatacggggcatggcgggaaattcgaacctaaagggattgtacatggtggcgagtttgtttttaccaaagaagcgacggctaaattgggtgtcggcaatctctatcgcttaatgcatgcggcgcaaggttatgcttcggggggctttgtgggggcggtcgcagggcgaataccgattacaccgcaaccgacgttagcccgtgcaggcggggtgcaaatgacggtcgttaatcatattacggtgacaggaaatggtgacgctgtacttgcgcaggcaatgaaagaagccgcacaacaagggacagaagcaggcgcacagaaagctcacgcgatgatgttacaagactttcaaagtaatggcgcagcacgcagaacattaggagtttaa

SEQ ID NO: 312752 - DNA, 603 bp, Proteus mirabilis
atggacgacgtacaaagacattttcttaatttgacaaaagaacaagaaatgatggctatagcattggatcatggtctttctgctatgagggatgttgctaaggatacattaaatacaataggagatgcatccaatcgtattttaagattaggatatagttatgtatttgatgagcaagagtttaatacaattcttgatgaagataaacgtttaactatggccatatggcagtttacagaaaataaaaatccgctacaagatgttatccaaacctatttagatttaacgttaagaaataaaacggaaaaagaagtatctgatatttattcaataatagaaaaatctattggtttgaaaagagtaaaagctctttcaaatgtacttttagctgttggaggtatttatggaaggtcagagcaagctgcttttgttgcacaacaactaaagatagtttatcccgagtattattacgctttgtataataaaggaatagaaatgctctattttattccaaaaccaaagatggataaaggaatttatgtggtggatggttattcatcctcttccgatattatgaatgctatattagatatgctagtttaa

SEQ ID NO: 312753 - DNA, 687 bp, Proteus mirabilis
atgaaaaaattgctatttagtcttgctacgctgattgtaatgtcaacaccagcattagctactccaccaggcgctaacttaaaaataaatggtgatattactccccctacttgcaccgttaatgctggtgataatgatattattattgattatggtgtaatatccccctcttttattcctgctgaggaaaattacgcactaggagctaagagtgccaatatcaaaatatcctgtgacgcaagcaattatttaacacttaaggtatcagatacttataaaacaagttcaacagattcagcgaaaattagcgtttttggattagttaatgcaaaaaatacagaacaagagattggtggatatataattgatgtcattgatatcaaagttgataataaacgagcttatttaggaagagtggcagataagatttggactggatcgtccgcaactatttttaaagataccttaacagcgttaactagtgaacctcaatcccaggttgataaaaacaatttaaaacttatagctggaaaagtgtttaatgcaaaaatacaaataggaacttataacgaaagtaggtatgcgtatattttatcaagaaaaaaattggcacaaaacaatatcgatttaactgatggaattgattatataggtgaagctgtttttacttttaactttggtgtctaa

SEQ ID NO: 312754 - DNA, 210 bp, Proteus mirabilis
atgccttatcaagggcgagaatattttcaagctcagcaagtacaaagtgaggccacaacgcgaattcttattcgctatattgctgatattgatacctcgatgcgtattgtatggggtaagcgactatttaatattatttcgattattgacccttatgagcgtcatcgtgagcttcaattaatgtgcaaagagggcgtgaatgatgggtga

SEQ ID NO: 312755 - DNA, 207 bp, Proteus mirabilis
atgaaggctgactacggaggtagccatacaccaaaggaattgcgtgatagatggcaaactcccctacctttattcacggcactggacgctgaatttggtttttatttagatgccgctgccgataaaaataatgccctctgttctcattacctcaccgaaaaagacgactcgttaaattgcgactgggaaagttatggtgctatttag

SEQ ID NO: 312756 - DNA, 288 bp, Proteus mirabilis
atggataaatcaagacggcagtttgaagagtttattaagtttcacatggacgacgcagaaataaataataaattagaaacagcaaataacggattaaattacgctgaccaatatgtagatttaatgtggattagctggcaagcatcacgcgactcactcgtattagacctaccagaaagagaaaagaataaaggaaattatgattttttcactgatggatataacagtggaatatcagcatgtgaaatttcattattagataacggagtgaaaataaaaaatgaataa

SEQ ID NO: 312757 - DNA, 540 bp, Proteus mirabilis
atgtctgaagaaaaaggaattatcgggaaaataaccagtgctgtttctggtgctggggattatttaaaatcggcttttggcgtagcaaaagaaattcaagaaatgcatgttgattattccgttaaaatcaaaactgaggagctgcttagtaagcttcttgatgctagaagtcagcaaatgaaccttcaagatttattaatatctgctaaggatagaattattgaactcgacaaccttatcaagcaaaaagaagattgggcggtcgaggcatctaaatataagcttctgaaaacggaagctggtagctttgtttatacgacgattgaatcttccgatgatgatcaggactctccctatttttgtccccattgttacagcaaaaaagagatatcgctgcttcatcctagtactggtaatacgtccaagggtggtttttatctttatcaatgccataactgtaattccgaatttaaaatgaatagaactccctttcatggaggagctacccctaatccattaatgccgacaaaaaggtattaa

SEQ ID NO: 312758 - DNA, 303 bp, Proteus mirabilis
atgagttttcaggatttatcaccagaatcgcaacaaatagcgagagaaacgcttgctgaaatattaaagcttgaacgtgaacatgcatatgacctatctgatggtcagtccaaagatatagctaagtttgtaaaagatgctttcattgaactggaaaaggtcaacgccatacaaaacggacaaactttgatatcacagaatctccagctaagtacaggtgcactggggattcagcaaggtgctggaattgccatgatggataccgacgcagcgaacaagctgagaaagaaaggaatgctttag

SEQ ID NO: 312759 - DNA, 348 bp, Proteus mirabilis
atgccaaaatacttattaccttttttaataactataccaatttacgctaatgcatatttccttgatgggaataagttagattcatatacagcatcattggacaaatcaaataatggagaagttctatctattcaacaggttatagattcatctacttttttaggttatgttgctggtgtttttgattctggcattggtatctatttttgcccaaaaagtaacctggagtacaaacaggtaactgatatagtgactatttatttaagatatcatcctgaaaagcgcaatgaaaaggcatccgacttggttattcaatcattgtcagaaagattcccctgtaagaaataa

SEQ ID NO: 312760 - DNA, 348 bp, Proteus mirabilis
atggaactatcaaaaactatcaaagttgaatgttcgtcaaatgaattgatgagcttctatctaaaacaaatgtattcagtcggaaataacggactggcaaaaatgctaggcgttcatccatcaacttcaagtcgtgataaaaatcgaatatttgagcttgcttgcaaagcaataacagagcttggattaccacctgattcagtcgctattagtgagaaaccaacaaaggttgtcattgagggtgattacgcagagagattgattcagatgcttgaagggaagggaaagattaaaagaaaagccccagcggtaactgaggcttctcaacaaatggacttaaccatttag

SEQ ID NO: 312761 - DNA, 372 bp, Proteus mirabilis
atgaaacttaaaaatattttagatgccacgcagtgcggggctaactggctatttttaatatatcagcgtccataccttaaagagtgggacgattatctgaattacctgatcgacgaatgcagtgttgtggaagagtgtagttgcacaatcacatttaatgatagaggtgaaaaagtaaaggtttggaaagaaaataaatactacgcatatggtcatcaatacgggactggccttgacgaggagtatgagttcagaccgtcattcataacgatgattaaattatcaaaccttgttgataatcgtgaacataatcgcaagcaaaatagagtgaatgctttcgccaatgagttaaggcagaaggtgagaaaatga

SEQ ID NO: 312762 - DNA, 633 bp, Proteus mirabilis
atggctcaaaataaaccaacgctcacagatgagcagaaagttctttttgatgccctaacaaagttacaacagaaattcgtgttaggcatcttgaaaggactcaatcaaatagatgcttacaagcaagctggctacaaggcaaagactgacgacacagcatactcatcagcaagtgagatcctaagaaatcctaaggttaaatcgttcttagatgcaatgaatgaggtagccatttctaatgcgattatgagccgtgaggaagctctagagagactttcttctatcggacgtagctcagtatcagaaatggttgaattcagtgagcataagatggggactgatgacgacggcaatccagttattcaatctgtgtggagatttaaagactctgcattgcaagaccctaaagcactagcggcaatatctgaactcacagcaagtaaagatggcatcaaattaaaacttcatgatcctaaagctgcgattaaacaactggctgatatgcagggttgggaagctccgaagaaaacagagctcactggtaaaaatggtgggccaatagaagcgttagctttaaccaaagatgagtataagaacgctcggcaggagatgctaaatgaggacgactgttga

SEQ ID NO: 312763 - DNA, 1488 bp, Proteus mirabilis
atgaggacgactgttgagcaaagaaactttgcacgcaagttagagtgtgaagaaagcgggctgtacttctctcgatacttcttcaaacaacgcactggcgggaagatgatagttgcacctcatcaccacgcaatacagaacgcgctggatagagttattagtggagagattacaaggctaattattaatgttcctcctggttacacaaaaacagaactcgcaaccattaacatgatggggcgaggcatggcgataaataatcgcgcccgttttatgcatctctcatactctcataacctagcattactcaactcgtcaacaacaagaagtatgattaagtcacaagcattccaatctatgtggccaatgactttgcgcgatgatgctgacagcaaggccatgtggtggaatgattttggcggcggcgtttatgcctcatcagcagcagggcaggtaacaggttttcgagctggtcatatggagtctggctggcaaggtgcgctaatcatagatgatcctgtaaaaccagatgatgcgtacagcgagactgttcgtgatggtgtaaataatcggtttaacgaaacaatcaaatcacgattagccattgaaacaacaccgatgattgtgatcatgcaacgcattcattatcacgatttgagcggatatctactacgtggtggctctggtgagaaatggcatcacctttacttaccagtgttcatagataactcgcaatcgtatcaagagttatttcctgaaaatacgcatgctatacccattgagcatggacttgatgatggctggctgtgggagtttaagcataacgaatctcacaggtctgctttagagtcacaccgtagaacatttgaagcgcagtatatgcaacggcctcgtagatttaacgaggaaggagccctgtggaatgagcaaatgatcgccgcggctcgtgagttgaacatcatagagaagttagctcgaaccgtggtggctattgacccgcaagccacaaactcagatgagagtgacgaaactggtattgccgttgcaagcgcatacggcggtggagataagcgacagtttacaattgatggtgattacagcggtaaatactcacctaatgggtgggcgacaaaagcgatatgggcttatgaacatcataaggctgacgcaatagtcattgaaactaaccaaggcggcgatatggctgaggaaaccttggttaacgctggatttaaagggagagtaataaggattcacgctagtaaggggaagtttgcccgtgcagagccgatatcagccttatatgcacaaggtagagtttgccatagtggaaacttatttaagctagaaaaccagatgatggaatatgttccgcaaactgccaagaagtcaccagataggcttgacgctgctgtttatgctctgactgaattaagcgaaccgtcagctattggcatgattgttccaaaacgattactgaggcgataa

SEQ ID NO: 312764 - DNA, 537 bp, Proteus mirabilis
ttgcatctattacgtaagtcaaatgctatcttatttgagtggttacaatcacctattgtttatcaacaatatgctggtatccaaaaagaactatttgagttggcacaattatattatcaaccccaaatcattgttcatcattatagagggatcgcaaaagccgttagtagacatcattttgaagagagtcatgcaagtaaagcgatagatgagcccataaaattaaaaaaatatttctatctattacgttcacttttagctgcttattggacagtaaaaacggggaatatcccaccgatggaacttaatcagctaataaatatattaactacagatgagcaaataattattcgagagttagtgagctttaaagcagataaagatgaacactttacttggctaccaaccgataatatgcaaaaactgatcacttttttatggcaagaaacagcaactcaattagcgaaacgcaccgtaccagatagtgaaatattaaataattggtttaggaaaatacttgatgaaactgaccattga

SEQ ID NO: 312765 - DNA, 1419 bp, Proteus mirabilis
atgagtaaaataaaaacccgttttgcaccaagtcctacaggctatctacatgttggtggtgctcgtactgcactgtattcctggttatttagccgtcacaacaagggtgagtttgtactgcgtattgaagacaccgatttagaacgttctactcaacctgccattgatgcaattatggacggtatgaattggttaaatctaaactgggatgaaggtccttactatcaaaccaaacgctttgatcgttataatcaagttatcgatcaaatgttagcagctggtactgcttatcgttgttattgttctaaagaacgtttagagaaactacgtgaagatcaaatggcgaaaggtgagaaacctcgctacgatggttgttgccgtcacggtgatcacaaccataccccagatgaacctcatgtagttcgttttttaaatcctcaagaaggatctgtgatttttgatgacaaaattcgtggcccgattgagtttagtaaccaagagcttgatgacttaattatccgtcgtactgatggttcgcctacctataatttctgtgtagtgattgatgactgggatatggaaattacacacgttattcgtggtgaagatcatatcaacaataccccacgtcagatcaatatattaaaagcacttggtgctccagtacctgaatatgcacacgtatccatgatcttaggtgatgatggtaaaaaattatctaaacgctataacgcagtaagtgtaatgcaatatcgtgatgacggttatttaccagaagcgttattaaattacttagtacgtttaggttggtctcatggcgaccaagagatctttagcatcgatgaaatgattaaagatttcactttagaagctattagtaaatcagcaagtgcatttaatactgacaaattactttggttaaaccatcactatattaataccttacctgctgaacaagtagccgtacacctagattggcatatcaaacaacaaaatattgatactagtaatggcccatcactggttgaattgattaaattactcggcgagcgttgcaaaacattaaaagagatggcggaaagttgtcactacttttatgttgactttgatagtttcgaagaaaccgcggcgaaaaaacacttacgtcctgtcgctcgtcaaccattagaagtagttcgtgataaattatcagcaattactgattggacagcggaaaatgtacataaagcaatccaagaaaccgctgaagaattagaagttggtatgggtaaagtcggtatgcctctacgtgttgctgtcacaggtgcgggtcaatctcctgcactagatgttactgttcatgctattggtaaagctcgtagcatcgctcgtattaataaagcattagattttattactgacagagaaaatcaagcttaa

SEQ ID NO: 312766 - DNA, 387 bp, Proteus mirabilis
gtgttgcatacctttaaatggatgggctatattgttggcgcgttagcaaaatctaacgtcaggcgtggaaacctgaaaatgtacaaggcgacaatagacgccacatgcgtctttttttatgtcgttgataatgcctaccttatggcgaattccgcctatacagattctatggtggcgttattggagcacccgaaagggtggctggttaccttgtacaccagtatttccacctctgataacgtcaccgcccctattgagcgtggaaactcttgcggtgactcctttattaagtacaaggagatcatcatcatgatggctatccctaccataactcaatttaaattcctctgcgcacaggaggaaatgcacaatgaaacacattattaa

SEQ ID NO: 312767 - DNA, 231 bp, Proteus mirabilis
atgaaacacattattaatcgcaatgtcgtgttatctcaagaaggcgaaagaacacttatacgcaccgctcaagcgactgcctttatatccgatttactcattagtcatagtatgacaggaagcgagctagtttcttgtgagggtatgactgcactgatggaatgcctttctgaacaaatggaatccattattcaagaaagcagtttaatgaatgaggagatcaagtcatga

SEQ ID NO: 312768 - DNA, 402 bp, Proteus mirabilis
atgcaagcaatgggggaatgtttgctacttatcggattaattgcctcatttgttactaatatcaagccacaagaagcgttacatttaggggcatatatttcgatagcgagagtattaatgccagcccttgcaggagctattatcaatacttatttgaggatctcatatgatactcattatgatttgttaagaggatacatacaaactggtgagcaaaaattagcagggaatattgctgaacattatcaaacaacgatggcattagtaataagagaagcacatgttgcctcttttattgatggttttgatttgattatgctcttggttattttaggtgctctttgtatgtcatttttaaaatcgtcaccagaaaatccggtagtcccaaggctagtaaaataa

SEQ ID NO: 312769 - DNA, 585 bp, Proteus mirabilis
atgagtttttacgccacaattattctcgcccttgctctttctatggacgcatttgccgtcgctgtctgtaaaggcgccaccttacataaacctcattttcgtgaagccctccgcaccggttttatctttggtattattgaagcaagcaccccgattattggttgggcattaggtttatataccagtcaatatattattcagtgggatcactgggtcgcctttggtttattggttatcttaggtggacgaatgatttatcagagtttaaagcgtggtgatgattgcatttgtgaagaggctcctcaacgtcacggttcactctctttaattgcgacaggtattgccaccagccttgatgcgatggcaattggtgtcggcttagcctttctacaagtcgatattgtccataccgcgatgaccatcggtatgatgaccatgattatggcaacactgggtatgctgatcggtcgctatattggccctgtgcttggcaaaaaagctgaaattatcgggggtatggtgttgattgctatcggctttaatattctttttgaacatcttgatctgtttatgtacgcacattaa

SEQ ID NO: 312770 - DNA, 204 bp, Proteus mirabilis; identical to SEQ ID NO: 295343

SEQ ID NO: 312771 - DNA, 339 bp, Proteus mirabilis
  misc_feature (266)..(275): n is a, c, g, or t
atggtcatacgtcctaatcaacactggttttttcggttatttgattggcacggttcagtgctatcaaaaataatctttcgcttatgtcttaatattgcaatgtctattatcgctattttggtttatcaatggtatgagttattaggtattcatttaactgttgccccatttagtttattaggtattgctatcgcaatatttcttggttttagaaataatgcaagttatagccgacttgtggaggcaaggacattatggggaaatannnnnnnnnngaaatatgttaattacccatcgcaacatattaagaaatataaaagccttattaccggaagataa

SEQ ID NO: 312772 - DNA, 657 bp, Proteus mirabilis
atgttaattacccatcgcaacatattaagaaatataaaagccttattaccggaagataaacaatttaatcgtgacttttctaatctacttattgcttttagttggagtctaaaacatgagctaagaaaaacaaacccaatggtcgatctctatcgcctcttaccccgacctttatttgatgagataatgaatagcccttaccccactaatcggattttattgcatattggcctaaaaattggcgaattgcgagataacaaagtaataagtgatgttatctttcaatcaattaataaagatattaataacttatctgatgtattgggtggctgtgaacgtatttcaaatactcctgtaccttttgcctatacgctcatattgcaacgtacggtatatctattctgtgctctgctaccttttgcattggttgccgatctccactatatgacgccatttgtttccgtatttatctcttatacttttttatcttgggactcattagctgaagagttagaagatccattcggtgtttctgccaatgacttaccattaaatgcaatatgtaacaccatagaaaggaatttattagagatgcaagatatcaccccactccccatcaaagttaaacccgaccaattaacacagggtgaaaaataa

SEQ ID NO: 312773 - DNA, 354 bp, Proteus mirabilis; identical to SEQ ID NO: 305289

SEQ ID NO: 312774 - DNA, 1128 bp, Proteus mirabilis
  misc_feature (889)..(898): n is a, c, g, or t
ttgtcaggccaatcatctataaaacagcgtccgttagttatcggccttgtggctggtgaaacgtccggtgatatcttgggcgcgggattaatccgcgctcttaaacaaatgcatcccaatattcgttttgttggtgtcgcaggtcctttgatgcaagcagaaggttgtgaagcttggtatgaaatggaagagcttgcggtgatggggatcgtggaagtacttgaacgtttgccacgattattgaagatcagaaaagatctcactcaacgctttacacaacttaagccagatgtttttgttggtattgatgctcctgattttaatatcacccttgaaggtcgcttaaaacaaaaagggttgaaaactatccattatgtcagtccatcagtatgggcttggcgtcaaaaacgggtttttaaaattggtaaagcaacggatttggttttagctttccttccttttgaaaaagcgttttacgataaatatcaggttccttgtcgctttatcggtcatacaatggctgatgcaattgcgttacaccctgataaaaaagcggctcgtgaacacctaggtattgatcaagaggcaatctgtttagctctgctaccaggaagtcggcattctgaagtggaaatgctcagtgcggactttataaaaacagcgcagcgattaaagcaacagatccccgcattacatattgttgtccctttggtaaatgcgaagcaacgggcacaatttgaacaaatacatcaaagtgttgccccaaaacttgaaatccaactcttagatggacaagcaagagaggcgatgaccgccagtgatgcgactttattagcatctggtacagccgccttagaatgcatgttaacgaaatgcccgatggtagtgnnnnnnnnnnaaacgccctatgtctctttacccaatttattagcgggacgggaaataattaaagagttgctgcaagaagagtgcacaccagaagcactggcagaacaattactccccctattaacggatgcggaaaaagcacaacacttaaaagagatatttttacaattacactcagctatccgttgtcgtgctgatgagcaagcagcgaatgcagttttagaattagcaggtcaataa

SEQ ID NO: 312775 - DNA, 699 bp, Proteus mirabilis; identical to SEQ ID NO: 17390

SEQ ID NO: 312776 - DNA, 189 bp, Proteus mirabilis; identical to SEQ ID NO: 17389

SEQ ID NO: 312777 - DNA, 825 bp, Proteus mirabilis; identical to SEQ ID NO: 17388

SEQ ID NO: 312778 - DNA, 1008 bp, Proteus mirabilis; identical to SEQ ID NO: 17387

SEQ ID NO: 312779 - DNA, 984 bp, Proteus mirabilis; identical to SEQ ID NO: 17380

SEQ ID NO: 312780 - DNA, 909 bp, Proteus mirabilis; identical to SEQ ID NO: 17379

SEQ ID NO: 312781 - DNA, 423 bp, Proteus mirabilis
ttgctacacaattccggaaaattccagcacttagatgatattttttcccgcaaaatcaattacttaactgtccgacaaacgtatagtttcgggacagagatattcgcccaatctcttgtttttctggaagttttcttaaggaaatttaggagagaaagactgtccaacaaacgtctatttcgggacaaaaaaaatgcccaccaaagtgggcatttcgcgacaaaatgcaggtctcaaggctccgaatcagtccttgaggcggggcttcctgattgtccactcatcgatcatgtccgcccaatcctgaagcattgcccggcgctgatcgcggtactcggccttgttgtagacggcgcgaacccccttctgttcgtgcgcaaggcacttctcgatccagtcagtgttatagcccgcctcatgtag

SEQ ID NO: 312782 - DNA, 282 bp, Proteus mirabilis
gtgcttattaaatctagtttttttatcacattaatatcactatttataagtattgttgttttttacttagaaacagttcatgagtttttctttaaactttatccctatttaatcaatatgattgtttggtattttaatggatatcaagttattaattataaatatacttcagtaatggttactgattttttatttatatcctatgtcatacacttcatttttattattcctatcattgcatatatactggattacactttccgttttaaaataaaaaagtga

SEQ ID NO: 312783 - DNA, 1743 bp, Proteus mirabilis
gtgccgagatactccgttatctacgttctctgtctgtcttctataacgtcttttgcttatggggcaaatttacgtttaaaagtagaaggtttagaagggcaactcgaaaagaatgtacgagtccagctatcaaacataacaacagaagaagttgcaccagacgggcgttttcgtgcgcgtgttgaaaaggcaattaaagagggcctacggcctttaggttattatcagccaacggtcactttctcttatcaagaaaatacccctccgacacgccctgtattaacagcaaaggttgagcttggtattcccgtactgttaaaaggggtcaatattgtactggaagggggagctaaaacagatgaacaatatgccaaagtgattaaagagaacaccccccctcttgatagtgtgttaaatcatgccgaatatgaaaaattaaaaggctcgttaacagggcttgctattcgtcgtggttactttgatgcagatatggaaaaaagccagctcggtgtctctttagataatcacgcctcttattgggattttgtctttaatagtggtgaacgttaccgttttggtaaagtgaattatactggctcacaaattcgtgaagactacctacaaaatattgtgccttttaaagaaggggaatattactcttctgaagatttggcagagtttaatcgacgcttagctgccacaggatggtttaattcggcggttgtcacacctaatatcgctaaagcacgtagtgaaggcaattatttgctaccaatggatgccgttgttacccctcgttcacgtaactatatggagctagggggcggttttgccacagatgtcggacctcgattaaatatgcagtgggataaaccttggataaattctaggggccatagtttaacatcgaatatgagtatttctaagcctgagcaatctattggtgctaattataaaattccattaaaagttaacccattagaacaatattatggcattcaaggcggctataaacgtacagatttaaatgatactcgttcggataccaccacactgaacgtttctcgtaactgggatatgtcaacgggatggcaatacagtattaatacccgctggagtctgagccactttacccaaggtgatgttaccaatacaaccatgttgctttatcctggtgcgaatgcaagtcgcgtacgccaacggggtggcatgatgccttattggggggatagccaacgttattcagtcgattattccaataaaatatggggatctgatgttgaatttctcgccctacaagctcagcaagtgtggatacgcacaccttgggaaggccaccgttttgtggtcagagggacgtttggctggattgaaacgaatcaatttgagaaagtaccacccgaattacgtttctttgctggtggcgatagaagtattaggggttataaataccaaagtatttcaccggaagatagcaaaggtaaattaacaggggcatcaagaatgctaacgggatctgctgaataccaatataacgtaactggaaattggtggggagctgtatttgttgatagtggtgaagccgttaacgattttacgaaaagtgattttaaaacaggtgctggtgcgggggttcgttgggcatctccagtagggcctgtaaagtttgatttagccgttccagtcaatagtggtgaagagcgtaagttacagttttatattgggttaggagctgagttatga

SEQ ID NO: 312784 - DNA, 621 bp, Proteus mirabilis
atgtcaaaaccatcatttgattctattgaatcgcaggcaagttacggtattggtctgcaagtcggtcaacaactgactgaatcaggtctccaaggattagagccagcagcactgcttgccggcttgactgacgcgttagaaggcaatactccttctgtacctgttgaaacgttacacaatgctttacgtactatgcatgagcgtgctgaagcagttcgtcaagagcgtcaagcagcactggcagaagcaggtaaagtattcttagcagaaaatgtaaaaaaagaaggcgtgcaggttactgaatctggtttacagtacaaagtactgaaagcaggagatggcgctattccagctcgtactgatcatgttcgtgtgcattatactggtcgtttaatcgatggtacggtatttgatagctcagtacagcgtggtcagccagcagaattccctgttaatggggtgattgcaggatggattgaagcattaaccttgatgccagtaggctctaaatgggaattatatattccttaccaattagcttatggtgaacgtggtgcgggggcggctattcctccttttgcaacattagttttcgaagtagaactattagaaattttataa

SEQ ID NO: 312785 - DNA, 660 bp, Proteus mirabilis
atgttgatctatgttttacctgaatatcaatctttatacagtgcatttaatactgagctaccgatgctaacattaaccttaattagatgttctcaatggttttctcaatatagtttaattatcctgctgtttatattaataatttcttatagctattacactattaaacaccatagtgctaaatttcgcgacattgaacaacgatgttggcttaatcttccttacttgggggtcttattaagatatcaccagctacatattatttttcagataatgacgattacacaacaagctggattaccactgttacaggggttaaaaattattacagagcaattaacgcattcactgtatcaacgagcactcactgatatgatagcgcatattactcaaggcaaatcacttagctcatttatgcgacataatcctctattcccgccaatctgttatcaattgatctcttcagcagaaaattctggacaactacagtttttttgccagcaacttacccactggttttatcatcaattagaagaacgtcttgatagtgtaaaaacatggcttgagcctattttaatgacactgatcgcattgattactggcacgcttattattgcgatgtatcttccggtgttacaactaggtgataccatacattga

SEQ ID NO: 312786 - DNA, 306 bp, Proteus mirabilis
  misc_feature (41)..(50): n is a, c, g, or t
ttgcagcgcctaaagctgaatttgttgatcggtatgttcannnnnnnnnngggttttagagagacaagtaaattactaaaagtgaaagagaacttctttagagagtttctactttcaaaacgaattatgtacaagttggctggaaaattaacaccttattcagagcatcttgacgcagggcgttttgatgtaaaaacaggtgagaatcaaatcaacggtcacgcatacacacaagttaaatttacacccaaaggaattcagtggatcgctgggttactggctagagagcaattggaggcagcatga

SEQ ID NO: 312787 - DNA, 513 bp, Proteus mirabilis
  misc_feature (488)..(497): n is a, c, g, or t
atgagtaaaattatggagttaatcggcactatttttcgatttagttggcaggcgattaactttatcaggaaactaatcttaaacgttattttcttctttctactttttatgggtgtgggactctatttcatcgtccaagaaacgcaaaaacctaccgattatcaaggtgcattactggttgatttaaaaggcgttattgttgaccaaacagctaaccaaaatcctttagggcaaatgagccgagagcttttgggtgtttcgggtagccagttacaagaaaattcgttattcgaagtcgttgataccttacgcaaagcagcgactgaccccaaaattaaaggaatggtactaaaacttgacgaatttgctggggcagaccaaccttcactcaattatgttggtaaagcgctgactgaatttaaaaaaacaggtaaacctatctatgcgattagtggttattatagccaaccgcaatattacttagcctnnnnnnnnnngataaaatttatttag

SEQ ID NO: 312788 - DNA, 732 bp, Proteus mirabilis
atgtctgatattctacttggcgttaatattgaccatattgcaaccctacgtaatgcccgtggtacaacttatcccgatccggttcaagcggcatttattgcggaacaagcgggtgctgatgggatcactattcatttacgtgaagacagacgtcatattaccgatcgtgatttaatgctgatcagccaaacggttcaaacaagattaaatttagaaatggcggtaacagaagagatgattgagattgcttgccaaactcaacctgacttttgttgtctagtgcctgaaaaacgccaagaagtgaccacagaaggtggtttagacgtagtgggtaatgaagagaaagtggctgatgcgattaaacgtttatcattagcggggattaaagtctctttatttattgatcctgaccatgagcaaattaatgcagcagatcgtgtcggtgctccttttattgaaattcataccggtgcttatgctgacgctgaagatgaacaggctcaagagaaggagtttgttcgcattcgtgatgcggtaacctatgcagcgtctaaaggtttaaaagtcaatgcaggtcatggtttgcattatcataatgtacaacgtattgctgcattacctgaactttatgaactcaatattggtcatgcgattattggtcgagcggtatttagtgggcttgcaccagccgttgaagaaatgaaacgcctaatgagagaagcgcgtcgctaa

SEQ ID NO: 312789 - DNA, 165 bp, Proteus mirabilis
gtgattgttgaaatgttgcctcccattgatgtatcaaaatataacaaagatcaggtgagagaattagctgaagattgtcgtcagatcatgaaggctaaaattgaagagcttgataaagaagtggaagaaatgaataaacgcgattttgcaggtaagttaaattaa

SEQ ID NO: 312790 - DNA, 510 bp, Proteus mirabilis
  misc_feature (458)..(467): n is a, c, g, or t
atgactcaatcaagttataatgcaaaggatattgaggttcttaatggtctagagcctgtacgtcggcgtcctggtatgtataccgataccactagaccgaaccatttggcacaggaagtgatagataatagcgtggacgaggcgcttgcggggcatgcaaccaaggtcgaagttatcttatatgcagaccaatctattgaggttatcgacaatgggcgaggaatgccggttgatatccatccagaactgaaagtctctgctattgagctgatccttgcccatcttcatgccggaggaaaattctccaataaaaactaccaatactctggtggcttgcatggtgtcgggatctcagtggttaatgcgttatcaaagcgtattgaagtcaccgtgcgccgagaaggcaaaatatatcaaattgcttttgagaacggtgataaagttgaagagctacatcnnnnnnnnnngcttttgggaacggtgaaaaagttgaagagctacatcaaatag

SEQ ID NO: 312791 - DNA, 162 bp, Proteus mirabilis
atgattaaccagcgagcaaacgaacacttttctcgaaaattaatgcaaaaagcagttgacggatttgtctgtaatacgcataatgcgccccgcaacgccgacgaaggttatgcaaaaaaagatggctatgtagctcagctggttagagcacaacactcataa

SEQ ID NO: 312792 - DNA, 888 bp, Proteus mirabilis
atgcctccaaacctttccagtaagaataataaaacaatatttgcaccttttgattgttcgggcatttattggaacaacagcaacccaatgccaatgcctgagtctagtacgattgaaaaagcggcagcattattatatttggttgaagagcagctacaccccgtttctaacaaccgtgtaaacccaagcttaggtcaagctattactaaatctggcatgaatcttttggataattttgatggcattatcttgaaaacacaagatttatgcccgagagaaaatgaatgtattcggcttaaaatggccttggtaaacctaagtaatgtcaatgattggccatcattagttcaacgtgcagaaagtggcaaattaacaggaaccaatgttttattacgtgctgttagtgctgaggccttggaaaagctcgttgacaccaccacatcatcttttatctaccgagaaatagataaggccgcaatactgttaaatagtccaccaccgggtggtgtgcttttaatcagtgatgaaagaaaacagctcgttgattatgcttcaaataccaattctgtatttgaacctacaccattagagcaatggcgagaattacagcgattatctgatattttattacacacaccttttaatactggaggtgtaataacggggatggtaattgatgcgaatggcacgttacaaatctttttgcatagcatgcctgactcaatgaccctgttatattatatcggtaatacgttattattattcttcgctattggatttttgatcctgaatttattttttatcatccggcgccggcgacaaaataatcaacgcatgcataaaatcagtcaatattacgagcactgtttttatcgccctcctcagtaa

SEQ ID NO: 312793 - DNA, 612 bp, Proteus mirabilis
atgatgactaatattacactcgataatataaaacttgctgtacaacgtatcgcgattgcctgtgaacagtctcaaaatagactatgtgaagcagatagccaacttggtgacggtgatttaggggtaaccatgcaaaaaggatggcgacaaattgctaacgatgcccaagattggcctgacgatttaagtaaagcgctttttcaatgcagcaaatcattacaaaaagcctgtgcgtcttcttttggtactttgcaagcaacggcttttatggcaatggccaaatattgcaaagaaaaccacctgcaagaaatagcgcttactgatatttccccactattgacggtcgcataccaaagcatgatggcgagaggaaaaggggaattagggcaaaagtcagtattagatattctttatcatttatctgaagatctagcgtcgatctcatctctgactgaactaaaacccactgctttaaaaagtattaataatacgctaaatgaatttcgccctaagcctaatttattgggacgtgcccgtatgttcccagaaaaatcgataggattagacgatcccggtatgttagcgattaacgttattgttgaagcaatttga

SEQ ID NO: 312794 - DNA, 210 bp, Proteus mirabilis
atgacgccatttgtttccgtatttatctcttatacttttttatcttgggactcattagctgaagagttagaagatccattcggtgtttctgccaatgacttaccattaaatgcaatatgtaacaccatagaaaggaatttattagagatgcaagatatcactccactccccatcagagttaaacctgaccaatattataatttattgtaa

SEQ ID NO: 312795 - DNA, 489 bp, Proteus mirabilis
  misc_feature (388)..(397): n is a, c, g, or t
atggcaaaattagataaagaacaggttattgataacgcattgattttattaaatgaagtcggtatggaagggttaacaacacgtaagttggcgcaaaaattaggggtagagcaaccgacactttattggcatgtaaagaataaacgtgcgttattagatgctttagctgagactattttacaaaagcatcatcatcatgttttgccattagcgaatgaaagttggcaggattttttgcgtaataacgcaaaaagttttcgtcaagcgctattaatgtatcgtgatggtggaaagatccatgcaggcacacgaccatcagccaatcaatttgagacatcagagcaacaattgcaatttttgtgcgatgctggctttacgttaacgcaannnnnnnnnnaagttccatcgcgcattttacacttggttcagtgcttgaaacccaagaacatcaagagagccaaaaagagcgagaaaaagtgccaaaaatag

SEQ ID NO: 312796 - DNA, 153 bp, Proteus mirabilis
atgcctaaattttggttacccttgtgcttaagcacaagtgtcttgctattaagtggctgttcatccatggggggaatgtctttttctgcacttaatccaatgaattggttctcaaatgagacgttaaacggtttctgcaaatggattaggtaa

SEQ ID NO: 312797 - DNA, 810 bp, Proteus mirabilis
  misc_feature (714)..(723): n is a, c, g, or t
atgtcagataatgtcatctcctctatcggcaccaatcaaactggtgttaataaccgtgttcaattacgcaaaacattgacgctaatgcaagtcgtcatgatggggttggcatttttacaacctatgacgatttttgatactttcggtattgtatcaggcataaccaatggtcatgtggcaacatcatatgctattgcgttaaccgctattttatttaccgcagtgagctacgggaaattagtcaagcgtttcccttcagcaggctctgcttatacttatgcacaaaaatccatgagcccacatgttggttttatggttgggtggtcttcattattagactacttatttatgccaatgataaatatcttattggctaaaatttatttacaagccatattcccaggcgttgatccgtggatctttgttgttgcgttagtcgcgttaatgacattttttaatctacgcggaattaacgttgtggctaacttaaataccgttattgttgttattcaagtagctgtactggtggtatttgttggtttattaattcatggcgtatataacggcgaaggtacaggggagttatggactttccgcccatttgcgtcagtagatgctgaattaatcccaatgataaccggcgcgacaattttgtgcttctcgttcttagggtttgatggcattagtaccttatctgaagaaacacccaatgcnnnnnnnnnntttcttaactgcgttcatcggtggtttaatttttatcgctgtttcttattttttacaattatatttcccagatatttcacgttttaa

SEQ ID NO: 312798 - DNA, 315 bp, Proteus mirabilis
  misc_feature (289)..(289): n is a, c, g, or t
  misc_feature (292)..(298): n is a, c, g, or t
atggctagccgtctgattgatttttctcagcctcctgtttcctatcctgctgatatgcaatggacatattggtggaatgggaaacagcatgagccagttgtttatgaaagaccgcttacccgtgagcaattggctcaggggcaagcgattttatttgatattgaaaaactgcctcgctttcttaaatctcgcttatttaagtacatcgaacatcttaaaaaagagaaaacgccgaaagaagttcataactggctggtttttaagttccataaaagcgtctatcagcgtntgnnnnnnnacgtcaatttttgttag

SEQ ID NO: 312799 - DNA, 819 bp, Proteus mirabilis
ttgacgcctagcgcgattagccatcgtattaatacactagagaaagaattagggataaagctatttaatcgctttcatcggcgtattgaattaaccgaagaaggtgaacgtatttattgggcattgaaaaaaacacttgaagatattaatcaagagattttaggtatctataatcaagaaatatctggcgtattaacggtgtattctcgcccttctattgcgcaatgttggcttgtacctcgtatttctgattttactcaacgctatccttctattgaattaaacttacttactggcaatgacgatattaattttcgtggttatggtatcgatctcgctatctatttcgatgataaacacctgaaaaatctctattgtgaagatttaatctcagaatcaattattcctgtttgtagccctgaatatgctgctcgccatgaattagtaggtaatattcatcaccttgctaattgtactttgttacatgatagacaagcttggagtaataactctgattttgatgaatggcgcgcttggagtgaatatatgggattaggattatttccaaataaaagtaatatttgttttgatcgctctgatttagctgttattgctgccgttaatcattccggtgtcgcaatgggacgtaaacgcttaattcaaaaacaactcgcaaataatgaattaatagtcccttttgataattgtgagtttttttgtgcacaacgctattatctggttacccgcgatgaaaagagtaacgctaaagtacaactttttattcaatggctgaaaaaacagatcttacaagggatgtga

SEQ ID NO: 312800 - DNA, 1878 bp, Proteus mirabilis
atgaatgtaaaagagatcattcgtcatgaaccatttggaacattactcggttatgcacctggtggtgttgcgatttactcttcagattacagcagtatagataaagaagattatgccgccaatgattcattccgtagttatattggtaatgagtatatggggcataagtggcaatgtgttgaatttgcacgccgttttctctatttacattacggggttgtttttactgatgtgggaatggcctatgagatcttctcgttacgtttcttacggagaacgattgatgacgatattttacccttgcaagcttttgcaaatggcagtaaacagccaccaacggtaggagcgttgcttatttggcaagaagggggagagtttaaagtcaccggtcatgtggcggttattaccgaagtattagaagataaaatccgtattgcagaacaaaatgtgatccacactaggttaccgcgaggtcaacaatggacacgagagttaccgcttaaagtgagtgataatggctattttatcgaagatacctttgataataccaccttgctaggttggatgatccaaacagaacctaatgcctacagtttacctcaacctaaagttgcccctgaattgttagctattcatgaggccaaattagccaacaaggggcaatttgctggaaaatggctagatgaaagcgatccgttagaaaaagcctatgtgctagcacagcacggtcatacgattaatcaagacagctatgaatatttcactatttcagaaagtgctgagcatgaacttatacgtgctagcaatgaaatgcatttgatgtatctgcatgcaacggaaaaagtgctgaaagacgataatttactgcgtttatttgcgatccctgaagtgttatggccccgtatccgcctatcatggcaaaatagacgtcatcaaatgatcactggacggttagatttttgtatggatgagcgcggtatcaaggtgtatgaatataacgctgattctgcatcttgccatactgaagccggattaattattgaaaaatgggctaaacagggtggcattaaagcaggttataacccaggtggacgtctattagatgcgttatcagatgcatggaaacacagtgatgcgaagccatttgtacatattcttcaagatgatgataatgaagaagattatcatgctcgctttatgcaacaagcactgactaaagccggttatagcagcaaaattctgcgtggactaaaagagctgcattggaatagtcgtggtcagttaattgatggtgataaacgtattgttgaatgtgtatggaaaacatgggcttgggaaaccgcgttagatcaactaagagaagagagtgaacaacagtcacttattcctattcgtattggtgatccggcgggagaagttcgtttagttgatgttcttttacgccctgaaatcacggtttttgaacctctttggacacttattccaagtaataaagcgatattacctattttgtggcaacttttcccagataatccttatctacttgatactgagttcactttaaccccacgtttgtcgcagagtggttatgcagttaagcctattgctgggcgctgtggtagtaatattggtttagttgatcaccaagaaaatgtattaggtgaaaccagtggtcaatttgaacatcaagaaaatatttatcaagagttatggtgtttaccaaaagtgtctaaccgatatattcaggtttgtacctttacggtagatggacattatggtggttgttgcttacgctctgatctgacattagtgataaaaaaagacagtgatattgagccattaattgtccttgaagataaacactttttagcggattaa

SEQ ID NO: 312801 - DNA, 918 bp, Proteus mirabilis
atgcgtgtgtcacatctcaattttaatcatctttattatttttggcatgtgtgtaaagaaggctctgttgtaggagctgcggaagcgctgtatctgacacctcagacaattacagggcaaattaaagcattagaagaaagattaggggggaaattattcaagcgtcaagggcgcggattagttccctctgaattaggtcagcttatttttcgctatgccgataaaatgtttatgctgagccaagagatgctagatattgtcaactatagtcgagaatctaatctgttatttgatgttggggttgccgatgcgttatccaaacaacttgttagtcgtgtattagaaacggcggttattgatcatgaacaaatacatttacgctgttttgaatcgactcacgaattgttgttagagcaattaagtcagcataagttagatatgattttatctgattgtcccgtagattcctcacaacaagaggggctgttctctgttaaattgggtgagtgtagtgtcagttttttctgcagtcagccaataccagaaaagccattcccagaatgtttagaagatagaaaattgcttatccctggtcgacgctctatgttaggtcgtcatttgttaacttggatacgcaataaaaatcttcaagtagaaattttaggtgaatttgatgatgctgcattaatgaaagcatttggtttaaatcataatgctatctttgttgcaccttctatttataccaatgagacatttgtccaaagtaatattgaggaaataggcacattagactcggtaaaagaagagtattacgttatttttgctgaacgtatgatccagcatccggcagtacaacgtgtgtgtaataccgatttttcagctttgtttagtggtgaaaagaaagccaataacgaatga

SEQ ID NO: 312802 - DNA, 423 bp, Proteus mirabilis; identical to SEQ ID NO: 294437

SEQ ID NO: 312803 - DNA, 270 bp, Proteus mirabilis; identical to SEQ ID NO: 294436

SEQ ID NO: 312804 - DNA, 375 bp, Proteus mirabilis
atgtttgggttcgcatgggttaaattaaataaaaatgcagaagatagaataaataaaaaacagccaaaggactttttcgatttcatggaaatattaaataatgagacgaaaattaattgtggtaattatattcgtcaaaatatcgaaatgtgtttaatagccacaagaggaaatggattacctcgtcaatctgcaagcgtgagacaaattatttactcgtgcttaggtgaacacagcgaaaagcccaaagaggtgcatcatcgtttagaggaattatacggagatgttcctcgactcgaattattcgctcgtgagaaatatggtgattgggatgtatatggcgaccaagcagaagaaagtattcggttaatatag

SEQ ID NO: 312805 - DNA, 267 bp, Proteus mirabilis
  misc_feature (242)..(251): n is a, c, g, or t
atggctgagaaaacacaatctgacaaattcaaagcggccaagaaaagcacattggtcagtgtttttgttaatatctttttatccatatttcaaatcacaattggtttcttctcacattcccaaggcttaattgctgatggtattcattcactgtctgatttaattgctgacttcgtggtgttaattgcgaataaaggcagtcaaaagcaacccgatgccgatcatccttatggacattttcnnnnnnnnnngacattttcgctatga

SEQ ID NO: 312806 - DNA, 672 bp, Proteus mirabilis
  misc_feature (13)..(22): n is a, c, g, or t
atggacattttcnnnnnnnnnngacattttcgctatgagaatgccgcttcattagtgttagggacgattttattgattgttggtttgggaatgatattttctgctatccataaaatgttagatccttcaatcattcctgatgttcatagcatcgcgctttatgtggctttattggcattagcggctaaagaagggttatttcgttatatgttagctgtagccaaaaaagtcgattctagtatgttagtggcaaatgcttggcatgcgcgctcagatgccgcctcttctttagtggttgcaatagggatcattggtagccttgctggatttaaattctttgacccactagcagcacttattgtcgggctatttgttggccgtatgggatggcgttttacctatcaagctttgcaagatctcatggatagaggcgctgatgaagaaacacttgaacagatcaccaatacattaatcaccacaccaggagtacaaggggtacatgatttaaaaacccgtcgtgcaggtgattatttattagttgatgtccatttagaaattaaaggcgaattaacggtcaatcaaagtcatgatattgtggtcaatgcccatgatagagtacttaaacagcatgcacagattttaagtgtgatgatacacgtcgatcctgcttaa

SEQ ID NO: 312807 - DNA, 267 bp, Proteus mirabilis
atgcaccatgtattaggtgttattagccctgcagataactattctcaaggcgaagatctatttgctaatacgcgtaatcacccttggatttttactggtgataatgaaactctagtggtctttttacaagataatacgttaatgatagataaacatggcagatatgctttgtttgataaatcaggcaaagagatccaatccgccaaacctgatttacgcctattattgcaagtactggctgagcaaaaacgatttattgagcgttag

SEQ ID NO: 312808 - DNA, 276 bp, Proteus mirabilis
atgaaaaaatacgaccttatctattgtgatcctccgtgggattacaaaaataaagtttcaaacggtactgctaaaaatcattatccaacaacctccctcttcaatttaacccatatctctattcattctattgcatctgataacgcagttcttgccatgtggtatacaggcaattttgtactcgaggctatcaggttagctgaagcttgggattttaaagttaaaaatatgtttgggttcgcatgggttaaattgaagagggaggttgttggataa

SEQ ID NO: 312809 - DNA, 1356 bp, Proteus mirabilis
atggggagtaaatggcaacaaatacctttaggtcaattgatctccttacaaagaggtcatgatctacccacacaaaatagagtcaatggtcaaatacctgtcatgggttcctctggattaactggatggcacaatgtgtcaaaatgtacaggccctggggttgtgattggccgtagtgggaattcaatgggggtagtaagttattctgattcggatttttggcctctgaatacgtgcttatatgtaacagatttcaaagggaatgatgaaaaatatatttattatatgcttcaacagattgattttgataaatttaattcaggtagtgcacaaaaatctctaaatagaaatgcagtttatccatacaatgtgatggcaaccattgatatagaagaacaaaaaagtataggtaagatccttgctaattttgaagacaaaatcaccctcaaccgacaaatcaacaaaaccctagaacaaatggcgcaaactctatttaaatcatggtttgtggattttgatcctgtggttgataacgcactagatgcgggtttttttgaacaggatttagctttctctgatgaattactgcgtcgggttgaagtgcgcaaagcagtgcgcgaaagtgataattttaaaccgttatcagaggatattcggcggttatttcctaatgcttttgaagaatgtgcagagtctgcgttagggctaggggggtgggtgccaagtggatgggaactcggtaatttgagtgatgtaactaatattttgagtggttttgcttttaagagtaacgagttccaaaattctgggtttggtgtcataaaaattaaaaatattggtaatgataaaagtgtcgatatatgtggcattcaacgaattgatatttcattagctgagaaagctaaacgttttagccttaaagatggagatttattaatggctatgactggtgcaaccgttggtaaatttggttttcttgttactgaaaatcaagaaccgtattatttaaaccaacgcgttgcaaagtttgaggctattgatgaaagtactgcttatttatattgtattctaaatagaaagattaccgagtcttatattgttaatacagcgcaaggaagtgcccagccgaatataagtgcaaaagatattcttgcaatgccattaattactgctccacaatctataagggaactattcaatgacaaagtaaatgatagttttcaaaaaatcattcagatgagaaagcaaaatattattcttgagcatctccgagacacactcctcccaaaacttatctccggcgagctgtctttgagtgatataaaaatagatattccagaagaaacacttatttaa

SEQ ID NO: 312810 - DNA, 573 bp, Proteus mirabilis
gtgaatttcctatctattcagcaaatacatgatcaatgcctaacaacaacacaagaagttattgaaagacttggatggactaatatctcagtaggcgttttgagcgatgaagagagacgcctgcttgaagacgaaaatttacaaagccagttgaactggcgatgggcgatgcaggcctatagcggtaacgctgaagacggaatactggatataacgttaaagctgattgatcgtgaagagccagaacagcttcaggcggttatcatttgtaaattcgactgtcgccgtgagcaattctcaatttgcatgttagaaaacttcattttagatgaagatactgacctaacaggcaacgtgttgatcatcgcacttatttacgcgactaccttctgccagctcgaggagcttgaagacgtttatattcaagatccttctgaaaatgcactaccgcgttataggagttacggatttgcccaggtatggcatgaccacagaaaaatgtctgcaaatgtgtgtgacatcctcaataccataaaattgaaagtggatggcattgactcagatgaagaatga

SEQ ID NO: 312811 - DNA, 174 bp, Proteus mirabilis
atgatcaaacaacatagaaaaatcacttctagtaaagctatggctagtgtaagacgctctctcgacttctgggcttccatcgacggcaacaaacttgccaaagttggtcagaaggaaaaagacatggatatggtcgggccgaagaaaggagtaaagccagtaagcctcggataa

SEQ ID NO: 312812 - DNA, 288 bp, Proteus mirabilis
atgaaaccaacagttaaacgaactcaacgtgattattctcttgcttttaaattggcggttgttgaccaagtagaaaaaggcgagctcacctataaacaagctcaatatcgatatggcatacagggtcgttcaactgttttggtttggttacgtaagcatggtagattagatttgtcggaaggtacgcccaatactctttataaaggtgctgctatgaaccaaacctcggagcaacaaacacctgaacaacgcattaaagcccttgaaaaagagcttgaggagatgtag

SEQ ID NO: 312813 - DNA, 468 bp, Proteus mirabilis
atgaatttgtttattgaatttttaaaagatagctacctaaattcagataatatttattcttcggataagcaattatccctattgaatattaacgaaaaatataatactcagatgaaacaacatagtgagaattttaatgaggagtcatatcaactccttcattatataaaacatgaaaagcctgactttctaagtactatgaatcctattcatttcgattgtccgatgattccaaagacaagaaaaaataataaaagaatgatatctcaatctggattatttattgcttttggtttaaatagcaccattcataaacaatataatggtaactttgaagtattttcactgaaaataactaataaaaagaaaatactaggtgagcttgatttgttaaatataaataaaagcaccatattctctgagatggaaaaatctgcagagtatatcaaagaaaagtataaaaattga

SEQ ID NO: 312814 - DNA, 1449 bp, Proteus mirabilis
atgaaaaagacagctattggtttgttgatttttgcttcatttgcagttaattcagcaagttttgattgcagtaaagagccaagtaaagtaggacagttaatctgcaatacgcctgaattatcaagaatggatgatgagctgtacgttgattacctacaagcaaaattagtaactggtaacaatgcagagtttaaaaagttggttaagcaaaactggaagcttaggcaggataattgcgaaacagtagagtgtatttctgattggtataagagatctactattctttatcgtaatatagctaacagcggcaaggttaataactcgtcagaaaattgctatgaagaaggtcagaaaatcactctatctggaataataaagagaacagtattccctggcccccctaattatgaaagtgttgagctaggtgataagccagaaacttactgggttcttaatacaaaagatccaattacatgtgcaaaaggaagtgctgattggggaagtaaaaataagtttcaactagttcttagtgatgacttgtataagaaatatgaaaatagcttaaataacagcgtgtcagttactggtaaattaatgtattcaatgactggacaccatcacactccattaatgattaatgttcagtcaatacaaataagaaatgaaaaagcaataaatgcaaaagtaacgtatgacgcatacggattgcctttaccaagaaacaaagaggcatttaataattttaatactgttgctacctctataattaacgacattgaacgcagaaaacaaaaagaaaatgtaataaatgatagtgaattgaaaggggttagttcctctgttagcacaacgcagttgtacaaagaatataaacagaatgaattggttgcgaataataagtacaaaggtaaaaggataagagttgttggaatagttgaaagtgtaacagaggattttctagggaacgcctctgttaaatcaacatctcctgattttatacttggtggaactatgtttaatgtagataaggaagatccttatgtgttgaatatggttcccggctcaaaagtggacatggtttgtattggtggtggctttgttatggatagccccatcttaaaagattgtgtatcgacaataaatttttctaaaacaaataaaaaaagcatccccgataatctaaagatggctctcccttacatcatatatatgggggctgaggatataatagaaaaacaatgcgaaaatatgggatcatgcgttaagtataaagagtttgccgacttagctattgcctcggatgaaagcgatgctcatgtgaataatgatgatttgtatgaacttatgaaagaaattgacttaagcgaagataaaataaagcaaacagaggatagcatatacaaattcatgaacaaatatagcaaagaattgaataataaatatgaataa

SEQ ID NO: 312815 - DNA, 2394 bp, Proteus mirabilis
atggctacagttgtggaatcactgattgtctcactgaaattagacaacactgagttcggacgtgcagtaaaacaagcaattgaagataacgaacaattatctgatgcggttaatggtgttggtgatgcgtcaaaagatgcgggtattaatatcaacatctacacgcagcaaacaaagaaatccaacgacgaaacagataaagccaaaaagaaaaataaggatttagagaaaacaataaatggagttgtaaaggctttatctggcttatttaccacaatatttgtttcaaccggtttacaaaaactgattgatgaaaccagcaaaaccaatgatcaactctatttcttaagtaaaaacttaggtatgaatgcaaccgacattaaacggtggcagaacatggcagagatgacaggcggtagtgctgatggaatggcagcgagtttatcgggcttgagtcaatccctgtggaacttagtcaccacgggtgatgcctctatcctgccttggtttaatgcgctcaatgttgatgtggttaactctggcggtcaaattagagaccttaatgatatcttgctcgatgtgtctgacagtttgtcgaaaatgtcacgacctcaggcatataacattgccaaaaatatggggttcgatgacggcacaataaatctgttgcttgaaggtcgtcaggctatgcaacagatgctagaaactcaaaagcatatcgttatctccagtgaagaagagttaaagctcagtcgtcaacttaaccaacaaaacgcattagtcagcaagcagtgggaaggtttaaaaacactcatagccaactacttaatgccttacttcctccgcttctctgagaaagtctcaggctggcttgattatctcaataaaaatagagaggtagccaaagatctgtttaagggtatggcggttgtgctcaccgtgtttctgatccctgcgctaataaagggtgcaatcgcaatggctggcatgtttgcaccgctgttaactggaacaggtttggtgattgcattgggcgcggcattaatactgctatatagggattataaaagatggaaagaaggcaaggactcttactttgattggtctgaatggtctaaaacaatcgagacagtccttggttggttagatggtttatccgagtggtttaagaatacatcaataggtaagtggtttaccgatcaggatggcaaggtcaatggatggaaacttgcattaggtggattacttgcgttcttcactggtaagtttgcacttggttttggtaaaacaatactatcaattggcagtgcttttgctggactcatggggtggcctggagtaattatcgcagcagttgcaggtagcctattatggtttaaagattttgttgataacttagacctcggatcacttgctcctgaaatggcaaatgtcactatgacgggagttaaaacggcagatgctttatcacacgtttcaaaagataaaagtaatgccgaaaatgcgaacattattttaagttcgttagactggttgataccgggtggaaaggctattggtcatgtcacggaagagattgacaaaaaaggaattcgtggtgcagcagagtcatttgttaatgatgcaggcgggttcctaaaaagagtcattagcgcaaataaaccagataaagatcaatcagaaaccactccaaaattaggaaacaccaggggtgagagaaataacaatccccttaatatgaacttcgttgggcaaaaaggtgctactttagaagaaggaaagaacgctagatttgctaagtttgatactccttatgaagggctggagagaacagtaaagcaattaatgctgtattatgatgggaaatcaagggcggtagggaatagaaaactacaaacagtgcaggatattgttaaggcttgggcaccaagtgctgataataatgatactaaagggtatgtgaaaagggtttcggaaaggctatcggtgtcacctactgagataataaatctcaataacccagaaatgatgtacgcactaatgaatgcaatgagtaaggaggaaattgggaagcaattaccttatgataaatcattagttatggcagccataaaaggaaccggtgatccatctgttaatcttgccaataacattaactctcttaacaaggcaattagtaagccatttgtgtcaaatacaggttttgaggctcaaaactttttatctcaaactcagaaattaaatagccaaccctcaactgttaacaacaagacagatgtaacgattggagacattaatattaccagcacttcatcaaccatcaaaggaacaataaatgatggcaagcaagcagcaagggaatctctatcacaacttatgccaacgatgagttaa

SEQ ID NO: 312816 - DNA, 174 bp, Proteus mirabilis
atgaaaacaggaagaatggtagcaatcataaaaatgaagtggtgggtgccttattatgttgaatgcttaaatttgttctcattggcatttctcgttgagcctaacccatccattgttagtcaatttatcgttaaacacggcgtgactattaatacacggtttgaagaaatttaa

SEQ ID NO: 312817 - DNA, 690 bp, Proteus mirabilis
atgtcaagatgtacagctccagtacgtgggcataaatcagcagcagcggccgcagcctgcccagcatgccgaaatcgtggtggttatcgccgcagctataactacgatacttacagtccttattcttcatcaggaaactatggaggtagtaccagaggaactagcagcagctcgagaccaagttggtcaaaatcaggttcatctgtgtcttacacgccatctcaagtgcaatcacttactccaattagacaaacggtcgaaaagcgagctgtagagcaacccgatctccgtgatgtttttctatgccatgcgtgggatgataggcaggggattgccaaagagcttcatgatttactggaggctgcgggtgttaaagtttggtttagcgagaaagatcttgcccttggtgtcccgatgatgcgagctattgataaaggtttagcaaactcgcggattgggttagtactggttacacctgcattactaaaccgcctgcctagagaaggtgttgctgataaggagctttcggcgcttttggcgggtaaccaacttgttccgattgttcataatacaacctatgaagctcttcgtaatgtcagtcctttacttgcctctcgaagtggcttggatacaggagaagatacattaacggatgttgcaacaaagatagcagaactggttaccctttaa

SEQ ID NO: 312818 - DNA, 156 bp, Proteus mirabilis
atggagtctgctcgtgataaatgtacccgggagatcgtcgatgctgaggatctctggtggctggataacgttgatactgaaggctatgtgtgctggggatgcggtataactatgcaccctgctgcatgggaaaaagataaaaaaatactcttttag

SEQ ID NO: 312819 - DNA, 3063 bp, Proteus mirabilis
atgagcgtagaaattccagaatcaatagtctctatgttacgagattgtcaaaacgacagtattaatactatatctaattatttagatgaaccatcagaaggctcatgcctgattagtttacctactggttcaggtaaaagcggtgtgatatgttgtgtggctcattatagtaaaattgataaaatcctggttgtaagccatagacgtgctgtatgtaatcaattatacaggcaactaaaaggaagtttttttgagaaaatattgcaagataaatatgacccctcattggtaaaaaagaatgttatcaatggtatctcgctagatgttcttagtggtgtctattgtaccacatttcaaaagcttacaaatttaccagaagcggatatagataaaataaaaaactctttccaattaatacttatagatgaaggccatgctgaaccatcaccacaatggggttttgttataagaaaatttgtatcaaaaaaagtaatcataacagcaactccttatagaaatgatttatttaattttgatatagatgtaaagcattcatttatatatacatataagaaggctataaatgataaggttatagttaaaccaatatttgaggagattactcctgaacaattgatacgtaaaatattggattttaggggaaaatatccagatgctgtttgtattgtgaaatgccgaaatttcgatgatatttgtgagtattattttcttcttaaggatacatttaaaacacttgcgattcacgaccgtttcaaagatgagcctctagatgataacttacactatgtcccagctaaaattgacgaacttgaatatgaagtttatatccatcaacgtaagcttgacgagggaatagatctcccgcaggcgaagatattgattcttacctattctgttggaagtggtaaggagttagttcaaacaattggtcgtgttgtgagagtttttcgtgattataatccaatcatatttgagttagaaaaaagtaaaaattttagactttggagtaactatattgagttcgatgattatatatcggataaatcttcttctgaaaaattcttgaacacactaaatactgcctctttgctaaaaagctatttggatgcttttcctgagcatagttattttgaatcttcatataaaaagaaatttaatttcgcggagtttgaacctgcaaaatccttagttattcctttagcatcagtatgctttataaataaacttcctaattttgatttggctgattttatggataaaatttattgggagtttactagagaaggggctttgtcaaaatatgataaaaaaactggagtgataacttctgtttgttttaataattctaagtttttaatggatagattgttttttgaaccctccttagaagttgtaatagtaaaagaccttggaactttagttgctatatttgatagtagtcgtcgtcgatttaataatagaactgacctgaatctaggtagagcagtgaattccgatattctttataaggttttttctcaaacagaaaaatctagaacaacacaagcaacttctcgtgcattattcggaagttcattaaaagccgaagggattacctatattagcgaaaacctagaaagtacaaatcatccacaatcaaattcaagttatgctgtgacgacggcgaaaggttctaatttgaatatagatgacaaaattgcatcctcatattatttaggaataggttctggtaggataagtgatcaaaaaaatcgaaattttgactacgatagtttttgtgcatggattgatgagatcaagtatatattcgatagtgataataaactgaaaagtaactttttaagttctttctctcaagctattaacgaggctccagatgaagaacctatatcatgtgtaattgattttaatgatatatcgggtgttcttgagtttgagtattctaattgtaggattgtgattccaaatacatttttatttaagtcatataacaagggggtttctttttttaaatttgaggataccaacattaggataattaaaaaaatatccccacaatttagattgtctgattacaaacagtatatttcatcgatttttaagaataaaatagttttttattttaagaatggtgagtttaaagttaatagtaatgaggttaatatatatataaatggttctatcgtatcatctgaaaatatttttaatgctaaaacagttaaattgttatttaacaaaggtgtaactttcttgaatggaatgttttataagtttcaactaccttctgaaggtggagaaataagtcaagcagtacgtgataagatttatccactaaaatgcctttcaaaccctaatttaagtgaaaaggatcttcctaatttaacatcaaccgcattcggaaggaactcaatatttagtctgattgataatctatcaaatgtgaaaaattataatccgacaatctctgaacttggagatttttatgaacatattccggatgttgatatgattttatgtacagacatggatactgagcctgcagattttgtaatttcttcgaaaagtaaattggtatatgttcatgtgaaatgtgggaaaactataaatccagaatcatctgcaggtgctatcacagaagttgggagtcaagcattaaagaatatacatttcttgatctctcaaaattcatctcttgaatatgcaaacctttcaagattaaaaaaatgttggccaagtgataatggaaataacaatggtataaaacttaatagccgaattcggttatataataaaaaatttgatattaaccattcattagatgatgttcttgacttaattaaagaccgtcgctcaatgatatctgttcgaaaagaaatatggattgttattggcaatgctttttctaaaaaacattttgaaaaccaattttcaggaattggaaaaatatccgctgaatcattacaagcatatcagcttatagatacatggcttttacaagcatcaagttatgatattgatgttaaattttttgtttcggattaa

SEQ ID NO: 312820 - DNA, 183 bp, Proteus mirabilis
atgagaataacaacaacagttaaaaataaagatgatgttgaattaattgcatactcacattggtgcttatctaatttcattgacattaaacataaagaatgtgcttattctcttaatgatatgcaagtatggatagttagaaagaaaaatggaaatatatctgttaaaggctatcgagtttaa

SEQ ID NO: 312821 - DNA, 471 bp, Proteus mirabilis
atgccaacccaaacggatctatccaccccgtcggacaatgcacatacccatagggattcaccccacccaataaccctatggggtctggggaaagatactgccctgtttccctatcataatagcgaaagcgattataaagccactttcttcatcttcatattgccccgcaaaacgaaaaggacattcggtgtaattaggatcattctccgccttgccctcgcggtaacgccaaaactgcatttggccccatgtattcagccgtcctgcccaactggcttgtccgccttcactgaatatctctcgcggggttccttggtggtcggtgaccacatagtgcagtttgccctgttgataacgcgcggtgggcgttatctctccgggttgatacagccattggatttgctgagacaccacgagagtgccatcggcatatatcggcgtttcttctatcagttggtctcccgaccataa

SEQ ID NO: 312822 - DNA, 144 bp, Proteus mirabilis
atgttaaaagaataccttccccagcaatttttgttcgcagcaatcccccttgataaacttgttcctgaagatgaccttattcataaagtcgataccattatggactttgaatttatttatgatgttgttgcttataccgagtga

SEQ ID NO: 312823 - DNA, 1035 bp, Proteus mirabilis
gtgccaattactgcttatgtcggtgtacctcgttcaggtaaatcatacgaagttgtaaaatctgttattgttcctgcaatagcgttaggtcgtcgtgttatttcaaatatttatgggttgaatgaagaaaaaataaaggaatactgtttaaagcaatataagaaattatctttagataaattaggctcgattgtccatgtcgaaaatagtcaatgtttggatgaagactttttaccgtctatggaaaatcagaataccttttgtcaggcgggtgacttagttgtaattgatgaggtttggcgagtttggggcagtgataaggatatccctaaaaatcatcgttcttttattgctgaacatggtcattttgtgaataaagacactggcgttatgtctgatttagttgtaattaatcaaacggttagtgatatacctcgttttatcaaggcacgtattgaaacgacttatcgtatgcaaaaacatgtttcattaggtttaaataatcggtatcgagttgatgtttttcaaggagccaagatcactaaatctaatcgaatgaatttttatcaggaaaaatacgataaatctatctttgagctttataaatctgttgaaggaaacaaccctaatacattaaaaaccgataaacgccagtctattttttcatcaaacaaagtgctttttctaatgatccttgtgcctattggtatattggtttctgtttattttgtttatcagtatttcaatcagtatttaaataccgataaaacagaacctgcccaatctacgcattttcaacctatcaattctaatcagattaccaatttaactttcagcccaccaaaacctgttttatcgactaaatggcgtattacaggtgaactcattagggaagggaaggcatacgtcattttagccgacaaacaaggacaattacgtcttgaaccgcgtagtcagtttcaatttaacggtaggcttttgcaaggcgaaattgatggtcagcttgttaattactattcaggaggggtacagtga

SEQ ID NO: 312824 - DNA, 1131 bp, Proteus mirabilis
gtgaataaactattatgggtactcatattttgcgcttgttctattcaatctcaggcaaaaaacgtagatttcaaattggaagctgtgcccttaccaaaagcaatttctttgatttatgatgaagtgctacaaaaaccttacatgcttgaccctaatttagctaatgatgctagtttaattagttttcatgccactgaaaaacaagattttaatcaatttatcattcgttattttcagaatatgaatattcgtatttatgagaaaaaaggcgttgtttatttagttaaagtcaaacctccagaacctaaaattagtaagcaaagttttgtttataatccgatccatcgtgatgttgattatttacaaggctttttaaagtcagaaggtgaagtagcagctaatggagataaattggtgttttacggtacaaaagatgaaatctctcgcgttcagagtgtcttgagtgcagttgatacaccatcgcgtgaagttgttgttactggttatgtttttgaagtacaagatattgaaaaagaaggaagtggtatcaatctattggcaaaattattatcaggcaaattagggattaatatcgggacaaagcaaaattatgaaaatttcattaccattaatactggtaatttagatgcgatgattgagttattccgaacagatcaacgcttccatgtagtcagcagtcctacattgagggttaaatcaggttctagaggaaattttagtgtcgggtctgatgtacctattttatcgagtgtgacatatcaggacggtcgcccagttcaatctgttgaatatcgttctagtggggtgatatttgatattcaaccgacaataaaaagccaggctattgatttaaaaatccaacaacaactatcaaattttgtcaaaacagatacgggtgtcaatcaatcaccaactttaattaagcgggatatagtgactgatgtcactgtaaaaagtggtgatattatcgtattaggtggtttagctgaaaataaaattgaagaaggtgaaactggatttagctttttacctaaaggatttttgtcaggaaaatcagaatcaaatacaaaaacagacataattgtattactacaagttaaagtgatttga

SEQ ID NO: 312825 - DNA, 381 bp, Proteus mirabilis
atgaataaatcactggatatcaattatttatcaaggtttcttaatggggcgttatgtgataaaagtttttcaaatttatcattagagcacgctcacttttcaagtgaagagcaggaaattacgtttcaattaccggaatactttgcacagaatttactgtcattttcgtttaagaatcgaatggattatagaactatttttacagcttcgttgttattatttttaatgcttgaagaagatcaacaaaaacgtctagcttcacttactgaagaaactaacaatctgcttttgtctaaaatcagcaatatttctgagtattttaaactagcgacacttttggatgaaataaatcaagagataagaacagcaattaaaggctaa

SEQ ID NO: 312826 - DNA, 438 bp, Proteus mirabilis
atgaacgcaacagtggtttttattttaaaatctattgcggtggtgatacttgtattttttagtaaagactacatgattaccatggagcatggtgtcatagtatctgttgctggtgttgtttcgacaatatctggaatactgtttggctttgttcttgctgcgatatcaattttaagcagctcaagcagctcgaatggtataattgatgcattgaaaaaaaataatgcgttccaattactagtaagaggcttattaagtactgggattactcttataactgcctgcctttttacattgatatcaatgtttttacctagcaataatatatttttttctgatgtgatatttttacttataggtctattttatatattaatatcgatagttacgtttatgctatgctggcggaaattaagctggatatttccacatatgtag

SEQ ID NO: 312827 - DNA, 723 bp, Proteus mirabilis
atgcatagaaatagtgctcacttagcatatatatctgataatgatacgtttttagagagaaaaatacccttaacaccattgcagagtttggctgagaggtcatactttctgtattattttaatacagatttacttttgctctcagaaaaccatttagggcctaaggcgacggatttatcttatgcgttattttcattatcgaatagagagtctagagtcagcttttcggcgatatggaaagaagagagtattcgtgagctatttgaatctgggacaatactaaaaacctgtgaagtaacaatagctgcgcctagagattttaataaaacaaattatgatttaaagcataacctatcatcgcaaatagcagaaatgctcgctggatcaggaacatctcacttagacttagtgctaagaggaaagtcttctaagactagcaaaggttatgaatatttatctgaagatgttaagcaaagtataaaggaaatgattgagaagtttaaaggcgggaaaagtggagcggaggttcagcgagctgatgttattagaaaaggtagcaacagaaaaactagccttctcgatcaagtcttaaggcacacaaaaaatgtgatcattcagaatgatggatatccaaaggatgatgatgttaaacaggcattaattcaatcaaagattgataatcttcaatatttatcccaatatgaagtagcgactgatcaatga

SEQ ID NO: 312828 - DNA, 1041 bp, Proteus mirabilis
atgaatacactcacaatatccactcgcctaaaaagccagttgtttaccttggttcaaggtatattgacattggcgctaacacttttagggttactggttattacttttacgctttctgcgttttcccctgttgatcctgttttacaaattgttggtgatcacgccagtattgaaacttataatcaagtaaaacatgagttagggttagatttacccatctacatgcaatttttccactatgtagaagcactattgcaaggaaatttaggtacggcgacgtcaacgggtcaaccagtatttgatgatttaatcgccacctttccagctactttagaattagccactatcgccttagtcattggcgctagtttgggggttttatttggtgtgttatgtgcgcgttttgttggcaccccctttgattttatcttacgctttttaacgctattaggtagctcagtccctattttctggttaggtttaatactactccttattttttatgccacattgcaatggacagcaggcccaggacgtttggatgatatctatcaatttaccattgagccagtaaccggctttgccttgattgacaccctactggcaggtgataaagatgcctttctaaacgccctatcacatctcatattaccggtttctctgctagcctattttgcactggcatctattacccgtttaacacgctctgcctgtttaaatgagatgaataaagagtacgtcactctcgccagagcaaaagggattggcgaattacgtctcttattcacccatgtattacctaatattcgcggtgtgttgatgaccattatcgccttgtcttatacagggatgttagaaggtgccgtattaacagaaacggtattttcttggccggggattggtcgttatctcacaacggctctctttgcgggtgataccaccgcaattatggggggcacacttgttattggtctatgttttgtgctgattaataatatgacagatatcgttattcgtttgactgatccgaggttacgctaa

SEQ ID NO: 312829 - DNA, 1128 bp, Proteus mirabilis
atgaaatttgatattgctgttattggtgcgggcattattggtttatctcatgcgtatgcagcggctcagcgaggtttacgtgttgctatttttgagcgcagttacacgcctgtgggcgcttctgtacgtaattttggtcacggattaattttgggtcaagcgccgggaaaaatgctagatttagcaaaaaatagtcgtgaaatttgggcaactatgggcaaacaggctaaatttttaacgcgtcaaaaagggacttatctattagcacgtacacaatctgagcacgctgttcttgaagcttttgtcgatggtcgagctaaaacctatggttatgattgtgaattactttctaaaacacaattagctacggtttatggtggtcaattacaacaccataaagcggcgttgcatggcaaagaagatcaggtgctattttcgcgagaagcgatcccacagttagcggcttatctaggcagcttagctaatgtaacgagttatttttccacattagtacgggatattgatgtagatacggggacattgatcaccagtaatggaacatttagtgcagaaaagatcattgtctgctcagggcacgattatcaaacattactggctgacgaaataaaaaagcttgaccctatagtttgccgcttgcagatgttgcgagtgacagcagagcaaaatattggattggcgcatgcgctaatgacgggattaagttgcactcactatggcgcatttgctgatttacctgaggcacaggctttagcgaaagaaattaaaatgcaatcgccgttgattgagcagtatggtattcatttattaattaccccgactccttatggcgatcttattattggtgattctcatgaatatagcttagatgcacagccctttaacagcgaagaggttgataacctcctgatagagttagctgagcacacattaggttgttcggttcaagtaaaagagcgttggcaaggggtttatggggcaaaaggaaaggagccgatttcaattttaacgccgagtgaaaaagtcactgctgtattgatgcgaacgggtttaggaatgagtgttgggccaggtttaggtgaacagaatattcgtcaactatttgattaa

SEQ ID NO: 312830 - DNA, 540 bp, Proteus mirabilis
gtgaatggtgaagatggcaatgacaccataaaattaggcacaattggtaaaaatctgacagttgatgcgggtgctggcgatgatactgtgattttgacaaaagattatgatccttcacctataggtaatcagggttatattaatgggggagagggcactgatactttagtcttatcaggtacgattacggttaatatggtcactaagactgatgaaggtattgctaatttcgaaaaagtcgatatgacggttaacagtgagctgaaagtagataatgcatctcaaaccgtcaaattaacagtatcggatgtattgggaatgaatgcaaattcaatgatttatatttccggtgatgctaatgataaagttgacttaggggctgatggagttaacaccttagggacatttaccgctacagccactacaacaaaagcaacagcattagatggtactgaacatacttacactctttatagcagtgcaagtggtgctaatgtctatattgataataatattatcgataatggaggcgttatttaa

SEQ ID NO: 312831 - DNA, 3471 bp, Proteus mirabilis
gtgacggcaggtaaagccgatgtgactatccccgcagataaagtgacagcagacggtaattattctgttaccgcagaaattactgatccggcgggtaataccagtggtcaaggtaaacctactgactttgctgtcgataccgtggcaccgtcggctcctgtattaaaagcagaggacgatggttcggtttcagttgacttaccaacagatgccaataaaggtgatacggtagaaattacctttgaagatgaaaagggtgataagcacacggttaccttagaaaaaggggataacggttggacatctgatacaccggcgttgatcccagacagcaacggcgataaagcgaccattcctgcggataatgtaaaagacaacagtgaagtaacggggattgccaaagatccgagtggcaatgaaagtgacccatcaacggtgacttcgaaaacggacggtgtcgctgatgcgcctgtactgactatgatcccagacagcaacggcgataaagcgaccattcctgcggataatgtaaaagacaacagtgaagtaacggggattgccaaagatccgagtggcaacgaaagtgacccatcaacggtgacttcgaaaacggacggtgtcgctgatgcgcctgtactgactatcccagaagtggctgacggttatgcgaatgcggatgaactgaaagacggcttacaagcagaagttaccttgccagcgggtacggttgaaggggcggaaatcaccttaacggtcactcgcccagataaaaccactgaaaccgtaacgcatacagtcactaaagatgaagctgctgcgggtaaagcatctgttgatattcctaaagatgcggtacaaaacggccaaaacagtgtcgatgtcagcttaactcaaggcaataatccagccaaaccaggaaacaaagtagattttgctgttgatggacaaatcccgggtgataccgatggtgatggtacggtggataccacaccggcggtgaccattccagaagccactgacggggtaaatgctgacgagctaaaagatggcgtacagaccgaagtgactgtaccgggaggtagtgcggcaggtgacacactgacactcactattaccaaaccagatggctcaaccgacactgttgaacacacactgactgcagatgaagtgacggcaggtaaagccgatgtgacaatccccgcagataaagtgacagcagacggtaattattctgttaccgcagaaattactgatccggcgggtaataccagtggtcagggtaaacctactgactttatggttgatacgcaaattccgggagacacagacggtgatggtgtggtggataccatacctgtagtgaccattccagaagctacggacggtgtaaatgctgacgagctaaaagatggcgtacagacacaagtgactgtaccgggagggagtgcggcaggggataaactcaccttaacaattactaaaccagacggctcaaccgacaccgttgaacacacactgactgcagatgaagtgacggcaggtaaagccgatgtgactatcccagcagataaagcaactccggatggtaattattctgttaaagcagaaattacagatcccgcaggtaacaccagtggtgaaggtaaagcaacggacttcactgtagataccgttgccccatctgcccctgtattaaatgctgaggataatggctctgtttctgttgaactgccaggggatgccaacaaaggcgatacggtagaaattacctttgaagatgaaaaaggggataaacagactgtaacaatggagaaaggggataatggttggacatctagtgatcctaatttgatcccagacagtcagggcaataacaccgctattccatctgataatgtaaaagataacagtgaagtaaccgcaatagctaaagatccaagcggtaatgaaagtgccccagcaacagcaacgtccaaaacagatgtattaccgacagtgagtattagtgttgatacaacatcagtaaatgacaatggagataagattagtgctgatgcttctgtttcgggtgaaataacagaagttcctgcaacaatagaggacaaggatgatactaccggattagtatataccgttgctctagattatgttgcagcacaggatgtgaccgtaaccataaccttaacaaatgatgctggtcatgcaagtgcgccggattattcaacgcttgcaggctctcagcatgatgggaaaatcgccctacatggggacactggtaaagtaacctatgatggagcttcaactgtaacggttgttattcctgctggatctaagagtgtttcatttatagttgatccaacaatggaagctaaccaaaatgcatttaatgctgaaggtatggagaaagttgttgcaaccattacgggaacatctaataacgctaccgctgtaactgatacagtgaataatgcaggtgcttctgctacgggggttatttatgatggcaaccctatttcattacgtaatctggacggcgattttacactgaagtattcattatcctcatcagtggctgaaaatggggactttggatataccatcggagttgatagcggtaaaaaagatcctaagctaacgacagattacaatgatacgatttatgttggttattatcaggatggtagcgaaacttcatcatacagcaatcttgctaactcgcaggataatggacctgatggcacaaaaacagatggtaatcaaagtattacaactgttgatttaggtgctggtgatgacctgatggtgatccgcggtaatatgttaaccaatacacgagtctatgctggtgaaggtaatgatacctttactatggacggcatgaatacagcgttacgttctatgtatgctggtagttatctctttatggaatctggtaatgataccgttacgattaaacgtacaggggtaaccaatgctggtcaaatctatcttggctcaggtagtgatacctttactcaaggtgatgccaatgatcaaaataataccgaattgtccggtttattagatctgggtagtggtactcaagataagtcaaatatgccaaatgagtatctttctgtttatcaggatggcagtaatttaagcttaggtaatgacaataacattgatgcggtcacagatgttaatactgtcactatttatggttctgtctccggtgaaattttaggtggatatggtagtgataatatcactatcactaaaaatctgactggtaatgtttctgttggtgataatacagacactctaactgctgggtggatttatggtggtgccactgtttctatgggggatggcaatgatacggttaccgtcactgaaggtgcgtataacacaactatttcactaggggcaggagatgatgtgtttgatgctactgctggtgttatggggattctgttagcgcgacattag

SEQ ID NO: 312832 - DNA, 195 bp, Proteus mirabilis
atgaacattatttattttgattttattgaaggatacggagttaatgccaaggttggcattgactgggatttttatcgttcctttgatgaattgattaaagaatgttcttgttactttagtgataacttcattttagcgccaacaacagcggaatcaggggattttactgggtatcaggagagtcataatgtctga

SEQ ID NO: 312833 - DNA, 450 bp, Proteus mirabilis
atggataataaagatgatgaaatgttactactaacatgttctgagagaatcaaatcgagcatattgagcaatttcacttatgacgacattgaaaatgagacaggaataagtgccagaacattaaagcgcttagccgctggcgaaagagatcctaaaattaatgaaataagagaaatcgctagagctactgggaaaaacccaatttggctcgcttttggagatctaaatacaacccttggtgaacatgcttatttttttagtagtgataaagtcggtgtaaattttcctgagcatacaactttagatgttgcagatagaaaaatgcgagtcttaactgctgttacagacttacccgatgaagatgttgcatttattgaaaggtttatagacttactgaacctagatagaacaatatcaaaagtcaagaataagcgttatcaacaagattaa

SEQ ID NO: 312834 - DNA, 978 bp, Proteus mirabilis
ttgagaaaaatattacactatattgttttagcgttaggtttatttattattacgctaaatgtatccgcacaggcaccggaaaatttcactaaagcaaaacagctagccagagaacgcatttattatgatcaaaatcaaaacaaacaaggtacgctgtattgtggttgtcattgggagtgggtaggaaaatcagggggacgtgttaatttagccagttgtggttatcaagtgagagcacaagctacccgagcctcacgtattgaatgggaacatatcgtccctgcttgggtttttggtcatcaacgtcaatgctggcaaaatggtgggcgagctaactgtgttaaaaacgatcctatttttggcaaaattgaggctgatttacataatctagcaccttcgattggagaggtgaatggtgatcgcagtaattttagctttggtcaattatcatctcaagcgccttatcaatatggccagtgtcgcagtcgggtcgattttgcttctcgtacttttgagcctcgtaatgaggtgaaaggccaagttgcacgtgtctatttctacttgcatgatcgttataacctctcaatgtcacgtcaacaacaacagctttttatggcatgggataaagcttacccaccaacaccgtgggaaagagagcgagataatcgaatcgctaacattgttgggcatcataatccctttgttacgggacaaatgaagtggcagttaggacataaaaatagtggtgcaggattaactgcaacatatcgtcctacaactgacaaaatagaaatgcctaaagcgcccacagtctcccaagatgagcagatcaaaggtaatctaaatagtaaaatttatcatttttcacactgtactggttatagaaccatgtcagataaaaatgcggtatattttaaaaccgaaaatgaagcaactaaagcgggttaccgattagcaaataactgtaaagcgctttag

SEQ ID NO: 312835 - DNA, 444 bp, Proteus mirabilis
atgcgttttttaaaattaccttttatttattggctgctactcaattgcatcccatttattggctttgaactacactcaggcaatataaaacccggtgtttttttctatttaggtgccctaacgatcatcacttcagggatttggctatttttctgcctttacttttttatcaaacataatacatcccctaaccctcaccagacaccgcgccagttagtcaccacaggtccatataaaataagtagaaaccctatgtatcttggctttctcgatattagtattgggctgttttttatttttggtaactggggatttttaggggctgcgcttgccttctactttattaccgatcgctatactattgtgcaagaagagaaaatattaagtgagcggtttccacaagcgtggcgacaatattgccgccacgttcgacgctggatataa

SEQ ID NO: 312836 - DNA, 330 bp, Proteus mirabilis
gtgaatactggttcgacagaaaatgataccaatgtacgagtagcattattcgattctacaggtgaacttgttccacttaatggtaacgacaccgatcgtacattttcttcggatgttgccggtgatagtggtagcttagcattttcattatactatgatggaccagcatcgaatgatgctattaccccaggtgctttcaaggctaccttatcttttgatgcttatatcactgataatatcgtcgaagataacgtcagaagaattgtcatcccagaagaggccctccgactaggtgccggcaccgaaaacctaatttccaacgatgaataa

SEQ ID NO: 312837 - DNA, 273 bp, Proteus mirabilis
atgttgaaaattgaaattaatgaagttgatggaaaagtaaatagcaaacaagttatctctaaacaaacaggtgaagtattaacttttagagaacaaaacgcctacatttataatggtggtgtttatcctgaaagatttattatccaattagacaaggaagaagctccatatcccgttgggttttatacattagataattcatcttattcggttggtgattttggttctttgaaaataaaaaaggcaaaattaataccactggacaaaaaataa

SEQ ID NO: 312838 - DNA, 270 bp, Proteus mirabilis
atgaataacaaccaatttaccaaagctagaatttgcaatactagcgaggctggtaatatttcacagtgtagtgatattgcattgcaattgcctgacaatgttatttcatcaatacaatcaagtgctattcatgattcatctgttatttcaaataatccttcctttggggaatttaataataatatctttggagcaggattagggcttgtcttaatcttttatttattaggttatgggttagggcgaatgataaaaatggtaaatttatag

SEQ ID NO: 312839 - DNA, 249 bp, Proteus mirabilis
atgaatatcaaaaatattatttctaatgtttacttaaaatctggtgttgttgcttctatggctttaagttcatctgcttttgctgctgatgatacagtaacaaatagtaattatcttgatggtctcattaagcaagttgatgtttctccaattattgtaggggttgttgctgtagctggttctattatggggcttactgtagtggtgatgggaattagaaaagtctctcgcatgattaattcattttga

SEQ ID NO: 312840 - DNA, 147 bp, Proteus mirabilis
atgatttattctatggcggtgatggtaatgatttattttatggtggttctggaaacgatgttatatacggagaaatgggaaatgatgtgctctatggtgatgatggagatgatacacttattgattattatggtgctaatatgttag

SEQ ID NO: 312841 - DNA, 126 bp, Proteus mirabilis
atggtaatgatttattttatggtggctctggaaatgatgttatatacggagaaatgggaaatgatgtgctctatggtaatgatggagatgatatacttgttgattattatggtgctaatatgttag

SEQ ID NO: 312842 - DNA, 675 bp, Proteus mirabilis
ttgaatgaatgtattgataaaaccgtacaaatttatagtttagaaatgccaactacgcaattattaatgcgttttacatctatgttagggcgaatacctttacagcatttgcgtaatggtaatatgcaagatgaagattgggcaagaacaagtaatgcaatgagcatattgcttgataaatggaaagggcgattaattattgatgactcaagttatataacaccaacaatattgcgctctagagtcagaaaaaacattcgtaaatacggttatccttcacttattttaattgactatttacagcttatgcggtgtccaaatcaagaaaatcgcactcaagaaattgccgaaatttctcgttctcttaaagcattagctaaagaaatggggtgccctgttattgcactttctcaacttaatcgctcattagagaatagagctgataaacgacctaacaatggtgatttacgtgattctggtgcattagaacaagatgcagatttgatcatgtttatttatcgagatgaaatttatcaccctgatagcgcagaaaaagggaatgctgaaattattttaggaaagcaacgtaatggccctgtcggtactgtaaaagtgcaatatcaggcaaatatcacacgttttgaagataggttgagtggtcattatgcaaactga

SEQ ID NO: 312843 - DNA, 321 bp, Proteus mirabilis
gtgactttaggaacagaatctaaaccacgagcacgaattgaggctttaatttcatcatatttaggattacgtgaagtgcgtggattatctggattagggcgaagttgttctaaaatcaataccattggtatttcactcaccactaatacactttgtgttaccaactgtttaggtgtcctaccccgttgtagcattttttcatctaaagaaattactttttcagtttgcataatgaccactcaacctatcttcaaaacgtgtgatatttgcctgatattgcacttttacagtaccgacagggccattacgttgctttcctaa

SEQ ID NO: 312844 - DNA, 483 bp, Proteus mirabilis
atgcctgatgcagtaaaaacgggaaatatcacattattatcatcttgttatccacctattgtaaataatcaccatttttggaaattgttatctcattacagtgctaatggttccatgttaatgtcattagatactattaaacatatgatttctgattatattctttaccgagatactgataggcaagtcactcgaaaatgtgagcgattattaaatggactcgttgaactaaaaacacatttatatgactatattttaaaaggtaaaccctatcgttgtttatctttatcgctattcattgacgaaacacaatatgaaaatagaggtgaagcttttgtctttactacacatctttaccattttttcccattctgtttatctgaaaatatgttattggaaatgtcagtcacactcaatgatcagaaaaacaccacttggtatttatctccctcaccactaaggggctataaatcaatgatttaa

SEQ ID NO: 312845 - DNA, 234 bp, Proteus mirabilis
atgccaacagcagagcaaatattacagccttataaatcattttttccttatttacaaaattttgatttaccatcacgaaatgctcaatgcccaatttggaatattccattttttaatgaaaattataaagttgattctcattgcccgttaattgagcaaaacagaagtattatagaatctatattttctttattatgggcatttattgctttacgtaaattattaagtgcatag

SEQ ID NO: 312846 - DNA, 288 bp, Proteus mirabilis
atgggattagatcttggaatagaaaaatctggttttgaaactttacttgcttgtgaaatagacaaagcagcaagggaaactattttaaccaataaaccggacatgccactcattggtgatattcgcgactattcttcagacgaaatcttacgccttgcaggcgttgaatcaggctcagaaattgatttaattatgggaggtcccccatgccaagcattttctactgcaggaaagcgtctaggacttgaagatgaacgaggaaacgtatttataaaatttttagcttaa

SEQ ID NO: 312847 - DNA, 135 bp, Proteus mirabilis
gtgcaaaaaggcggcaccgtgaccggtgatattacccatgttggtgggaaaatgtcctctaatggcgtggtggtttcaacccatacccacggtggtgtgcgtaccggtgatgataatacggggcaaccgcaatga

SEQ ID NO: 312848 - DNA, 216 bp, Proteus mirabilis
atgaaaggaacaacgttaacagagatgaatgaggcctacgaacaacaggcgatgacattaactcagagaaaatacagcgcagcctctttggcgggcacttccggatacgacatattttttcgtgagacagtaattaactataagaagttaatcccacgcggaaaggcgttcattcggttattaactttatgccagcaggattatttttatgactag

SEQ ID NO: 312849 - DNA, 786 bp, Proteus mirabilis
atgtttttagttgattcacactgccatcttgacagcttagattatgaaaaactgcacaaaaatattgatgatgttgtagaaaaagcacaacagcgtgatgtcaaatatatgttagctgtcgcaacaacattacccggctttaaaaatatgcgcgaactgatcggcaagcgtgataatgtggctttttcttgtggtattcacccattaaaccttgatgagggacacgatgtcgctgagcttgcgcgccttgcagctgaggccgatgttgttgcattaggcgaaacaggtttagactactattatcaacaagaaaatgcgtcacttcagcgtgaaattttccgtgaacatattcgcattgggcgccaagttaataaacctgttattgtacatacgcgtagcgctcgtgaagatacgctaactattttaaaagaagaaaaggttcaagactgtggcggtgtattgcactgttttacggaagacaaagaaacagcaatggcgctacttgatcttggtatgtacatctctttttcaggcattgtgacatttagaaatgccgagcaaattagagaagctgcacgtatcgtaccacttgatcgtattctggttgaaacggattcgccatatttagcgccagtgcctcatcgtggtaaagagaaccaacccgcttatgtacgtgatgttgctgagtatatggccgtattaaaaggggtgagcatagaagagcttgctcagcaaaccacccgtaattttgcaacactttttcaaataccaaacctcgcagactaa

SEQ ID NO: 312850 - DNA, 495 bp, Proteus mirabilis
  misc_feature (427)..(436): n is a, c, g, or t
atgaacgttaaaggtcttacccctaaggatctcgagcagtacggtattcatgacattagtgaagtcatttataaccctagctatgacttattatttgaagaagaaactaagccaggattaacaggttatgagaaaggcacattaacctcgttaggcgctattgctgttgatacggggatttttactggacgttctccgaaagataaatacattgttcgtgatgatgttactcgtgatactgtgtggtgggctgatcagggcaaaggtaaaaatgataataaaccactctcaccgcaagtatgggctgatttaaaatcattagttactgagcagctatcaggcaaacgtttgtttgtcgttgatgccttttgtggtgctaatgcagatacgcgattaaaagtgcgttttatcaccgaagtggctttgnnnnnnnnnnggcttggcaggcgcattttgttaagaatatgtttattcgccctacgcaagaagagttag

SEQ ID NO: 312851 - DNA, 273 bp, Proteus mirabilis
atgaaggtaacacaaatccttttttgtaataatgaaaatagtattacagataatgaaataaaaaacctatttaatatctttgatactcaggtcattaataatagtagagtggatgttaatcttgagactgccaaaaatcaaataaataaactcgctaatgcagttaggaatggaagctcaaaagatttggattatttagtaaatatcatgtttcatgatgatataaaacttaatttatccaaaattaaacaactcgataagagaagatattaa

SEQ ID NO: 312852 - DNA, 342 bp, Proteus mirabilis
atgaataaatacacagaactatctgacttcgagattaataaaaaggttgctgttgcgctggggttaatttccgaagtaacacactatggtgtagttgcaaagtcaaataataaagactattggtttgaattcgacccatgcaacaacccatcagatgccatgccgattattaaagataatttcatatctatagctcacgacggaatagcgtgggatgttagctgcgctaaatacccagagttaagcgtgtggaatggtttggaaaactacaacgataatttttatcgcaaggctatggaattatttctattaatcaagggtgcggagaatgaaaaagtatga

SEQ ID NO: 312853 - DNA, 246 bp, Proteus mirabilis
atggggaaaataacatatgttgttgaatacaaaaatggcaaagaacctcaactagacataggaatggatgctttaggcgggcgggtaatttcagcggccgcatataacttcatagacagacagttaactcatgccgaagctggcgcaattcttgacgcaattaatcactatgacctcaaagaatcttgcgaaagattttcaacaggttacaacacattaatagcaagattaaaatcgttaacgtaa

SEQ ID NO: 312854 - DNA, 216 bp, Proteus mirabilis
atgaatattaacttgaacatagaacaacatctaaaagaattcattctctttcttactgagaaaggtattgatgcaaaagaggtatctacgaatgaatcaatgatgagcgagttaatgcttaaattttattatcaccaaatagagttttgcgatgctgttcttgaagcacaaaaacactcaccaacaagaataaagcaattattaacaactaattag

SEQ ID NO: 312855 - DNA, 411 bp, Proteus mirabilis
atggctaatttatttgattttgcagaagaaaaaaggaatagaatatccgtatctaacggctctttatttactctatcatttgaaaatgaagtaaatgaaccatataatcctcctaaagaggatattatgaacggtgtagatatgaccagagaagaactagatgcaaaactagctcaaaacaaagccgaagtacaggccatagcctctggtatgcgcgaggaaatggctcactggcgtgaagagcaaaacgctcaaatgggtaaaattataaccaccctttccgtgcttgatgtaaaattggatgaacgttatgaaaaccaaaaaacagcatctactcgcactcaatggatgattggtattgctatagcggtagcagccatcatacccgcagtaatagcattgcttaagtag

SEQ ID NO: 312856 - DNA, 450 bp, Proteus mirabilis
atgagtttgcaatcagaaaacaacaaagcccaagagttaattagctttatcaccccatttgtagacaacaatgaactcattcaacctgcaactagattttctgttaaatcatatcctgcgtcaattaatgtgaagttacagattgggttgattaacctaagaaagaattcaagatatagcataaagttattcataacacctcaccatttatttacgaaggttggtaatgaatttgagctaagcaacccttttcaggaaatgttttccggtgttatcacaacaaaggacactgatatcaatatcattgatggtcagctaaacatcaatatagaagatgtaattatacatacagagggtatttattctgtcgaatgtaaactttttgattccaaaaatgaacatgctgaattaaattcattaaaatcattttttgttgtatcagtgggatag

SEQ ID NO: 312857 - DNA, 207 bp, Proteus mirabilis
atgcaaacaccattaaggaaagttcgacttgaacagaagctgacaatatctgaagtagctagcgctataaattttgatgcagggaacctttctagattagaaagaggaattcaagctgcatctttggatatagcagaaaagctcgcaaatttttatcgcggaaaaataactgaattagagattctttatccgcaacgttatcagtaa

SEQ ID NO: 312858 - DNA, 228 bp, Proteus mirabilis
atgattaatcaaaaacagaaattacctccgcattctattcatgctgagcaagccatattaggtggactcattcttgataatgaacgttgggatgatatttcatcaattatttcagcggattatttttactctcgttcccataaaattatctacccagctcagccaatattgtggcgtatgcagaacatgttgccaattatagccaaaagcgtcaattgctggcattag

SEQ ID NO: 312859 - DNA, 1050 bp, Proteus mirabilis
gtggcgtatgcagaacatgttgccaattatagccaaaagcgtcaattgctggcattaggacatgaacttgtcactcaagcgagtgatgttagttgtgatttatctggattgttagagcaggcagaacaacgaatttttaatattaccgaacaacaatgtttagatggaaatgtagatctcccttcatcaattgagatctttctcaatgaactagagcaacgttgtaataatgaaaaactgatcactggaacacctacgggatttgaggaattaaatgatatgacctgtggtttccagcccagtgatttaattttattggcaggtcgtccatcaatggggaaaaccgcattaggactcacattctgtgaaagtgcattgaatgaatgtattgataaaaccgtacaaatttatagtttagaaatgccaactacgcaattattaatgcgttttacatctatgttagggcgaatacctttacagcatttgcgtaatggtaatatgcaagatgaagattgggcaagaacaagtaatgcaatgagcatattgcttgataaatggaaagggcgattaattattgatgactcaagttatataacaccaacaatattgcgctctagagtcagaaaaaacattcgtaaatacggttatccttcacttattttaattgactatttacagcttatgcggtgtccaaatcaagaaaatcgcactcaagaaattgccgaaatttctcgttctcttaaagcattagctaaagaaatggggtgccctgttattgcactttctcaacttaatcgctcattagagaatagagctgataaacgacctaacaatggtgatttacgtgattctggtgcattagaacaagatgcagatttgatcatgtttatttatcgagatgaaatttatcaccctgatagcgcaaaaaaagggaatgctgaaattattttaggaaagcaacgtaatggccctgtcggtactgtaaaagtgcaatatcaggcaaatatcacacgttttgaagataggttgagtggtcattatgcaaactga

SEQ ID NO: 312860 - DNA, 918 bp, Proteus mirabilis
  misc_feature (895)..(904): n is a, c, g, or t
gtgtacatttctagtatcgatatctcaaattacagaagcttcagaagtcaaaacgtacaatttaaaaatgatattaacgttatcgtagggcataacaatgcaggtaaaacaaatcttttacgtgcattagctgttgtactggataactcatcttcaaagagtctatctattgatgattttaacaaaaatattcctttggacgagttaaagattgctgcaccaaaggtctcgatagctgttacctttaaaaaagggaacgaccacactccagatgatttagctacgattgcgagctgcctgactaagcttgaggaggattatgaagctaaattgacctacgagctatttttgccagaaaaagaacaacccaactatttacaagaactagataaagtaaaagatactatttcaaaagaagatatatggaggatcattgagtctaagtttttaagaaaatataagtataaaatttgggctggtaaagttgaaaataaagatcctgttagtagcgaaatcatcagtaagtttgattttcagttcttggatgcaattagagatgttgaaagagacatgcttagcggaaaaaataacttactcaaagatgtatttcagttttttatagactatgaccttaagaaaaatatcaatactcttgaatcagatgaaatagaaaaaaaagtacaagaaatcaggactagagaagatatatttaaggcatcctctgaaaatgtattagcgcaactgcataaaagaatgtcagaggggaagagtgaaatactaggctatgctaacaaaactggtgcggattttaatgattcgtatcctgactttgatggtagcgtttctgaaaaagatatgctgtttgctttgcaacttataataaaaaagaaaacgnnnnnnnnnngaaaacgggaataa

SEQ ID NO: 312861 - DNA, 636 bp, Proteus mirabilis
atgaacgctgatgatttcagcccgttaacccaagcattagccgctatgttggcaaaagcgtcacccaatgaacgtaaaaaattagcctgtgaaattgcccgtgatttacgcaaaagcaatttacaacgtatccgtgcgcaaaaaaatcccgatggaacggcattcaccaaacgtaaagcatcaacggttaccgtgttgcgaggaatgaaatttgtctggaaaggacaggctcgcagtttaaaaaattggcgattacgcaaaacaaaaaaaggtgaggtaatcaccggttacgacttggaaaagaaagccgaacgtagtttttataagcgcgatattttgcgttttattgaagtgaaaaaagacaaaatcagcaccgcaaagcccaataaacagactcgcatgtttaagcgtttagccactgcccgttatttgcgtatgtcggccaatgataaaggtgtcacgctttcttttgctccgcaagtggcgggcattgctgccgtgcatcattacggtttaaaagagcgtgtgcgaggtaagtcattagaaattcaataccctgaaagaaagctattaggcttttcaccggaggatattaaacatatcgaaaatcaattactggaatttatttctcgttaa

SEQ ID NO: 312862 - DNA, 438 bp, Proteus mirabilis
atgaaaaagcctgcaaacctacgtgataccttaattaaaaaggtggcctatttaggggataaccccgataggctctacacctttattgacggcggggcgattgtggcaaccggtgcccgtagtcaatcttatgagtatcaatacaatctcaatattattattgatgattatcccggtgaccaagatgtgttaatggcggtgatcattggttggattgaacaacatcagcctgatattttccttaatcccgataaacgccaaagtcattttacctttgatgcctttattgatagcaaccagaccgccagtattagcattgatttaaagttgactgagcgtgtcctcgttaatgtgcaagcggataaattggttgttggtgccattgaagagccggctgatccgtttgaaagttgggagagtgtagctcatgaacgctga

SEQ ID NO: 312863 - DNA, 504 bp, Proteus mirabilis
atgaaatggcacgtactaataggtattgtggcgggcgtgatgggattgctactgatatttaagtttgacgctttgcttactgaaaatagccagcttaaggataacaatctcgtccttaagcaaaatattatcaatcataaaaatgcgattgaacactatcaggaagaactcacccgcttatcagaattggataaacagcacacaaaggcgttaaccgatgcaaaaaatgatattagccggcttaatgatgagttgcgcaataatactaaacgggtgtacatcaaagccgattgccccaaccccgataatcacaccaccgccaccgccggcatgggtaatgcaacctccgcacgacttaccgaaacagctcaacaagattatttacgtctcctcgaaatgatggcggagaataaggcgcaaacggaatatttgattgattatacaaatcaattattacaatacatcaataagttaaaccatgaaaaagcctgcaaacctacgtga

SEQ ID NO: 312864 - DNA, 405 bp, Proteus mirabilis
gtgaataaatttatctttagtcagcgcagtaaacataatcttagtggcgttaacccgctgttaatgaaaattgcgtatcgtgcattagaaatctctacggcagactttgccgtgattgaaggtgttcgcacacttgaaaagcaaaaagaaaacgttaaaaagggtgtttcaaaaacattagacagccgtcatttaacaggcgatgccattgatattttaccctctgcgattaagccggggatggaatggcaaccgcatttttttgaaccggtattaatggcattcaaacaagctgcggatgaagaaggggtaacattgcgttttggtaaaaattggaaaagtgatcccaagttacctgttgagactcgctttcctgattatcctcatatcgagatcccacgatga

SEQ ID NO: 312865 - DNA, 207 bp, Proteus mirabilis
atgcggatttacacccaacaaggagataccgtagatgatatttgttggcgttactttggtcagtcatccggcatgattgagcaagtgttagaggctaatcctgggctggttgaattgggcgcaattttacccaccggcacagcaattgaattacctgataacgcacaacagcacagcacaacaccgattttacaactttgggattaa

SEQ ID NO: 312866 - DNA, 1146 bp, Proteus mirabilis
atgaaaaaagaaactcgttttaaatttaatgcgtacctcacgcaactcggtaaaatttacggtgttagcgcgcaagcgtttagtgatacaaaggttcaaattgaaccgtctgccgcgcaaacgctggaaaccaatattcagcagtcagcagaatttttaacacacgttaatatcgtgcccatggatgatcaagtgggtgaggccatcggtttaggtatcggctcaactatcgcaggcactaccgatacaacagcaaaagagcgcgaaacaagtgatccgattaagctgaccaaaaatagctatcattgccagaaaaccgattacgacacccaccttgattacgcgaaaattgatatgtgggcgaagtttaccgactttcaaacccgtatccgcgatgtgattatccgtcgtcaggcattagaccgcattatgattggttttaatggtacacaccgcgccgataattctgatcggaaaaaataccccttactgcaagatgtgaattcaggctggttacaaaaagtacgcgagcgtgcgccagagcatgtgatgggcagtgaaacgaaagacggcgcaaccacagcgaagcctattatggtcggtaaagggcaagcttatcaaaatcttgatgcattagtgcaagatacggtcgatactgcgattgatcctgaatatcaggacgataccggtcttgttgtgatttgtgggcgtaaattattggctgataaatattttccactggttaataaagaccaagataacagtgaaaaactggcggcagataccattatcagtcagaaacgtattggtggtttgccggctgtacgtgcgccgttctttcctggcaatgcattttttatcactcgccttgataacttgtcgatttatttccttgcggattctcgtcgtcgtcaagtgttagataacccaaaacgcgatcgcatcgaaaactacgagtcagtgaatgaagattttgtggttgaagattttcgcggtgtggcactggtcgaaaatattgtttttgaagatgtaaaagagacacagccagaaacaaaaaaagaggggggagcttctgaaaatgaagtcgtcaaagacgacaaagcagtaacagaagaaacaccaactgaaaataaaaaggcgaaataa

SEQ ID NO: 312867 - DNA, 651 bp, Proteus mirabilis
  misc_feature (608)..(617): n is a, c, g, or t
atgaaacagtatgctggcttcatttatattgcgactacgcttgatactaaaagcgctgaaattttttatgtcagtgaattaataaaaaaagcaggccttcctgtcaaaaccgtagatttgacaaccaaacctacagcattagaaagagaagctgacgtcacagctgcacaagttgctagttaccatcctgatggaaaaaacgccgtgttttgcggtgaccgtggaaaagctatcgcagcaatgtccgtcgcttttgaacgttatttaacccactgtgacgatgtcctcgctattttaggattaggcggctcagggggaacggcattgattacaccagcaatgcaatctttgcccattggcgtacctaaattgatggtatcgactatggcttccggtgatatatccggatatatcggcgctagcgatatttcaatgatgtactccgtaacagatgtatccggcttaaaccgtatctctcgtaaggtattgagaaatgcggccaaccaaattgccggtgctgtttatttttaccaagaagaaaatagtgttgataaaccggctgttgcattaacaatgtttggtgtaactacgccttgtattcaacaacnnnnnnnnnnactaaaaaacttgaaaataattatgactgtttag

SEQ ID NO: 312868 - DNA, 378 bp, Proteus mirabilis
  misc_feature (339)..(348): n is a, c, g, or t
atgatgcaaaaaataatggaagtttcagtattacccataatgaatcgtgaattaactatgtcgagtcgagagattgccagtttaacgggaagtaatcattccgatgttaagcgttctgccgataggctttttgttgctcaaattttaacccagccattggctgagttcccttttgaacataacggcaatcaatatactgaatatcgttttaataaaagagactctctggtgttggtagctcgattgtcacctcagttcacagcaaaaatagttgatcgctggcaggaattagaatcaaaaatgcagccagtcattcctcagacattaccagaagcattnnnnnnnnnnctcaaacattaccagaagcattgcgattag

SEQ ID NO: 312869 - DNA, 705 bp, Proteus mirabilis; identical to SEQ ID NO: 307870

SEQ ID NO: 312870 - DNA, 270 bp, Proteus mirabilis
atggcattactccgcgtttatttaggttcaagagttaacgcacgattatgcttaagactacctagacatcttttagccgatgcaacattaagttcaaagcaaaaacaaggtgttcaattaggtcgtactgctgttatgcgccccttgtcatctaaagctaaaaacaatgcaactccttcctatatcaatattggattaggtttttatcaatacctagcaccccgaactcaacattataaaagtgaagaatatggcaattataaattctaa

SEQ ID NO: 312871 - DNA, 510 bp, Proteus mirabilis
atgggattacctgttaaacgctttattgcagcgaccaatgtgaatgataccgttcctcgctatttagatagtggtaaatgggaaccacatcggacaatagcaacactttcaaatgcgatggatgttagccagcctaataattggcctcgtattgaagagttatatcatcgcaaaggttggctgttgtctgatctttcgcatggggctgtgagcgatgaaacgacggaagaaaccgtacgtgaactggcacaaaaaggctatatttcagagcctcatgcggcggttgcttatcgtctattacgtgatgagctacaagaaggagaatatggggtatttttaggtactgctcatccggcgaaatttaaagaaaatgtcgaacgtattttaggtgatacattacctttaccaaaagaattagctgagcgtgctgataaaaaattactatcgcatcttttaccggcagatttttctcaattaagagcatttttgttagaacgagcacctaaataa

SEQ ID NO: 312872 - DNA, 222 bp, Proteus mirabilis
  misc_feature (12)..(21): n is a, c, g, or t
atgaattcctcnnnnnnnnnnctcttagagaatgatgctcgtttagatgaattactctctcgtctggaagaagggggtaaactcaatcctgaagagcaagcttatactgaaaaaacccttgatcgcatcgatgcgttaatggcggaattaggcattgagtttgaagaagatgacgatgaagaaaaaacagaagatattatgcagttattaaaaggtaagtaa

SEQ ID NO: 312873 - DNA, 1536 bp, Proteus mirabilis
atgaatttacttaaatcactggctgcagtgagttcgatgacgatgttttcacgagtactgggctttattcgtgatgcgattattgcgcgtatttttggtgcaggtatggcaaccgatgctttttttgttgcatttaaactacctaatctattgcgacgcatttttgccgaaggcgcattttcacaggcatttgttcctattttagcggagtataaaagtcaacagggagaagaggcaactcgtacctttattgcttatgtatcgggaatgctgacgttgatcttagcgattgtcacagtaatagggatagttgccgcaccgtgggttatttatattacggcccccggttttgctgattcagcggataaattccaactcacaacggatctattgaaaatcacctttccctatattttattaatttcattagcatcattaacagggtctattttaaatacttggaatcgcttttctgttccagcttttgcacctacgttgttaaacgtgagtatgatcttttttgctctcgttgttgctccttattgtgatccacctattatggcgcttgcttgggctgttttagcgggaggaattttacagttggggtatcaacttccgcatctgaaaaaaatagggatgttggtattaccgcggatctcgtttaaaaatagcggagtgtggcgtgttattaaattgatgggacccgctattttaggggtttctgtcagccaaatttcgctgatcatcaatactatttttgcctcattcttggtgtctggctcagtctcttggatgtattacgccgatcgcctaatggaacttcctactggtgtgttaggggtggcattaggaacaattctattaccttcattatctaaaagttttgccagcggcaacacacaagaatatcagaaattaatggattggggattaaggctttgttttttattggctttaccttgtaccttgggtttagctttattatcaggccctttaaccatttcgttatttcaatatggtaattttaatgggcatgatgctctaatgactcaacaagcattagtggcgtattgcattgggttaatggggttaattattataaaaatattagcaccgggcttttattctcgccaagatattaaaaccccggttaaaattgccattgcaacgcttattttgactcaattaatgaaccttgcttttgttgggagtttaaagcatgtgggactggctctttcgattggattagccgcttgttttaatgcaggaatgctattttggcaaatccgtaaacaagatatttatcaaccattagcgggttggcctatctttttattaaaacttgctattgcgttagctgtgatgagtgctgtattagtcggcatgctatgggtgatgcctgattggcaacaagggaatatgctaatgcgtattttacgtttattacttgttgttgtagctggtgccgcaagttattttgtcactttatatgctgttggatttagaccgaagcatttttctctacgcgcattataa

SEQ ID NO: 312874 - DNA, 2349 bp, Proteus mirabilis
atgtccgataaaataatacttgaacctgtttgggtaccaaaccattttcccgaagatggccgattagagctaactccacaacaaatcgaaaaaaattataaacagcgacaaaaagaaaaaagagcgcaccgtgcaagtcttgaggctgtcacgaacaattgttgccgaacattgcatatcagtttcttttttgatggtactaataataatcgtaaagaagatatggaagcaaagccagaaacagcaactaatattacccgcttatttgaagcgacccgtgaagatgaaaataatcccaataaaaaactacgagaatattttaaatattatatgcctggtgttggtaccgcctttcctgaaattggtgaatataatttcaccaccactggtctaatgtatgcaaccggtggcgaaaatcgccttaattgggcattattaatgttagcgaataccttcagtgtagctgcaggtaataacaaattagatatctctaactgtagagaatatttaaaagatatggcaaccccgacctacctacccattgaaggaaaagcgcgtcgccgtgcagttattcattctttaattaataaaaaagaaattattgaaggattacaatctgcccctaaaacactcgcgattaagttatatgtgtatggtttttctcgcggtgccgcagaagctcgagcgtttattaattgggtaacacaattatttgataccccagaaggggctgataaacccgttcaacaactatgtggtattgacgtaaaagttgagtttatcggtattttagatactgtaccctcggtggggatagtgcatttagctccattcttctcagggcatatggattgggctaatggcactcaacagctacccgacgaaaagatatttccaaattttataaggtgttgccgccattttattgcagcccatgaacagcgttattgttttccacttgataccgtaaggcgtcctaccagctggaataaaaataacaaaggggaataccccaaaatatcagatattgaagaagtggtttatccaggtgttcactcagatattggtggcggttatgtcgtcggtgaccaaggcaaagcctttaatgaccccacgatgctatcatcacatattgtgttacatgatctttatctgtcagcttttcaggctggggcgcctattaatgttgtggctaattcaccgttagctgcttcaaaagaggttatgtgtgaccttattgatcccaaaacactctatttatttgaaataaaccccactgtaattcaacgttttaatgcttggcgaaatatcacattaggtttgtcatctttatcaccttgccaatcttctgaaattttcaatgcctgtcgctctaatatgtcattagaagaaatggtcgaaaaacagatggcttggatgaccgcttggcgcattgatcgatatgcaaaaatgagctatgcaaataaagatttttataaaaatgcagtagaagaagatgcggatacaatagaaaagaaaaaggaagagtcgaaaaaggaggaagataaactaaaggcattacaaaaggaaaaaattaaagctaaaacagatgctcttgaagcagattcacttaccggatctcggccttacgaaccaacgttatgtaaaacacaattaaaagaagctgccgaagaatttagagctgattattatgaacaacgcagaacagtacgaaactggaagcaattttctgttgataatttattatctaatatgatgtgtttattgaataccgatgatgagaaaatagaatatctgcgaatgaaaaaaagtggtgatgatatttatcggcaaggaaaaggcttccctttatttttagaaaaagaccatttagaacccgatggtcaattaacagctgaactttttgatgaacagctacacgattctcgtgcttggtttatgcatgatacattacaatcccgtgagccgtgggcaagttattttagctatagaatgatttatgcgggaagtgagaccaataaatcgctatctgtggtagctgccgcagggcaactgatcggtattgccacttttatcggcggtatggattatgttattaaacaaaaaaacattaaaaatgcattaggcgctttagcaggaacaataggtgcaatgtcaattggatacgaaatcgtcaatgcaacaaccggcctcacattacccatagatccgaccgatgtacaaccaaccaaagatacaggccccattcaggaaatggccaaagcacaagcgatgattaaccaaacccaaggtgtgattgagagtttatctcagataattgaaccacaaaaaatactacgactttcttaa

SEQ ID NO: 312875 - DNA, 198 bp, Proteus mirabilis
atgttaccgccgatatggccttcagatggggttgactccccggcattctggttggccgtgctgatgtggtgcgtgttctttgttgtgatgagactcctggggaaaaaaaaacgtcctgcccgccgtcatcgtcactgtcacgggaaagaatcgcgtgtaccggaaaaagaaaatccgtcagatcctccctggggttga

SEQ ID NO: 312876 - DNA, 513 bp, Proteus mirabilis; identical to SEQ ID NO: 103757

SEQ ID NO: 312877 - DNA, 627 bp, Proteus mirabilis
atgaattctttatggatagcaattggtgtactgggtgtactagggcttctattcggcctgattttaggttattccgctcgtcgctttaaagtagaagaagatcctattgtggaaaaaattgatgccatattaccacagagtcagtgtggtcagtgtggtcatcctggttgccgcccttatgcagaagcggtagctaataatggagaaatgattaaccgttgtgcaccgggtggtgaacaggttatgttaaaaattgccgaactgatgggggttgatccacaaccacttgacggtgatgaagaagcattaaatccggtgagaaaagtggctttaattgatgaagacaactgcatcgggtgcacaaaatgtattcaagcatgcccagtggatgccatcgtcggcgctactcgtgcaatgcacaccataatagaagatctctgcacagggtgtgatttatgtgttccaccttgtccaacagactgtattactttagttcctgtgaaaatgacgacctctaattggaaatgggatttaaatactatccctgtaagaaatattcctgcagagccagaagaaacacccgaagatgaaccgtcattaaaggcggaggataacgctcatgtttaa

SEQ ID NO: 312878 - DNA, 276 bp, Proteus mirabilis
ttggggattttcttacctttaattaccaccaactgtgccgtattaggggtcgcgttactgaatatcaatcaatcacatacctttatgcaatcagcagtatatggttttggtgctgcggtaggattctccttagttatggtgttatttgcagccattagagaaagactggctgtcgccaatattcctgctcctttcaaaggctcttctattggtttaattactgcgggtttaatgtctcttgcctttatgggttttagtggtttggtgaaactgtaa

SEQ ID NO: 312879 - DNA, 996 bp, Proteus mirabilis
  misc_feature (966)..(975): n is a, c, g, or t
atgaataaaactattagtgaacatgtagatgtcgcgctcattggtgctggcattatgagtgcaacacttggcacacttcttaaagaactagagcctaatttaaaagtcgcaatgtttgaaagacttaatgattgtggtcaagagagctctaactcatggaataacgcgggaacaggacatgctgctaactgtgagctaaattatacgccaccaaatcctgacggcaccgttaatatcagtaaagcgttagaagtgaacaccgagttcgatttatcgcgccaattatggtcttatttagtaacaaaaggaaaaattgccgatccgcgtgattttattcatgcttgccctcatatgagttttgtttggggtgcagataacgttaaattccttcatcaacgctatcgccaaatgtctgccaatcactgttatgaaaatatgcaatacagtgaagacaaacagcaaattgaagattgggcgccattaattatggaagggcgtgatccgaatcaacagcttgctgtcacccgagtagctactggtactgatgtcgattatggcgcattaacacatctattagttaagcaactttctcaacaagataattttgagttgcactataaacatgatgttattgatatcaaaagaaatgagactgatggttggaatatcgaagttaaagatctcaccacccatgataaatacctaattacagctaaatatgtatttgttggtgccggtggacgcgctatcgatttactccaaaaatcaggtattccagaaggtaaaggctacggtggtttccctgttagtggtatttggctacgttgtgatgaagataaaatcagctctcgccatcatgccaaagtttatggaaaagcagatgtaggctcaccaccgatgtctgtcccccatcttgatactcgtattattgcaggtaaacgctccctactctttggcccttatgcnnnnnnnnnngtttttcaagtaaatttttaa

SEQ ID NO: 312880 - DNA, 1068 bp, Proteus mirabilis
  misc_feature (82)..(91): n is a, c, g, or t
atggaatcgaacaccagctcaaagagggctcgcaccactatttgcccccaaaggaactattgtagcttttgctacttcaccnnnnnnnnnncttcaccaggggaagttgctggtgatggagtcggaagaaatggttgttacacagaagcgttgcttaagcatatcacatctccagatattccaattgaggagatgttcaagagagttagaaattcccttgctgttattacaaaaaataaacagacatcatgggagcatacatcactagctggtgattttttctttaatattagcctagtcaactcgatagggaaatacgcaaaggaatctatagctgacaatctttttcagattaaatcagatgttaagcttcactcaataatatcaaaattaaaactgcatgattggtataaacaaactccggcagcaagaaacgtaacgagtcaggacataaattcttcagatatagattccgcttttgtatttggccgaaatatttatcaggcatcatgcgggagtgctcatggtgcaagtgagtttatatcatcatttcgagaaagaacgcaggatacaaacttagagctaagaattgctattttggatggaatgttatttgagatatttttcaattcaaaaggcgagttgagagatagctttaaaacgtcacaatttaatgaggtttttgagtatcagaaatattcagagtttgatgaatcgtttaaatttatatcagatatattggcaatatatccaaatcgattccacataattccaggtaaaaacagggacgtatcggttgatgtagaaaccaaaagaaatgctaatgatgaatacaaggtaattggtatatacttgggtggcgtgaatattcttagggaagatgaggattacagtttctacgaagaggatgggaaagttccatatgaagcaatcagaaaatcagcttttgagtggagattatctgaagaaatgctagtatcgaaagcaaggttgactattaattttgactttgtggcagatagtaaatcaaaaatattgtttccatatgggtatactgtatcgaagtaa

SEQ ID NO: 312881 - DNA, 336 bp, Proteus mirabilis
atgacgctattaattggcggtggagtacttgcaatggtcagtggtgcaagacgtttaggggcattgtcctttattatcggtgccataattacctttgccgcacgctccggttatgtcagtttcctaagctttaatggcccagaattaagtgctgagcaatcactgttttggggtttccaattagcagtattagcattaggtattgtggttgtcgggtttagtgcattaaaagcgcaaacctcaaaagtgaccttagcaacttgtgccgcagcggtcgtaattgctgaattatccggtcgcattgccttttataacttatggcatataaccatgtaa

SEQ ID NO: 312882 - DNA, 1062 bp, Proteus mirabilis
atgactcaaccaattacagcaacagacttttcaattaatgatatgaaaacattaattgaaacaatgcaaatttataaaaaagataaccatgacaaagggataacacgtattgcctatagcgaagaagatgaagcagcccatctctatcttgctagtgtaatgaaagaggcaggccttgaagtctatcgtgacggtattggcacactctacgctcgcttaccggggcaagatagaacattacccgccgtaggaacaggctctcaccttgataccgttccccaagggggcgcttatgatggcgccttaggagttattgctggtttttatgctttgatgcaatacaaaccacaacaactgaaacgtgatctagagttaattgtattccgagcagaagaatcgagccgatttgggttttcatgtatcggaagtaaagtgctaacaggaaaaattgaccgtactcgatgggaacaaaatagagatgatgaaggtaataatttctttgatgttttaaaatcccttggttatcagcatgaaaacttagatcaatgtttacttaaatcagaccgttatagtgcatttgttgaattacatattgaacaaggtaaacgtctagaaaacgatcaaaaaacaattggaattgtcaatggtatcgctgcgccaacacgcttttcagtcaccgtaaatggccatgcagaccactctggtgcaacgccaatgtatcaacgtcaagatgcgttagtggcgagtgcgggtattattactgatatcaatcatgctgcctgtacggaagcggtatacggcaccgtaggtaccattggtaaacttaatgtcataccaaactcgatgaacgttattccagggcaagtaaaattctccgtggatattcgtggtattgatacggacagtattcaacgtgttgtacagcgtttaacaaacagtgttgagaaagcagaaaaagattttggtgtaaaaataatagtgcaacctatttcggctgaatcaccagtaaaactggatgactcaatttgccaagttattgaaaatacgatatcaattatatga

SEQ ID NO: 312883 - DNA, 186 bp, Proteus mirabilis
atgactatgttaagtggtgccggtcatgactcaatgaatatggcatctttatacccgacagcgatgatttttaccccctctgttgcggggattagtcatcacccagatgaatttacggagtttagtgatattgcaatagctgcagatatcttagcggaaacattaggtgttctagctaatcaataa

SEQ ID NO: 312884 - DNA, 882 bp, Proteus mirabilis; identical to SEQ ID NO: 304798

SEQ ID NO: 312885 - DNA, 381 bp, Proteus mirabilis
atggatgaaagagcaacagcatggagcgctttggatagtgcaaaagctgtcttgaaaggtgggttttcgctaagtaatcgctttatctttatggggcaatctcaaggggctcatgctgcatttgcctctgtcggctatcagcctgaatatgcaccagaattaaatatcttaggtgcgatagtgacagggacgccttattttagtgataatctacttgaaaactttattagtgatggtgttcaagatgaaggtgatagaaagctaccttacgcgatgtacttatatctttctgctgctgataaaaatccaaacttaaaagtggaagattatttccaagaccttatgttgaaaaagcgaaaacgctttgtatcagtccattaa

SEQ ID NO: 312886 - DNA, 315 bp, Proteus mirabilis
atggataataaattaaacgcatcaaatagcttaaaacctaagttttacgagctattagagcaagaagcgtcaagtttaaattatagaaaacttcttgttgataagcccgtatttatagggattggtttagaagatattcatgtgttaacccgttggcaacaagagtttgcaagagatgtattggaagcaggcacaaatgcatatgtatatgaatatccgaatattggtcatttagatgtatacaatgtctctttgcgaaattcagtgccttttgtatttgaactgatgaaaaatgagcatagcaaaatagactaa

SEQ ID NO: 312887 - DNA, 309 bp, Proteus mirabilis
atgtcacagttaaatacatcatcaacaccattgcctgcatcactaaaaaagcgtggcttttttaccatattattgtgggatataccttggcagattattggcattttattggcttcacttttgtttagtttggtattggaatatatcggtattttcttcttttgggagaaagagggagcgcaacatagttaccaaattatgctgattgaacgaacttattttgctgagagttttacacaaagtatatttgtattctcaccagtgataacaacaatttattggatcactgatttttcacaagggatatag

SEQ ID NO: 312888 - DNA, 660 bp, Proteus mirabilis
atggaaagctcaacacaattaatcttgatcctagctcttgccacattggctccttttattattgctgcaggaacttgttatttaaagttttctatcgttttagtcatgactcgtaatgcattaggtgtacagcaagttccttctaatatggtacttaatgctatcgctttaatgatggctctttttgttatgacaccaattactaaaaacatttgttactatattattgaaaataaagtggatatgtcatctccagatgcgattgagtcattttcaaatgaggcgttaggcgattataaaaaatacctttatcattactcagatcctgatttattagctttttttgaacaagcgcaagagaatagaccgaatagtgatggtgataaagaaaacatagaaaattcactcttatcattattaccggcatatgcacttagtgagataaaatctgcttttattataggtttctatctttatttgccttttattgttattgacttagttgtctcatgcattttattagcattaggtatgatgatgatgagccctattacattatctgtacctttaaaacttattttatttatcgctatggatggttggggactgttatctaagggactcattaatcaatatcttgatttgatggcggtgaactag

SEQ ID NO: 312889 - DNA, 282 bp, Proteus mirabilis
atgtctactgcaacaaatctgaatgaactacaggaacaagttcgctcccgctataatggattaagtaaaaggctacagcaggttgcacattatcttttggataataaaaacagtgtagcatttgatacaatcgcgatccttgcagataaagcaaatgttcctccatcaacattaatccgttttgccaatgcatttcatttcaaaggatttaatgaaatgaaacttttatttcaacgtcatttaatgggtgaaatacaaaaaggaaccaccaaacttaaatga

SEQ ID NO: 312890 - DNA, 306 bp, Proteus mirabilis
atggattcaattgacgaactaccaattgaagagttcattgagctattaaataaaggaactgagaaaaaaccacacgaagaaaacaatcgaatcatcgagtccattcagcactgttcatgggatgaatatagtaaaaagaaagctatattagcgtccagatacttgaactccgtgggtaaaggtgaaaatgcactattactatctgatgtattagaaagaaaccttgagaaaataggtacagatgaataccaagaatttgtagtgcctcaatatattaaggatgggattgactttctatgtgcataa

SEQ ID NO: 312891 - DNA, 261 bp, Proteus mirabilis
atggagcaattaaaggtatcatcatcattcaaagaagaattttctcctagcgaaatggcatataaaaacgccattcgcgcctctaataaattagatctaattttgccagatcacccaaaactgcataaaatttatccagtatctattttatgtgaacatgagcagtgcttaattataaataaagatggcgctatatacagtggaggtggtggtcaccttacagatattggagcaaggatgatattggataagtttctttaa

SEQ ID NO: 312892 - DNA, 975 bp, Proteus mirabilis
atgataaattttagctcattttatcaacatattgcgcaagatgaacggttatttcattggcttgatacgctgccggcacaattatcagaatggcgcgcccatgctttacatggccattttgcttcatgggaaagaatgctggaaaacttacctgagattactcccactgaacttaatttaaagcaaggcgttatcgccaataaaaccccagcattaagtaccggtgaacaacttggtttaacgaatattctaaaagcgttaatgccatggcgcaaaggccctttttctctttatggtgtcaatattgatactgaatggcgttcagattggaaatgggatcgcgtattgccccatctttcgcctcttaaaggccgattagttttagatgttggttgtggcagtggttatcatatgtggcgaatgcttggtgaaggggctgattttgttgtcggtatcgatcccactcagctctttttatgccaatttgaagcagtcagaaaattattaggtaacgatcagcgtgcccatttaattcctgtcggcattgaacaaatgccagaactaaatgcttttgatacggtattttcaatgggggttctttaccaccgtcgttcaccacttgatcatctttggcaattgaaaaatcagctcgtttctggtggtgaattagtattagagagtcttgtgattgatggtgatgaattccaatgtttaattcctggtgagcgttatgcacagatgcgtaatgtgtactttataccgtcagccaaaatgctcaaagtatggttagaaaaatgcggttttaaagatgtacgcattgttgatgaaaatgtcacatcactcgaagagcaacgtaaaacggattggatggtgactgattcattagaagcattcttagatcctctcgatcacaccaaaaccgttgaaggctatccagcgcctaaacgggcaattttaattgcgactaaaccttaa

SEQ ID NO: 312893 - DNA, 318 bp, Proteus mirabilis
atgaagcagaaaaatctggcatttgatcataatgaactgattgcgcaagcgagagagcgattaaagcaaaaatcgctttattctattgtgccgggatttgcgttacctgaagtgtttactttgcctgaattacagcatgtgcatgagatattgataggtaaagagatccagaaaaaatcttttagacgacggattgaacaagccgacttattaattgataccggagaaaaacgtgctgagaagggacgccctgctagtctctatcgacttaagaagtcgtctgcggattatcgttttattcgtaatcttgaattttaa

SEQ ID NO: 312894 - DNA, 3342 bp, Proteus mirabilis
  misc_feature (3322)..(3331): n is a, c, g, or t
ttgagaaaacgcttacgtggcgttgataaaataagtaaagaaacgtcgaaacacgcggtattaagcgagattgagcaggatattattgttgcaaaacagcgtatattaaatcgacaagctcactgtcctaaaattgtttatccagaaaacttgcctgttagccagaaaaaagaggctatctacaatgcaatcaaagataaccaagtggttattattgcaggggaaacgggatcgggtaaaacaactcagatcccgaaaatttgtctcgaattagggcgaggcgtaaaaggttatattgggcatacgcagcctcgacgtttagctgcacgctctgtcgcagagcgaattgctcatgaattaaacacaacattaggtgagtctgtcggttataaagttcgttttagtgatcatgttggtgataacacgctagttaagttaatgactgacgggattttattagctgaactacaacaagataagctgttattacaatatgatactattattatcgatgaagcccatgaacgtagcttaaatattgactttattcttggttatttaaagcagcttttacccaaacgcccagatttaaaagtgattattacttctgccactatcgatcctgagcgtttctctaagcattttaatcaagctcctattattgaggtatctggccgaacttatccggtcgaagtgcgctatcgtcctattggtggtgatgctttggatagtgataaggatatgactgagggcattattgatgcaattgacgagttaagtcgagaaagtgcgggtgatattcttatttttatgagcggtgagcgcgagataagggataccgcagaggcattaaataaattacaactacgtcataccgaagttttaccactatttgctcgtctttctaatagtgaacaaaaccggatatttcagcctcataccggaagacgcatcatattggcaaccaatgttgccgaaacttctcttacggtacctggcattaaatatgtgattgatacgggttatgcacgtattagtcgatacagttatcgaaccaaagttcagcgcttacccatagagcctatctctcaagcttctgcggatcagagaaaagggcgttgcggtcgtgtttctgatggtatttgtattcgtctttattctgaagatgattttatttcccgtgcgcaatttaccgatcctgaaatactaagaaccaatcttgcttcggttattttacaaatgacctcgataggattaggggatattagcggatttccttttgtacaagcgcccgataaacgcaatatacaagatggtgtacgcttattagaagagctgggtgccttacaagagggtactgataataaaggtgcttatcgtttgacgccgatggggaaacaattagctcagcttcctatcgatccaagattagcgagaatggttcttgaagcacgcaaatatggtgcagttagagaattaatggtgatcacatcggcgctttctattcaagatcctcgtgaaagaccgatggacaagcaacaagcatcagatgaaaaacatcgtcgtttccaagataaagattcagattttctttcattactcaatttatgggactatttaaaaactcagcagaaagagttgagtcactctcagtttcggaaacactgtcgccaagagtttttaaactttatgcgagttagggaatggcaagatgtctatacgcaactacgccaagttgtgaaggaattaggttttccaattaatagccaaccggccgattttaaaagtattcatgtggctttattaagtgggctattatcacatatcggacaaaaagatagcgataagcaagagtttactggcgcgagaaatgcgcgttttgctatttatcccggctctgggttatttaaaaaaccgccaaaatggaccatggtggcagaattagtcgaaacatcacggttatgggggcgcattgctgcacgcattgaagcggaatggattgaacctatcgcgacccacttagttaaatatcactatagtgagcctcattggtcaaaagcacagggtgcggtaatggctaatgaaaaagtcaccttatatggtttacctattgtggcctcacgattagtaaattatggcaaaattgatccactattatgtcgagagttatttattcgccatgcgttggtagagggcgattggcaaactcggcatgcttttttccgtgaaaatttaaaattacgtaccgaggttgaagagctagagcataaatcacgtcgtcgcgatattttagtagatgatgaaacgctgtttacattctacgatcaacgaataccacaagatgttatctctacccgccattttgataaatggtggaaaatagcgcaaaagaattcacctgatttgctgagctttgaaaaaagcatgcttatcaaagaagatgctaaacgtgttagtgcattagattatccaaattattggcatcaagataatttaaaattacgcttaacttatcagtttgagccaggtacagcagcagatggcgttactgtccatattccattaccgattttaaatcaggttaaagatgaaggttttgattggcaaattccgggtattcgtcatgaattagtcgttgccttaataaaatcattacctaaacctatacgtcgtaattttgttcctgcgcctaactacgcttcagcttttttagaacgagtggttacccctgaaggtgaattactcgataaattagaaaaagagctacgtagaatgaccggcgttacggtcgaacgtgatagttggcaacttgagcaagtggccgatcacttaaaaatgacttttcgagttgttggtgacaacaataaaacccttgcggaaggaaaagatcttaatcagttaaaagcacgtttaaaggacaaagttcaagaaacattatcagcggtagcagatgatggtattgagcagcaagatttacatatttggagttttggtgacttgccacaacgctacgaacaaaagcgtggtagctattcagttaaagcctatccggcattagtggatgaaaagaatagtgttggtatcaagctatttgaaacagaaacagagcaacaagcggcaatgtggcaggggataagacggttattactacttaatattccttcacccattaaatacttgcatgaaaaattgcctaataaagcaaaattaggtctttattttaatccttatggcaaggtgctagatctgattgatgactgtatcgcttgtggggttgataaactcattgcttcttatgggggattaatatggcaagaagagnnnnnnnnnngcacaacttaa

SEQ ID NO: 312895 - DNA, 249 bp, Proteus mirabilis
atggagaaattagcgattgatcctaaccgtgatagagcacaaatgagccgagttgaaaatgtcattttgcagtggcaacagtggttagctaagttaaccgagaagcaaaaacaacaagaagaggtacaaaatattcgttggatgatagaggaattaagagtgagtttatttgctcaacagataggaacgccttatcccatctctgataaacgcatcttacaagctattgagtctatctcattaagttaa

SEQ ID NO: 312896 - DNA, 744 bp, Proteus mirabilis
atgaagtatcgcctgtgcggtgttgctcttttagtagctttactttcaggatgtgcaagcacacctaacaatggtgacagtcgttctgatcccttggaagggtttaaccgccagatgtttaattttaactattatgttttagatccttacgtattacgacctgtagccgtagtatggcgtgattatgttccaccaccagcacgtaatggactatcgaatttcttaggtaaccttgaagagccagcaagtatgctaaatagcatcttacgtggagattttgaaaaaggggctaagcatttcgggcgtttttggatcaataccgtatttggtattggtggtttaatcgatgttgcaggaatgtctagagaatcaatggaaaaagaagttcctgtaaggtttggtagtacgttagggcattatggtgtgggatatggcccttatgtggtattaccgggctatggcagctttacagtacgagaagaggggggcgattgggctgatgccacctatccagtactgagttacctcactttctggatgtctgcgggtaaatgggcccttgaaggtattgaaacgcgagctcaattattagattcagatgcaattttacaaaactcatctgatccatatttaatgatgcgtgaagcctatttccaaaaaaatgatttcgatgctaatggcgggaaaacaggtgaaaatccaaacgcaaaagcgattgaagatgatttagactctatcgattaa

SEQ ID NO: 312897 - DNA, 432 bp, Proteus mirabilis; identical to SEQ ID NO: 14471

SEQ ID NO: 312898 - DNA, 873 bp, Proteus mirabilis
atgaccagaattgttccaattatatcaacaaaaggcggggccggaaagtcaaccaaagccagcaatattgcgggtttttgtgctgatgcagggttaaaaaccctgttgatcgacggcgatcattcccagccgacagccagcagtctgtttaaacttgaatatgaagcaccaaacggcttgtttgagttgttaatgcaactgaccgatctttcccggccggataccatcatatcacgctccgttatccctaatctggatatcatcatttctaacgatccgcatgatcgtctccctgcggctatattgcatgcacctgacggcagaatgcgtctgcgtaatattctgcaacatccgttattcgcttcttacgatgttattatcattgattcaaaaggcgcggcttcggtgatgctggaaaccattttgttagctgccaccgattatgctgtcgggataatcaaacctattttgccggatacgcgtgaatttttacggggaacactgggattaatcggcgggctggtgccgctgacggcttacggaattcccctgccggcaatacgtattcttgctaattgtgttgaagatacggtgttagatcgtgcaacactgactgaattaactcagattattgaccaaaaagcgtacccctttgcggagtcgatttctctttcgttactgaaaaccgctgttcccaaactggaaatatttaaaaatggtcatgcacagggacaaccggtgcatcgtctggaataccggactcagcgtaaaacaccggcagccgcagtcattatgcatcatcttgtttcagagctgtttccggaatggaaaacccgttttgatgatgtgctgaaacgggaggtgcgtccatga

SEQ ID NO: 312899 - DNA, 1398 bp, Proteus mirabilis
gtggaattgaacagtgctctggtgtccggcggggcggcgtttgtgtgtgcggtagcgccctgggcagtggcattgtctccgtccgtgagttatgtcaccgccggtgcgtttgccggtttttccgcattgcgggcacatcagggattccgggtattacgttaccgccggaatctccggcgtctgccccgctatcaggtgacgtcggcacaggtgccggtcagccggcagcgtctgtttctgggaaaagggtttcagtggcagcaaaaacacacgcaacgcctgctggaaacccagcgtccggaagtggagcggtatgttcagccgccggcacattaccggctggcccggcagtttgaactccgttttgaatcccgttttccggcggtttgccggcttttgcaaaaagacagttggctgaatccggtccgcccgctgacgccggtgggggggaatccggtgttacacggtgtggagccggatgaggtgaatgtgaccatggatttgcgtgaacgggttggtcatatgctggtactggggaccacccgtgtcggcaaaacccgtctggcggaagtgctgatcactcaggatatccgccgggggaatatcacgattgtttttgatccgaaaggggatgcggatttattgcgccggatgtgggcggaagcgcatcgtgcggggcgcagtgaggagttttatgtttttcacttgggctggcctgatatcagtgcccgttataacgccatcgggcgttttggccgagtatcggaagtcgcggggcgggttgccggccagttatccggggaagggaacagcgcggcgttccgggagtttgcctggcggtttgttaatatcattgcccgggcactggttgctctgggggagcgtccggattatgccaaaattttacgttatgtcaccaatatcggggaactctatcagacatattcgatgcaggtgattaaagcacaactacctgatttgtttgcccaaatcgagaatgcgcagaacgcgctgacggtcgaggatgtgccccgtcatctgcaaagtgatccgaaagctgtggctatctgggcaacggagctggcgttaagtagtgagaaagggaaaaaaatctatgatccgattttggacgggctgcgcagtgcgatccgttatgaccggacctattttgataaaatagtggcttctctgctgccgttactggaaaaactgactaccggaaaaactgccgccctgttgtcgccggattacaccaatatgcaggatccccgtccgatttttgactggcagcaggtgattcggaaaaaaggattgtatatgtcgggctggatgcgttatcggatgcggaagtggcggcagcggtggggaattccatgtttgcggatttggtctcggtag

SEQ ID NO: 312900 - DNA, 201 bp, Proteus mirabilis; identical to SEQ ID NO: 312669

SEQ ID NO: 312901 - DNA, 741 bp, Proteus mirabilis; identical to SEQ ID NO: 190889

SEQ ID NO: 312902 - DNA, 186 bp, Proteus mirabilis
atggaatattatctgcttgtggttatcaagtttattattggttttacaataattttggctcatatgaatatttcagggaagacacaactctctcaactaactcccattgattttattggtaattttgttttaggggggattatgggaggggttatttacacagatgcaatcccgctttaccaataa

SEQ ID NO: 312903 - DNA, 297 bp, Proteus mirabilis
atgggtattcgcctgttgtattggcggttatatgccgtagtacacgtttttattggggtcttttctatgttttttcaagataaaaataatattttgggtatacctaaattgccaccaagagccatgtgtggcattgtttcttttattagtacagcaaaaacaatgggcttaaatagccttatgtttgcaccttggttctcttcatggggggtatcttggatgattgcgtttccaaccgttttattcgttttaccctttgcaagaaagctatcactcttattagtaaaaccacattaa

SEQ ID NO: 312904 - DNA, 306 bp, Proteus mirabilis; identical to SEQ ID NO: 306412

SEQ ID NO: 312905 - DNA, 975 bp, Proteus mirabilis; identical to SEQ ID NO: 279294

SEQ ID NO: 312906 - DNA, 624 bp, Proteus mirabilis
atgcttataaaccctgaagtatcaacgagagaggatatcgagtcctattctgatgttatttcagcaacaattattaataattcaagtgaaagtataagagtagaaccgtgtatagatctagaaatgctgggaaaaactttatctgattattcagtcttgagctctaagcttcacgaaaatgaatcggctctaatcggaattggaacaattggcgacactgactttagtgacttcaagaaattaaataataggtttgcttttaatggcaatgttgaagatattctttccaatgtaataaaacaccacaaaagaaaatctaaatttcatgtaaatgtcttagcaaacaaaggggataatatttggaaactagaagagctattaactgaaaatgtatttgcagcaaaagttgcaaataatgattggctaggtagttatcagtctggacttatttctcctattggaccaaatgatttgatggaagcgattatagaatatgatgaaatcatgccagcaaaaggaaagaaaaaaacaaaaagtaagtgtaaaaatgctaaaataatagaggttattaatatcgaaagaaatgcgggtgtacaagatgacttcttccaaaaacgagaatga

SEQ ID NO: 312907 - DNA, 312 bp, Proteus mirabilis
atggaacagggaacagcgcagcgccggcaggcactgtttgtgcaggcggaaaattgtagcgcgtgtgatgcccgtctggctactctgctggccggcaaacagccgtttgatatttatgtgctggggacaaagggggatgataaccgcctgagggcttgggccagacaaaaaaatatcccggcagagcgcgtcagaaagcgggaaattacgttaaatcatgatggcggtctctcgcttcagtacggactgaccaccacaccggtggtgatgcaacagttaccggatgggcggtggcgtccgctcacaccttaa

SEQ ID NO: 312908 - DNA, 312 bp, Proteus mirabilis; identical to SEQ ID NO: 312907

SEQ ID NO: 312909 - DNA, 312 bp, Proteus mirabilis; identical to SEQ ID NO: 312907

SEQ ID NO: 312910 - DNA, 396 bp, Proteus mirabilis
atggcaaatatcatctatctgtcaataacaggcaacaaacaaggattgatttcacggggagcttcaacgattgattctattggtaataaataccagattggtcatgaagatgaaatactaatatttgaattttcctctaatatttctattagccaaaatgttagttttcaaccaatagatattcgtaagccaattgataaatcatccccattgcttgctcaggcattgacaaataatgaaatattaacttgtaatttttcattttatcgtacctctatgtctggtggtgattctcagccagaagaaagtctttcaatacgatttaaatcagtggtgtgggaacacgtaacggcaggaacaagttcttatagcatttgggatgaaagggggttctga

SEQ ID NO: 312911 - DNA, 609 bp, Proteus mirabilis
ttggataaaatagcgttatttacactttactgtgaagaattaaattgttggagaacacccgcacgatttatttctgatggcgctcgatttcactattttcatagtgaaaataatgtcgatcctcactatgaaccttatcctgagcaaggaagtgaagttattgtgctttgtgggctaccgggaatgggcaaagatagttatattcgccaatattgtgcagatatgcctgtggtaagtttagatgcattacgtcagcagcataatataaaaccagatgatcgtgatgcgaatggatggattgcacaacttgccaaagagcaagcgagaatatatttaagagagcataagccttttgtttggaatgcaacaaatattactaaacaaatgcgtaatcaacttattgctctgttttatcgttatcaagctaaagtgacattggtatatattgaagtcccttatttgcaatggaaaaaacaaaacagcgcaagaaaggaagcggttcccgataaagtgatggaaagaatgttgagcaaactggaagtcccaacaccagaagaagcgattaacgtgatttattgggttgatggggaagctcaaaatttgatttaa

SEQ ID NO: 312912 - DNA, 294 bp, Proteus mirabilis
  misc_feature (229)..(238): n is a, c, g, or t
atgagtaaaattatggagttaatcggcactatttttcgatttagttggcaggcgattaactttatcaggaaactaatcttaaacgttattttcttctttctactttttatgggtgtaggactctatttcatcgtccaagaaacgcaaaaacctaccgattatcaaggtgcattactggttgatttaaaaggcgttattgttgaccaaacagctaaccaaaatcctttannnnnnnnnncgttgataccttacgcaaagcagcgactgaccccaaaattaaaggaatggtactaa

SEQ ID NO: 312913 - DNA, 135 bp, Proteus mirabilis
atgagccgtcctgccttggacggctatcttaatgcgttaaaccgcctgcatggcggtcagtcaacatcgacgaaatcgacaatgacacgcgtcaagtctcgccgtcaacgtcagcaaaaatcgaaacgaggttaa

SEQ ID NO: 312914 - DNA, 504 bp, Proteus mirabilis; identical to SEQ ID NO: 312395

SEQ ID NO: 312915 - DNA, 603 bp, Proteus mirabilis
ttgttagaccgttatctagcaaaaacagaaaccaaagaagagcaagagcaacttcaacaagaagagatggaagaagagatgcctgtgcctgtcgatatttgtgggcatgccattatcgtcggttatggtcgtgcaggtagtatgctagctgaaaagctacaaccacaagctatcccattggtcattattgaaaatagccgtaataaatttgctgagttaaaagaaaaaggcttaaacgccgtactcggtaatgctatgaccaaagaatcgctggcattagcgcgtgttgattgtgctaaatcgctactactaactattcctaacggttatgaagcagcagatatcgcagaaacggcaagaaaaatgaaccctgatcttaatattatcgttcgtgctcattttgacgatattattgttcgtgctaactatgatgaagaagcttcctttattcttgagaaaggggcaaatcatgtgataatcgatgaagatcagaccgcttcagcaatggctgagatgctaataaaagaagtcgagttcggttgcgccattgatgacacacctgaagagggtcaacaaattattgcacccaatgcagcgcaataa

SEQ ID NO: 312916 - DNA, 177 bp, Proteus mirabilis; identical to SEQ ID NO: 300843

SEQ ID NO: 312917 - DNA, 810 bp, Proteus mirabilis
atgtcgaagaaatcaaaaccggttcgtctttgtgttgaaggggcgacaacggacgggcgtcgagttgatcgcgaatggttaacccaaatcgcgaaaaactttgatcccacggtttatggtgcgcgagtcaatatcgatcactataactattcatgggcaccacgctttggtgatgtggagtcggtgtataccgaggaaattaaagaaggggcgctggcgggtaagttggcactgtatggtgtgatcaatccgacgcctgatttaattgaactcaataaaaaacgtcaaaaagtctatacctctgttgaaattgacccgagtttttcagataccggcgaagcgtatttagtcgggctggcggttaccgataaccccgcgagtttaggcactgaaatgctgcaatttagtgctaatgcacaaagtagcccgctttcagagcgcaaacaaagcaaagataacgtttttactgctgcagaagaaaatcactttgaatttattgatgaaaacccgcagagcgagaagccggggctttttagcattattaaagagatgttttctaaaaaacaacacagtgatgatgcgcgatttaccgatgtgcatcaggcggtggagctgtgcgcccaagaagtacaaaccctttctgcagaaattaccgcattaaaaaacgccgaccaaagcgaagcggtaaaagcgctcacgaaacaactcacggaattaaaaacccaatttgaaaatacagacgcctcgttctcacatcgtccgccggccacgggtggcgaaaataatagcgaagtgctgacggattgctaa

SEQ ID NO: 312918 - DNA, 1146 bp, Proteus mirabilis
atgaaaaaagaaactcgttttaaatttaatgcgtacctcacgcaactcggtaaaatttacggtgttagcgcacaagagtttagtgatacaaaggttcaaattgaaccgtctgccgcgcaaacgctggaaaccaatattcagcagtcagcagaatttttaacacacgttaatatcgtgcccgttgatgagcaagtgggtgaggccatcggtttaggtatcggctcaactatcgcaggcactaccgatacaacagcaaaagagcgcgaaacaagtgatccgattaagctgaccaaaaatagctatcattgccagaaaaccaattacgacacccaccttgattacgccaaaattgatatgtgggcgaagtttaccgactttcaaacccgtatccgcgatgtgattatccgtcgtcaggcattagaccgcattatgattggttttaatggtacacaccgcgccgataattctgatcggaaaaaataccccttactgcaagatgtgaattcaggctggttacaaaaagtacgcgagcgtgcgccagagcatgtgatgggcagtgaaacgaaagacggcgcaaccacagcgaagcctattatggtcggtaaagggcaagcttatcaaaatcttgatgcattagtgcaagatacggtcgatactgcgattgatcctgaatatcaggacgataccggtcttgttgtgatttgtgggcgtaaattattggctgataaatattttccactggttaataaagaccaagataacagtgaaaaactggcggcagataccattatcagtcagaaacgtattggtggtttgcctgctgtacgtgcgccgttctttcctggcaatgcattttttatcactcgccttgataacttgtcgatttatttccttgcggattctcgtcgtcgtcaagtgttagataacccaaaacgcgatcgcatcgaaaactacgagtcagtgaatgaagattttgtggttgaagattttcgcggtgtggcactggtcgaaaatattgtttttgaagatgtaaaagagacacagccagaaacaaaaaaagaggggggagcttctgaaaatgaagtcgtcaaagacgacaaagcagtaacagaagaaacaccaactgaaaataaaaaggcgaaataa

SEQ ID NO: 312919 - DNA, 669 bp, Proteus mirabilis
atggcattatctccgtgggaaaaacaccgcatgagccttagcgcgcaacagtccagccaattgggtgggcatgttagccgcaatacacagggctatcacatgatgctgttacgtcttgcgacagataaaaaagagctaaaacattttcagtcacgcgaacgcaaagaagcttataagcgcaagatattagccaattatcagccgtgggttgatggggcattgtccggtggtagcggtgtgcaagatgatgtcttaatgacgattttgctgtggaaaattgatgcgggagattatgagggggcgttagatattgctgtttacgcattagctaaccgtttagtgatccccggtgtgaaccgcaccacgggcaccgtgattgccgaagaaatcgccgattctgccatgcgagcgtatgccgtgaaatcaccggtttcattggcaacattagagcgtacacgtgctttgaccgatgatgaagatatgcctgatgaagtaagggcaaaactctacaaaatcttagggttagtgctacgcgataataatcgcccacaagaaagctactgcgtattaagtcgagccttagagttaaacatgaatatcggtgtgaaaaccgaattaaaacaactcgataaagtgcttaaagcccagcgtgacgctgaaaaagcatag

SEQ ID NO: 312920 - DNA, 315 bp, Proteus mirabilis; identical to SEQ ID NO: 310864

SEQ ID NO: 312921 - DNA, 897 bp, Proteus mirabilis; identical to SEQ ID NO: 190877

SEQ ID NO: 312922 - DNA, 294 bp, Proteus mirabilis
atgcttactattacggcactactagaaaataagacaagcgatcccgctcttagccattatcctggcctttcactgctattagaagacactgaaagcgaaagtaaaattttatttgatactggtaaagatctcacttttatcaataatgctaaaaaaatgaggatttctttattactaagccacatattattgcccatcctgatttattttcagtacgttattcagcactttttatggggcgccagtctattaaatttaagcgccttactccattttttaaccgacagcagctag

SEQ ID NO: 312923 - DNA, 1116 bp, Proteus mirabilis
atgaatacctatgttcagcgcgatgaaagccgcaatccatcacgtaaaatggattatgatgatacaactgttcgtaaccaaactgtctttatgtttggtgatcatatgttaagtgtcggcggtcaatatcgctatgaagagctgaaagatgaaggcaataagcttaaaggtaataataagctagatcgctatagttgggcgctgtttgctgaagatgagtggacattgacaaacgacttcgctttaaccgccggtttacggatggataaagatgaaaactttggtactcactggacaccgcgagtttatggtgtttggcatttagctgatgaatggacattaaaaggtggggtatctactggatatcgttcaccggatttacgtcaagcgacagctacttggggacaagggactggcggtggtcgttatgatgcagttatttacggtaatcctgacttaaaaccagaaaaatcggtgacagaggaaattggtattatttgggataatcgtgataacttaacggcaagtttgacgatttataatactgattttaaagataaaataacagaagttcgtcgttgcgatagtcgttcagacaaagcaccgggtatgcgcgattgtacattagctgatggtgttggtaatagtggcgacccttatgattttgtaagtgatagaactaacgttgataaagccaatatgcgcggtgttgaagttactgctaactggattatttctccagaatggaatttagcagcaaactacacgttcacagatacggaacaaaagagtggcgatttcaaaggtaagcctctgaataagcaaccgcgccatatggcaaacgcgaccttaaattgggaaaccacccctgaaatggaaacttgggcacgcattaatttccgtggtaagacatcagactatttatcacgtacttcaatgtctaagagcactccttcatatgcctttgttgatgtaggtactagctatagtctaacgaagcaactaaatctgatcggtggcgtctataatgtttttgatcgtcgcatcgaaagagataattacggttcaaccttagaaggccgtcgttataacatcggattaaactacaacttctag

SEQ ID NO: 312924 - DNA, 864 bp, Proteus mirabilis
  misc_feature (716)..(725): n is a, c, g, or t
atggtagtgttaaagaaaaataaaattgcgcttggcgttgttgctgctcttgcatcaagttttgtgatgacagcttccgcagaagatcctgaaaggttactggtgacaaccgcttcgggatttaaacagactgttgaagatgctccagcttctgtttcagttgtaactcgtgaacaattagaaacaaaatcatatcgtgatgtaactgatgcgctaaaagatgttccgggggtgctagtgacagggggcggtagcagctctgatattagtattcgtggtatggatcctaagtataccatgatcttagtcgatggtaagcgtgttgcatctcgtgaaacgcgtcctaatagtgataactcaggtattgaacaaggctggttaccgcctttacccgcgattgagcgtattgaggtagtacgaggcccaatgtcttctttatatggctctgatgccatgggaggcgttatcaatattattacgcgtaaagcgcaaaaagaatggaactttagtttacgtggtgacacaacgttgactgagcgtaaaaatgaagggaatacaggacaaggtagtttctatgctgcaggtccattgattgataatgtgttaggtctaaagctgcaagggcaatattctcaccgcggtgaagatagacgtgttgatggctataaccgtcagatcacggcaagtggtggcggtacattaagctggacaccagnnnnnnnnnnacaccagatgagaaaaataccgttgaatttgaatttaaaaaagataatcaacatcgtgattcacgtgttggctattcaaaatcagctgaacttgttaaaggaaaggcaccacaaagtagctttactgattatgagttaa

SEQ ID NO: 312925 - DNA, 1989 bp, Proteus mirabilis
atgtcattggcaggtgatattgatttaggtaccacggcagatatcggttccaatattttaactggctttaaactcgactctgaccaaatggggcgagtgagtgatgtgttagtcggcgcttttacccgttcaaataccagtttaaccatgcttggcgacacgatgaaatacgttgcaccggtggcgtcagggttaggggttgatttagaaaccgcggcagccgcaacgggtaaattgggtgatgcgggtattcaaggctcaatggcgggtacctcattacgggcaattttaggtagattggcagagcctccgaaacaagcggcgaaagcactagaagaactcggcattaaaacccgtgatgctaaagggaatttacgcgatttccctgaactgttagccgaattagataaaaaaaccgcaaaaatgggtaatgcgcaacgggcggggttctttaaacatattgccggtgaagaagctttttcggcgttatcggtactggccgaacaagcgggtaaaggggagttgcaaactcttgttgctgacttaaaacaagctaaaggtgaagcacaaaaagtcgcgggcaccatgacggataacttaagcggggatatgaaaaacctgcaatccgcatgggaagatttaggtattcaaatttttgacggtattgatagcccgctacggcagatatcacaaagcattacccgtgtgatttctaaagtcggtgtgtggatgaaagaaaaccctgaattggctaagacgttgacgatgatcggtttagcgatagcgggcattattaccacgctgggtattctctcgttatccattgcggcaatgttagggccattagccgccgcgaaattaagcttgtcaattttaggcattaaaggcggtagcgcgctcacactgttattaaaacccattaaattattaggcagtgcatttttaggattgggtaaagccatgttagctaatcctattttgttggctattgctgctatagcgggcgcgttttatctggtttataaaaactgggacaccattggcccctacgtttacaaggtatgggataccgttaaaagatatactgctatcgcgtggcaagcgctaaaagatactattaagagtgcatgggaggccatcaagtatatattctttaattggacaccgcttgggctcattattaaacattgggattcgatagtcagctacacccaaacaacatggacgatgataaaaactaaaatttcagatgtttgggaaggaattaaaacaacacttaaaaacggttggaataatattgttaagtctgtacaagaaacgtgggaaacaattaaaaccacgatatcaacaaaatgggatgagattgtagaagataccaaagcattaccggctaaatttttgcagtttggtagtgatctgattgatgccattattcaggggatcaaaaacaaatggacggactttaaaaatagcattggggaattggcaaccgcagctaaagaagcactcacccctgagtttatgaaaagtaatgatccgaaagtgcagtctgcgttagattcttacaacagcaactttgccggtatgtatgattccggcggttatattcctcgtggtaaatttggtattgcgggagaaaatggcccggaaattgtcgaaggccctgcgaatatcaccagtcgtaaacacactgcgatgttagcggctgccgcattatcgttaggcagcgccttttcgttacaggcacaaaatgccccgttgcacccgcacagtttgcccgttgaaaactatcgcccggcaccggctaacgtgaacattcaacaacagcgttatcaaggcgcgccggcacattatgaaattaatattcatcctcaaccgaatcaatccgcgcaagatatcgcacaacttgttatcgcggaaatcgaacgccgtgagcgtgaaaaacaagcacgattaaatagccgttatcaagacagtgaggtgtggtaa

SEQ ID NO: 312926 - DNA, 483 bp, Proteus mirabilis
atggaagagcaaacagaagttactcagcccgttagagtgaaaaatgccactctacaacgcgggctaaccaatcgtcatatccaattaatcgccattggtggtgctatcggtactggtttatttatgggttctgggaaaaccatttcgctagctgggccatcgattatttttgtttacatgataatcggctttgtcctgttctttgttatgcgagcgatgggagagctattattatcaaatttagaatataaatcgtttagcgattttgccggggatttattagggccttgggctggcttttttgttggatggagttattggttttgctgggttatcaccggtatcgctgatattgttgccattacctcctatattagttattgggcgcccaattttcctgaatggggaacgtcttttatttgtgtgctgacactacttattttgaatttagccacagtaaaattatttctattgtctctttaa

SEQ ID NO: 312927 - DNA, 537 bp, Proteus mirabilis
  misc_feature (497)..(506): n is a, c, g, or t
atgcgcttagaagttacctgtaaagatcgcatcgggttaacccgcgaattactcgatctgcttgtattaaaaaatatcgatttgcgtggaattgaaatctttcctattggtcttatttatctaaatttttcgcaaatcgattttaatatatttcaacctttaatggctgaaatcagaagaattgagggggttatcgatgttcgtactgtggcttttatgccatcagagcaagagcatcgagctatgtggacactattagaatcagtacctgtccctgtcttttctattaataccaaaggtcaaattaagttattaaacccagctacacggcatctgtttgaattagatgaaaatgataaaaatgaaaaatcttttaaccaactgatacctaactttaatatccatcgctggttagaacaaaaagatcctcatgctgaaattatctccatcaaattaaaaaaacaacattttgatatggagattgtgccaataaaacnnnnnnnnnnatatggagagtgtgccaataaaactgactga

SEQ ID NO: 312928 - DNA, 1092 bp, Proteus mirabilis
atggagagtgtgccaataaaactgactgatgataatcagtttaatcattgtgttggtgcactcattttattgaaatatcgcggaataattcatgagcatccgaaattaattgttaatgataattcggggtttgaacaagttattgctgttagcacccccatgaaacaattagttgaacgcgctaagaaaatggcaaaaatggatgatcctttattattagtgggggatacggggacgggcaaagatctatttgctaaggcttgccacttattaagtcctcgagccagagagccatttttaggccttaactgtgcctctatgcctgatgatgtggttgaaagtgagttatttggttatgcggcaggtgcatatcctaatgctatcgaaggtaaaaaaggcttttttgaacaagccaatcgaggcactgttttgctagatgaaattggcgaaatgtcgccacaaatgcaaattaaactcctgcgttttttaaatgatggtactttccgtcgtgttggggaagagcacgaagttaaagttgatgttcgaataatttgtgcaacacaaaaaaacttatgggaattagtacaaaaaggactatttagggaagatctctattatcgacttaatgtattgacattaactctaccaccgttgcgggaaagaaaagcggatatcatgccgttagcactgcattttattaatcaatattgtttagagcagaaagcatcaaaacctgttatttcccctgatttatctgcttatttagtacaatatggctggcctggtaatgttcgtcaattaagaaacacaatttatcaagccatggctcagttagtaggcaatacattgcgacctcaagatatcgccttgcctgagcatactgcggatactttatttgatgaagatttgcttgaaggctcgttagatgaaatgactaagcgatttgaagcttctattttaaggcgtctatatcgtgattatccaagtacacgtaaactggctaaacgtttaggtatttctcataccgcgatcgcaaataaattacgtgaatatgatttaacaagtaaaaaagcggataaaacagagaaataa

SEQ ID NO: 312929 - DNA, 579 bp, Proteus mirabilis; identical to SEQ ID NO: 301489

SEQ ID NO: 312930 - DNA, 426 bp, Proteus mirabilis
  misc_feature (401)..(410): n is a, c, g, or t
atgatactttggctgatctcttttggcttaatttcaggtattactacatggttatttggttttggcggtggttttgttactgtgcccctactctatactctgattcttacactttgggcgggtgatagcttagcgggtgaacatgctatgcaaattgctgtggctacctctgcgctcattatgctgttttccgctattattacgaccctaaaacaccataaggcgaaaaaaatagattggaaattaattatgatcttattttgggggattgcattcggtgggatcttcggtgccttacttacctcaaccgtccaaggtgaatggatccgatggatttttattggttatctatttctgactatcttagattgctattttcgccccggatttatggcgccacnnnnnnnnnngaaatacaaaaagtaa

SEQ ID NO: 312931 - DNA, 309 bp, Proteus mirabilis
atgaccgtacctttattacgccgtagaggtatgtcaatgactcaatcggctgccatggcaaacacattgacattccctttagcattaacggcaacactcacttatatcttattgtctttcactaccccgttagggaatagcgctggatttgttggctatatttggataaaagcagccgttattctaatctgtagtacatggataggattaaaaatagctgaacgttttttatcacgtataccggataaatggcatgctagagtttatccgctgttattgatattggtgttagtcgttatgctgaactaa

SEQ ID NO: 312932 - DNA, 984 bp, Proteus mirabilis
atgaaaagtgtcaataacgctataatcgaagattctgatgctatctatatggctcagcttaatgggcatggcggaattatgccgatcacggctaatagcatagcaagtaatgaaaggcctttttgggttcatctcgattatcgtaaacccaaaagtgatcagtggattaatcagactgagttacttcctcctatcgcaaaagatgtgcttttagctgaaaatgttcgacctaaggcacagcgtatcggggaaggagttattattaatttgcaaacgattaataacaaccccgatgatcggccggatgaactgattgcgtatcgtatttatattaatggtcaaatgattatttcgagccgacatcgtcgcgttaattccgttgattcggtgatccactctttagaagtgggtgatggtccagaaaacagtggtagttggttgatcactatggccgatgcagtgacagatgaaataggtgattttgttgaaacacttcatgaccaattaattgagttggaagatatgatcctcgatcagcaaattccggctcgaggtgaattggcattgctacgtaagcaactgattgtgttacgtcgttatatggcgccacaacgtgatgtattctcccgactctctatcgaaaaattaccttggatgagcgacagtgatcgcattagcttggttgaaatatcagaacgtctctcgcgtcgattagaagatttagatagtagtatttctcgtacagccgttattgctgatgaaattacttcaatgatggcagatgcgatgaacaggcgaacatataccatgtcattaatggcgatgctatttttgcccacgacctttttgacaggactatttggggttaatttaggggggatccccggtaatgaatttccttatggctttgctatattttgcttttcactgtttttcttgattgtgattgttgcttggtggttaaagcgtagtaggtggttgtga

SEQ ID NO: 312933 - DNA, 615 bp, Proteus mirabilis
atggttggtgtagaaatttacacaaataataggctgatacaattaaccgataaactcgaaacaatatgtgttttgagaaaagcaactcctgatgaactaacgtcatcatcaggccctcatgatagctatccgagaatctatgcgttaaatagccaatggatggttgctccgatttccaaggtaagcatacctcaacacggagttggtcttgaagtttatgatgagcaagggaaaatgaaattttcatctcttgctaagttggtctgctttgagaaatattatgatgtcaatgcggggagcgctggcaaaggctcattaagaatcgccggcaaaagtggtcatcggtatggcatgattaagactcgctctatggggtattttcataatacaaacatacgaagctacatagaccctgacacgtgggatgaagtttggacattcaaaagatatagcgagcgttatgtcttggttgatgatgtgggagggttaacatttgagtatcgatacgagttcttaggagaagaggatggctggataagtatgcctccgagtcgagaaggttctggattaatggaacaagggcttatgatagacgtttcaatgttagaagattaa

SEQ ID NO: 312934 - DNA, 384 bp, Proteus mirabilis; identical to SEQ ID NO: 300292

SEQ ID NO: 312935 - DNA, 456 bp, Proteus mirabilis; identical to SEQ ID NO: 300337

SEQ ID NO: 312936 - DNA, 237 bp, Proteus mirabilis
atgtttaagcgtttagccactgcccgttatttgcgaatgtcagcaaatgataaaggtgtcaccctctcttttgcccctcaagttgcaggcattgctgcggtgcatcattacggtttaaaagagcgtgtgcggggcaagtcattagaaatccaataccctgaaagaaagttactaggattttcaccagcggatatcaaacatatcgaaaatcaattactggaattcctttcccgttaa

SEQ ID NO: 312937 - DNA, 324 bp, Proteus mirabilis
atggctagtggtaagataacaataaggtctactgaaacaacgtttactggttattctaaatttcaaaataatatcagtttagataataataaaatatttaatataaaagatggcaccttatctgagaatagtaaggaggctgtaaatggttctcaattatttaaaatagatagtgttaaggctgataaggtttctttaaacaatacagataaaaatgtgagtgaaaatgctgatagtattaataagttagatgaaaatttaaagaaaacaaatcagcaaattgaaattaataccacaagtattaataaacataatatggaataa

SEQ ID NO: 312938 - DNA, 348 bp, Proteus mirabilis; identical to SEQ ID NO: 303956

SEQ ID NO: 312939 - DNA, 348 bp, Proteus mirabilis
atgaaagagccaatcgaagaacagaacaaagagcaagttgagtgggttgttgttaatggtgaccaagccacggtgaccttagaacaaccgattatgcgtggtgaaaccaaaattgaaaaagtgaccgtgcttaaacccaattcgggagcactacgcggtgtgcgtttacagccgttaatggatatggatgttgatagtatgatgcaggtgctaccacgcattactatgccaacactgacaaagcaagatgtgctgtctttagccgcgggcgacttggtaaacctgagtgtgcaggtggtcaattttttattaccgaagtcggttatgcccgattcccaagcgaattaa

SEQ ID NO: 312940 - DNA, 201 bp, Proteus mirabilis
atgtcagcaaatgataaaggtgtcaccctctcttttgcccctcaagttgcaggcattgctgcggtgcatcattacggtttaaaagagcgtgtgcggggcaagtcattagaaatccaataccctgaaagaaagttactaggattttcaccagcggatatcaaacatatcgaaaatcaattactggaattcctttcccgttaa

SEQ ID NO: 312941 - DNA, 231 bp, Proteus mirabilis
ttgcacccacacagtttgcccgttgaaaactatcgtcctgctccggctaatgtgaatattcaacaacagcgttatcaaagcgcgccggcacattatgaaattaatattcatcctcaaccaaaccaatccgcgcaagatattgcccagcttgttatcgcggaaattgagcgccgtgagcgtgaagaacaagcacgattaaatagccgttatcaagacagtgaggtgtggtaa

SEQ ID NO: 312942 - DNA, 258 bp, Proteus mirabilis
gtggttggttgggttgccggttacgattttaacctggtaaatcaaaaatttagcatcacaaattggcatgagatggagtttgatcgtaataaacgttatggcaatggcggaaaaaatggctttaatggagctgtcgctatttggtggcaccccaccgcttccattactacaggtattcaataccgctatgcttataaaaagttaggagaaaactttttacaagatggtgtgatctatagcttaaaatataacttctga

SEQ ID NO: 312943 - DNA, 762 bp, Proteus mirabilis; identical to SEQ ID NO: 301777

SEQ ID NO: 312944 - DNA, 831 bp, Proteus mirabilis
atgctgtttttgctcaaaaaatatcttggtagcctaatcatgccactaccgctgttattaataattgctttttttgcgcttattttactgtggtttactcgttggcaaaaaacaggaaaaagcgtactcactatcgtgattgtgttacttacgctgttaggcatgcaacctgtcgcagatactctattgatgccgagtgaaaaagcgtatcaagcacgttatgaattacgcgaaaactcaccacaagatgttaactacattgtcgttttagggggcggttttacttataaccctgaatgggcacctagtgctaacctgctaaataatagcttatttcgtgttgctgaaggcgtaaggctttattatcgttatcctaatgccagcttaatttttaccggtggtgccggcgtcaataaaataagtagcgccgaagtggctgcacaagttgcacaatcattaggtgttccagcagaaaaaacgatcgccctttctcaacctaaagataccgaagaagaagcgtatgaagtggataaacttatcggtaaacaaccttttttattggtgacctcagcaaaccatttagcgcgagcagaacgtttctttttagctagaggtatgcaccctattgttgcacctgctaatcagctagccattactacccctctgcatccttgggaaaaatataccccttccgcgtattattttcagcatagtgagcgagcatggtatgaatttatcggctcgatttggcaaaccataaaacctagcgaaccatctagtgtagaggaggttgttgagaataaaaatgaagctgacaatggcataaaatag

SEQ ID NO: 312945 - DNA, 774 bp, Proteus mirabilis
atgtcagaccgtaattttgacgatattgctgataaattctctcgcaatatctatggcacaacaaaaggaaaaatccgccaagcggtgatttgggatgatttacaacaattattaactcaactccctgatcgtccgttgcgtattttagatgcggggggtggtgaaggttatttttccagacaactggcaaaattagggcaccagataattttatgtgatctatcacaagagatgcttaaccgcgcacaaaaagcggctattgatgaaggtgttgtcaatcaaatgacgtttatttgttgtgcagcacaagagataaaccagcatctagatgatggtgttgacttaattctattccatgccgtattagagtggatcacagatcagaaaaacgccataaatgtccttaccgatatgctacttcctaatggtatcctatcgttaatgttttacaatgcgaatggtattgtcatgagaaatgctattttgggaaatttccatttggcaaatccggaaataccacgcagaagaaaacgctcattatccccacaaaatccgctacaacctgaggatgtttatcaatggttagcgtcattttcaatgacgattttaggaaaaacgggagtgcgtgtttttcatgactatttgcaaagtcgtcagttgcaaaataaagattttccagcgttgcttgccttagagcaacgctattgtcggcaagagccctatatcagtctggggcgttacattcatgtcatggcacaaaagtgtgtaaattaa

SEQ ID NO: 312946 - DNA, 1323 bp, Proteus mirabilis
atgagtgattttacccagaccgttcctgagttagtgtcttgggcgagaaaaaatgatttctctatttcactgccaccggaaagattagcttttttgatggcagttgctgtattaaacagcgaacgtcttgatggcgagatgagtgaaggggagttgattgatgcctttcgagaggtgtgtaaaggctttgatcaacccgcagaatcaatacaagttcgtgctaataatgccattaatgatatggtcaagcagcggctttttaaccgttttaccagtgaactggtagaaggtaatgcgatatatcgtttaacgccattaggtattggcatcagtgattactacattcgtcaacgtgagttttcatcactacgcttgtcaatgcagctgtcaattgtggcaagtgagttagattcagcggcaagtgccgcagaagaaggtggtgatgcataccattggcatcgtaatgtttttgcaccgttaaaatattcggtggctgagatattcgatagcatcgatttatctcaacgcattatggatgaacagcaaaatatcgttaaagaagatattgctgcactattaaaccaagattggcaagctgccatttcaaactgtgaacaattactatctgaaacctctgggacattaagagagttacaagacacactggaagcggcaggggacaaattacaagcaaatctattacgtattcaagaagcgaatatgagttcaggccatgtcgaccaaatagatactttagtctttgagttacaaagtaaacttgaccgtattattagttggggacagcaatctatcgatttatggataggttacgataggcatgtgcataaatttattcgcacggcgatagatatggataaaaaccgtattttttcacgtcgcctacgccaatccgtacaaaactatttcgacagcccatgggcattaacttatgctaatgcggataggctatttgatatgcgtgatgaagagcttgtgttgcgagatgaagaagtgaccggggaattgcctgaagagctggaatatcagatgttcagtgaagtaaatgaacaaattgctcaatgggttgaacaagagctggctgcttataaattagaacaacgagcgttagatctcagttcagtattagttgagtatcttaatcgttatccacaacagaagcattttgatgtggcacggattgtcattgatcaagcggtacgattaggtgtcgcgcaagctgaacttgcaggattgccagcaaaatgggcagaaattaacgaatatggagctaaggtacaagcgcatgtcatcgatacatactga

SEQ ID NO: 312947 - DNA, 732 bp, Proteus mirabilis
atgtcatcgatacatactgaacaatttataccagctaaattagcacaggcattagcgaattcacttttccctgaactggatagtcagctacgtgcaggtcgacatattggtatagactcactagataaccatgcttttttgatggactttcaagatgagttaacagatttttatgcgcgttataatgtcgaattaattcgggcacctgaaggctttttttacttacgcccccgttcaacgacgcttattcctcgttcagtgctttctgaaatggatatgttggtcggcaaaattctttgttatctctaccttagccctgagcgattagctaatcaggggatcttcactgtacaagaattatttgatgaattacgcacactggccgatgaaagcaaattgttacgcttagttaatcaacgctcaacaggatcggatttagacctacaaaaactgcaagagaaaatgagaacgtcacttaaccgactacgtcgtttagggatgatttcgtttttacccaatgatacgcaacgtttttcaattactgaatcggtgttccgctttggtgctgatgtgcgtagtggtgactctcctcttgaagcgcaaatgcgtatgatccgcgatggtgaagctatgccactagagcaagatagcgagccaagtgatgacgatgaacaggaagatgagcaattagagtccagtgaagatgatgatgcagaggaagaaaataaatga

SEQ ID NO: 312948 - DNA, 4458 bp, Proteus mirabilis
atgattgaacgaggaaaatttcgctcattaacattgatcaactggaatgggttttttgctcgtacttttgatttagatgaattagtcacgactttatccggtggtaacggagcgggtaaatccaccaccatggcggcttttattaccgcgatgatccccgatctgactttacttcattttagaaataccactgaagccggttcaaccagtggctctcgtgataaaggattatatgggaaattacgcccgggagtttgttacgctgttttagatgtgattaattcccgccatttacgagctgtcgttggcgtacgcttacaacaagttgccggacgagataaaaaggttgatatcaaaccttttatgatccaagggctacctattgctgaaaatccaacagaaattttgacgcaagctgtcgatggacgccaagcacgtgttctaccacttaatgaattaaaagaaaaagtagaagcgatagaaggcgttgtttttagacaatttaactcgattactgatttccactctgtactctttgatttaggggttattccgaaacgtttacgctcagcaagcgatcgggcaaaattctatcgtcttattgaagcttcattatatggtggtatttcaagtgccatcactcgctctttacgcgactatttattacctgaaaatagcggagtaagaaaagccttccaagatatggaaggggcattacgtgaaaaccgcatgaccttagaagctattcgggtcactcaatccgatcgtgatctgtttaaacatttagttaccgaagcgacctcttatgttgcagcggactatatgcgtcatgctaatgaaagacgagtacaccttgatcaggctctatctttacgtaaagagttgtgggatcagcgtaaagcgattaacaatgaagcttatcgctttattgaaatgggcaaagagttagaagagcaacaagcgttatcggctgatttggaaacagattatcaagccgccagtgatagacttaatctcgtacaaaatgcggtacgccaacaagaaaaaatcgatcgctatgttgcggatgttgaagaaatcacattccgtttagaagagcaaagtgaagttgttgaagaagcaacatcaaaaaaagaagagttggaagcgcgagttggatctgcggaagaagaagttgatgaactgaaaagtcaattggcagattatcaacaagcgttagatgttcaacaaacccgagctattcaatatcgtcaggcggtacaagcattagagcgtgcgaaagcacaatgtggcattgatgagttagatgaaaccaatgcagagctatgggctgaacgtattcaagcaaaaattcaatccatcacgcattcattactttctatggagcagaaactcggtgtttctgatgcggccaaaacgcaatttgatcaagcctataaattgatcacctcgattgttggggaagttgagcgtcaaaatgcgtggagtgcggctaaaagcgcattacgtgaatggtcatcacatcgccatcaagccgatcgtgttcaccctattcggatgcaattagctgaattagagcaacgtttacagcaaagaaataatgctgaacgtcagcttgcagagtttaataaacagtatggcaaaaatgttgagcctgatgatctatttactctacaagaagagctagaagcaaagattgaagagctgagcgattatgttagtgattcaggcgaacagcgtatgcaaatgcgccaagagcttgatcaactaaagcaacaaattgaaaaattaagaaaacaagcgccagtttggtttgctgcacaagatgctttaacgcaactgtgtgaacaaacgcatcaatcttttgaaacaagcaatcaagttactgaatatatgcaacagttacttgagaaagagcgtgaagccacggttttgcgtgatgaaaccgctgctcgcaaacagcaaattgaagctcaaattgaacgattaagtcagcctagtggggctgaagatggccgattaattactttagcagaacgctttaacggggttttattatcggagatttacgatgatatcaccttagatgatgcaccttatttctcagcattatatggacctgcgcgccatgcgattgtggtacaagatctcggtgcgatcgaagagcagttagcttctttagaagattgcccggaagatctctattttattgaaggtgatccgcaatcctttgatgatagcgtatttaatgcccaagagatggaaaaagcggtacttattaaaagttctgataggcagtggcgctattcacgttatccagaaattccattatttggccgtgcagcacgagaaaaccagctagaaatattatcccgtcaacgagatgagctgtcagagctgtatgccacacaggcctttgatgtgcagaaaattcaacgtgcacaccatgcatttagccaatttgttgggcaacatatttcagtggcatttgatgccgatcctgaagaagatattcgccaattaaatcaacgtcgtaatgaattagagcgcgagttatcacaatatgaagagggcactcagcaacaacgtcagcattatgcgcaagccaaagagtcgctcaatttattaaataaactcattcctcaagtcaatttattattggacgaaacattaattgatcgtgttgaagagctacgtgaagagctttataacgcagaagagtcgatgcgttatttacagcgtcatgagaaagcattaactgcgttagagcctatagcctcgattttacaaagcgacccacaagagcatgatcaattaacacaagattatcaatacgcaaaagaagagcagcaacgttatcaacaacaagcatttttgctggtggaagtggttcagcgtcgtccacattttagttatagcgatgcggttgaaattgtcagtgaaaataacgatcttaatgaaaaattacgtcgtcgtttagaaatggctgaaacagagcgagcgacagcgagagagttatatcgtcaacagcaggcacaatgtgatcagtttaatcaagtactagcctcactaaaaagttcttttgataccaaatcagaactattaagagagcttgagcaagagatgaaagagactggcttgcaaattgatgcgggtgcagaagcgcgagccaaagagttacgtgatcaacgttatgctgcggtgagtgctaaccgtacgcgtattagccaacttgagcgtgatattgcgcttagtgaagctgaacgtgaaaacatggcgaagaaaattcgcaaattagaacgtgattatggccaaatgcgtgaacacgtcgtcagcgctaaagccagttggtgtgctgttatgcgcttagtgaaagaaaatggtatggagcgccgtttacatcgtcgtgactttgcctatctttcagcggatgagttacgttcaatgtcggataaggcgctaggtgcgttacgtcaggctgtggcggataatgaatatttacgggatgcattacgtcgctctgaagatgcaaaataccctgatcgcaaagtccaattctttattgcggtttaccagcatttaagagaacgtattcgacaagatattatcaaaaccgatgatccggttgatgctatcgaacagatggaaattgaattagcacgcttaaccgaagagctaaccagtcgtgaacaaaaactggcgatcagctctcgcagtgtggcaaatattattcgtaaaactatccaacgtgaacaaaatcgcattcgcatgctaaatcagggcttacaagcggtttcctttggtcaggttcgtggtgtacggttaaacgttaatattcgtgaaagccatcaaatcttactggatgtattatcggaagaagaagatagccaatatcaagatctgtttaaaaaccaaaacctaaccttctctgaagcgatggcaaaactgtatcaacgcttaaatccacaggctgattttggtcagcgtatgccacaaacggtgggtgaagagctacttgattaccgtaactatcttgagatggaagttgaagttaatcgtgggccagaaggttggttaaaagcagaaagtggtgcgctatcaacgggtgaagccattggtacaggtatgtctatcttagtgatggtggttcaaagttgggaagaagaatcacgacgcttaagagggaaagatatttcgccttgtcgtttgctcttccttgatgaagccgctcgtttagatgcgaaatctatcgcaaccctatttgaactgtgtgaacgacttgatatgcaacttatcattgctgcaccagaaaatattagcccagaaaaaggcacaacttataaattagtgcgtaaagtctttaatggaagcgagcatgttcatgtggtcggattaaaaggctttgggcaacaaagtgaaaaagataacattttatccgaaaatgttgcagatagttga

SEQ ID NO: 312949 - DNA, 654 bp, Proteus mirabilis
atggacacaaagcgcgtgggatatactgttgttgatctatcccaatggggacgaaaagaacactttgaagcatttcagtcttttgctcaatgcacctttagccagaccgttcaactggatattacttcattattaaaaaccgtaaagcaaaatgggtacaaattctatccgacatttatatacatcattagccgattggtaaataaacatgcagaattccgcatggcaatgaaagacggggaattggtgatatgggatagtgttaaccctgggtacactatatttcatgaacagaccgaaacattttcatctttatggagttactaccacaaagatatcaatcaatttttgaaaacttattcagaagatatagcgcaatacggtgacaatctagcctattttccaaaagaatttatcgaaaatatgttttttgtgtcagcaaatccttgggtaagtttcaccagttttaacttgaatgtggcgaatataaacaatttctttgcccctgtatttacaataggtaaatattatacgcagggagataaggttctgatgccactagcaattcaagtgcatcatgccgtatgtgatggcttccatgtaggcagattactcaatgaaatacagcaatactgcgatgagggatgtaaataa

SEQ ID NO: 312950 - DNA, 714 bp, Proteus mirabilis
atgcgtaaagtcacacttactcttagtgcaattgcgttggcgttaagtttaaatggcgcagcaatggcaaaagttcatatgccagaagttgttagcccaggggttactgttactgaacttgcacatcagcaaccaattaaatgggtttctgttgcagaaattgaaaaaagcttagaaggccaagcaccaatggcggtaggttttgatattgatgacaccgttctgttctcaagcccaggcttttatcgtggtaaactggaatattctcctaacgatttcagttatctgaaaaacccagaattctgggaaaaaatgaacaacgaatgggataaattcagtatgcctaaacaagtcggtatcgatcttgttcagatgcacttaaaacgtggtgatactgtttatttcattaccggtcgtacacagactaaaacagagactgtgactaaatatgttcaagaaggtttaaatattcctgcagataaaatgcaacctgttatttttgccggtgaccaacctggcgcaaataacaaagtaagctggatgcgcgatcacaaactgaaaatttactacggtgatgcagatgctgatatcgcagcagcagatgagctaaatatccgtgggatccgtatcttacgtgctgctaactcttcttaccagccgttacctaaagcgggacaatttggtgaagaagtggttatcaattcagagtactaa

SEQ ID NO: 312951 - DNA, 1092 bp, Proteus mirabilis
atgtcaataaaaaaaatagttatagttggtattgaattgcaaggcttaggaggtatggaagttgtttttaataaattaaatgatttattaaaagagcactatccaaatattagcctgtctataattcttctaaaagaaagagatatatgtattaatgaaaattggcataaaaacctaaatgtaagatttataagatgtaaaataagaaatcataagataagacgatttatgttctcgtgtaaattatcaggtatcttaaggaaagacaacccagatattattattgcatcagatgttattggttgttatatagcaaatttagcctctaagttttcattgagaaatatccctgttttttcttggatacatacatcattatggacagcatataaagcagtatatactttaaatgtaaattatcatatcccaattagctcgggtaataaaaaatacttattaaatcataatgtaccagaatctcatattaatgtggtttataatccagttgatagaacagataagataattcatcgtccatcaaataagattaagtttctttatattgggagattattgtctaaagaaagtaaaaatcttgaatttatgttctatgcattaggtaaacttaagggaaattgggaactacacttagtgggggatgggaaagatagaagtaaacttttttctctcgcccaaaaactacatattgataaaaaggttatttttcatgggtggcaagataatgcttgggattatgtattaaatcatattaaagaagtcacggcttgtttattgacatctactcatgaaggacttcccatggtcttaattgaagctcaatcttatgggatctattgtgttagctctgactgtttaactgggccttctgatattattgatggagataatggacaattattccctgttaatgatgaattatcatttttaaaaatattaaatgatatcatcaatggtagattagatttacctgaatacagcaaaataaaaaaatcgattaaaaaattttatggagatgtctacataaaaaacatgatagatttttttgaaaaaaagagtaaaaaaatacaatga

SEQ ID NO: 312952 - DNA, 276 bp, Proteus mirabilis
gtgttttggataaaatggaagcaattcggcggcccatgtactatcaataatgggttggcattatgcgcattacaccactctgcctttgatatgggcgcaatcagtattgatgataatatgaaattattagtttctagcggtgtgaatggtaatcaaatggtagagcaattattttggcaattttcaaataaggtaattggcctacctaaaaacacaaaagaacatccgaaggatacatttatccattggcatcgtgagcaagtgtttaagctatag

SEQ ID NO: 312953 - DNA, 531 bp, Proteus mirabilis; identical to SEQ ID NO: 307893

SEQ ID NO: 312954 - DNA, 153 bp, Proteus mirabilis
atgaacgtttctaactcataccctaccgataaatacccccaattaacatcaccgtcattagcaaaaaacagagaggaagctctggctcaagctattgcaatgattgaggggtgtttgccaaatacgagtgcgccagacagggaaaacgattag

SEQ ID NO: 312955 - DNA, 2973 bp, Proteus mirabilis
atgggtaagactgtcacaagcgttgtctccgcgggcttaatgatagcaggtgttattgctacgggtggtttggggactgcattaattgttgctggcattgctgttcaagctgcaagtgcgtttatctttaaagataaggtgcccggctcaggctatcgggatcagtccgaacgtaaacagatgttgcgttcagcatcagcaccagaaacggtcgttgtaggtaaaacaatgatgtcaggtttgcttttctttgctgaagaggaagagggcgaacaagacgaaaatgaagaactctacatggcgttagccatagcctctcatcccattcataaattaggtcaaatttatttcaatgatgacaaaattgaagatttaggcgacaacgcacaatacgaatttcataacggtagaactgaggcggatccatacctattaaaacatgccccttcatggaaagaggatatgattggtagagggcttgcatggttacgcttaacattacgctttgatcaagaaaagttcccttatggtgtgcctaatgttaaaagtgaactatggggaaaagaaatttatgatccccgtaccgaaaaaacagcgtggtcaaataatggtgctttggtcatattagattattaccgtcactatttgggggttccggactctgatattgattggaatgcatttaaagtcgcagcagatatttgtgatgaaaccgtacaaacgcctgatggaaaaagtgagcctcgatatacattaaatggtgcctatgaacttgaagagagtcccgcttctgtattagagatgatgcataaatgcattgccggcgaaccgacctatattgcaggtaagcacggtattttgatgcaggtttataatgggcctgcattactcacaattgatgagtcacaaattatcgatacggtaacggtgacaccggaactttctttgcgtgatgcgactaatgcgatttacggtactttcgttgatgcagagcaacaatataacaaaactgattttgaacccgtagttattgaggagtggatagaagaagacggcttagaaattaaagaaaatatggactaccgttttgtaaccagtccataccaagccaatcgactagccaatctttatttacgtaaaaaacgtgccggccgtcgtattcaattacgcatgaatttagatggctatgcgtatcgccccggtgatgttatcaagctcgagttaccttcattagggatcagtgatttagaatttcgtattgctgattggaaatttcacccatcagagggggtagagattactctcgaagaagatggtccttatatctatgaagacttagctagtaaaccttttgttagacccccattcactaaattacccactggtggtgtacccgcaccgattaatctggcctttgttcccctctctgttacggatattgttcaggggtatatttcatggcagaacgtggcatcggatattcgctataacacggttaatattctccagaatggaaaggttatacagtctattcaggtaccgggtgagcgtgttgatattaatggtttaactcgaggcacttatcgtgttgaggtgagagcaattaatgtggccggcgccatgtctgcacccgctatcagtgattttgctattcaggcacctcctgcaccgattagcgttgaaataacaccgggtatgttcagtttaacagcatcaccaaggcagggggatagcgctgtatttggttatacctttgagttttggtttagtgaaaagaaactcgctaatctttctgaaaatgaggtgatcaccaaaacaaacaaagttggccaagggaatttctggacgcaagagaatttaaaagcgggacgcacttactatttttatatccgaacgataaatagttatggcaaatctgttttcgtagaagcctctggtgttccagtttcgctacccacagatatttttgatgatttagataacacggttagagaaacggaggctttcaaacaactcagcgaagaactgaaatggaacaccgagtctattgcggtactgacaaacgccacttactcgctctctacggatgtattgcgatattccgctaatgctcaagctggtattactcaactacaacaactccgagtttctgataatgaagcatgggcgcaggatattaagcgtgtatatgcatcaatagaggataacgataaagccttacgtgcagaaattaaagaaactcaaacatcaataaccgagttaaacaaggcgttcggccaaacaactacggagatccgcacagagttaaaaataaccaatgatgcaacaaataaacgcattgatgataccaaccagaagttaggcaatacagataaagaagtcggccgtattcgtgcagatgttgcgactaacaaagaggcgatatctgaaacgaataaagccatggctaaatccgaagagcaggtacaagcgcaattcggcaaacagcagggcatgattaaccaaaaaatgcaggctgaatttagtcaaaccggtgacggtgtagttacccattccatcaacattacgattgttcataacaacgtgaaatacaatgcagcagggcaagtaattagtgctcaggttaagaatgggaagcttgaaagtttcattggctataacgcaaataactttgcttggtataaccctgtaaatggcaaaatggaattattcatgtatgccaaaaacgggcaattctttatcaaagaagcgtttttagataaggcctctatccgtgaaatggttctttcagagtcaataagatcagataattatgtgcctggtaaatctggatttattattgacgttaaaaataacaaactggaaatgtatggtggtaatggcggaacaacattaaccaatcaaaatttatatgtaaaagatgaaactggatataacgttgttattattggtgatatcacaaatgagcgataa

SEQ ID NO: 312956 - DNA, 2178 bp, Proteus mirabilis
atggacgggaaaagacattttgagccttatttaccttttattgctcatatttatcgacctggtaatgaagtaccaaatacatctaatcgtaaccgctcttttttagtaaaaggaactctatttccacaacaaacgcatcgtttctccattaattatcgatacaccgatttattatttggcgatattatgccatcacgattaagttgggttcgttatcaagaaaatttagttaatcaatggcctttggcaaatattacacaacaagcaggcacattaacctatcaatataaaccagaagataaaaaaacagatttattactgcgtttatggggaaatttaacgttaggacatactaatactaggggaggaaaaccaagagagcctaaaatggttgattttagagctagcagaaatacaaggtgggatccctctattgatacaggctttttagatacagcttctctatatcaagataataatcgttatggtgttgatttttcatcgttatttaaattatcgcctcagttttctatttctttttccggtcaatatcaattggaaaaattagacagtcatgagcttgaacttcccatgggttttgatttcgtgaccgaggggcgagcagggcaacgtcatgaagtcaatttagcgttagccacagattggaaaccattaccctggtttgcgatgaatattggcggtaaatatcattactatcatctgacggatacctttttaaataataaacggaagaatagggttaaaaattacgagaaaacagcccctatccgcggttatctgatctcttatcgacgagtattaaccccagaagagtatttactctatcgcgcggttaacaaaattgatgtcgatactttacctgacgagttaaaaaattaccgaaattctgctgagctgagtaaaaaaattagagactttcaacaagcggttttagtttaccctgaaggtggcgctttgctagaggaaatcaaggagcaggttgctaggccatatcttcagagaatacagcatgatatggagcatgaagattttattcgtaataaccatggaaagatgcaaataaaaaacgctaaagccatcccgatgaaaagagagtttagcctttggttatttgatgaaaatggcgtactacttaagagtaagaatattttacttaatggttttcttgatatggaggaaaaagtccctcatccagtgacgggtgagttagtttatcgctttgaaaaagatgttattaatcctcaggcattttctctatcagaagatattcaagatccctacgcactggagcctagctatcagcatggcgcattttcccctttaatctctgccaccctttatgccaacgatatggtgcgtttttatggccgttatactgagcaattgcgtttgcctaacttatttgaagataccagtggtttttcaggctctaaagctcgctattatggttttaagttaaagccagagcgtgccaaaagcagtgagtttggtgtggttgttgattttacgcattggttgaatatagagcgccacgctgatattaaaattaattactttaaaacgaacattgaaaatgtatttgatagagatgctaattggcaaattagacagttagaaaaacaaatattagaaggtgtagagttacaagcccggtttgataatggatttattttctttgataccgcattagtgtatagccataaaaataaagtctgtgatgaaaatgctttttatgagcttgatgcatcaggattatcgggtattaaaaactgtatgacagggggataccctggcggatttttgcgcacctcaatgcagcctaaatactcagttaacctacatttaggcacgcgctggctaaatgataaattagaattaggtagtcgctggctctattcatcagaagttgaaaataaagatgagaaatggcttaaagaaaatttacctaatagctattttggcataaataataatccgatgcgttgggcaaaagtatttactattgatgcttatgcaacttatcaatatagccccaatttatcttttgaaataacaggaagtaatttattaaatgaatattacattgatccgctgacccgttctggtatgccggcaccaggaagaagtttgcgattaggtgtaacagcccaattttaa

SEQ ID NO: 312957 - DNA, 804 bp, Proteus mirabilis; identical to SEQ ID NO: 306875

SEQ ID NO: 312958 - DNA, 363 bp, Proteus mirabilis; identical to SEQ ID NO: 301378

SEQ ID NO: 312959 - DNA, 192 bp, Proteus mirabilis; identical to SEQ ID NO: 301366

SEQ ID NO: 312960 - DNA, 435 bp, Proteus mirabilis
atgacaaaaactgtattagttcccatcgattttactgagcttggtttattggataaagttgtcactcatctcaaagcattagcgatggccgataaactaaatatccactttttatctgttattcctagctatgagtcctttgtcggatttgcttttggcaaccaagaccgtcttgccaatgataagcagcgtattgaaattgcattatctacgttaaatgatagtttatctcatattgaaattcccaatagcacatcccaatcttatatttccgtaggtaacccacgcgaccgtattttagagaccgcaaaaaaaatccaagctgatctgattgtgataggctcacgcaaccctggaatgaaaacctacttactaggctcgacagcttcttctgttgttagctatgcagaatcttctgtattagttgttcgataa

SEQ ID NO: 312961 - DNA, 432 bp, Proteus mirabilis
  misc_feature (410)..(419): n is a, c, g, or t
atgacaaacacagttattaagtacgttttagaccgattatatgatttaggtatcaaagatatttttggtgttgctggtgattatgccttccctattgaagacactgtttgcaacagccaacaacagcgttggattggtaactgtaatgaattaaatgcggcatatgctgcagatggctatgctcgaattaaaggaatggcggcattatccaccacctttggtgtaggtgaattaagcgcgattaacgctattgccggtgcctatgccgaaaatttaccgattttccatttagttggcatgccagaaagtggcgtacaaaaaagtaaacgtcttgtgcatcatactttaggtaatggtgattttgatgttttttatcagattgctcagcgccttgcttgcgctcatactannnnnnnnnncatactattttaa

SEQ ID NO: 312962 - DNA, 1212 bp, Proteus mirabilis
atggagcgcgtaatagaagcagcattaaaagagcgtcgtcctgtttatattggtataccttcagattatgctaatagccaagtagtagcgccgttatctgttaccgcaccacaaaagccaacaagtgataaagcaacattagaaaaagcagtatcagcaatcattgagaaactcacccacagcaataatgtctgtgtattaccaggctttttatctgcacgtttagggttaacagataaaatccagcattttattgataaaacaggtttaccttatgccactatgtttatggataaaagcatattaagtgaatctaacgcgcaatatgttggtatgtatgacggacaattaatgacaccagaggtcagagaatttgttgaaagtagtgaatatatattagggatcggtacattaatgactgactttaatacaggcagcttcactgctaatatgaaatcagaacaattaatcagtattatgccagattatgttgaaattgattctgtgatctactcctgcgtttatatgacagatattctttctgaattaacccaacgactaccaaataaaacttatcataaaataacagcgaaaggattaggtgaagcggttgcatctgataatgataaaattacagcacaatatctctatcctcgtttagaaaaattctttaagcctaatgatattattattgcagaaacaggaacctcatccatgggattaggcttcgctttattacctgaaggtgcacaatttcataaccaaacactatggggctctattggttgggcaacaccggctgcattaggcgctgcattagcggcaccagaaaaacgtattattttaattaccggcgaaggctctcatcagttaacagtacaagaaattagtcaatttgttcgtttcggtttaaaacctattattctagtattaaataacgatggttatttaatagagagattattatgtgattaccccgaagcttattataatgatttagctcagtggaactatcatcagttaccgcaagcctttggtgcaacagattggtatagtgaaaaagtaactacagcaagtggactagataatgcgttaaataaagccgcactaacaaatagcgcatcttatattgagatagtcacagagcgatatgaggcctctgaattagcgcaaaaattaaaagaatcaaaaagttcattatattcattctaa

SEQ ID NO: 312963 - DNA, 165 bp, Proteus mirabilis
atgattgaaaagccagttctcataaaaaataacatcactgatgagtatttatttactattgacgaatatattagtcgaatctttgttacggataaatttaaacaaagagtagaagatgcaggtttaacggctttcgatttttcagtggaaatagaattatcgtaa

SEQ ID NO: 312964 - DNA, 624 bp, Proteus mirabilis
atgattacagttttagattatttattagtaagattaaaagagttagaaattaaaactatttttggtgttcccggcgattataatttaccttttattggtgttgttgataatgataaagatattcaatgggtaggcgcatgtaatgaattaaatgcatcatatgcttgtgaaggatacgcacggatcaaaggtttttctgctctgtgtacaacctatggagtgggggagttaagtgcgataaatggtgttgctggcgcatttgcagagcaggttcccattattcatattgttggcgcgccttctcagtcaaagcaagagaaaggaaaaacattacatcattgtttagcgacgggtaggtttgatgcctttgaaaaaatgtatcgccatatttcaaaaacaacggctgtattaacatatcacaatgcgacggaagaaattgatagagtattagaaacattgtggcgttatcgatatccagtttatttattaataccagaggatgtcggtgtgatgaaagttaataaaccaaagttaccattacaattaacattacctcaaagtaatcccgacgatttaaataaagttattactcttcttgaaaataaaattaagaaaacaagttga

SEQ ID NO: 312965 - DNA, 405 bp, Proteus mirabilis; identical to SEQ ID NO: 297821

SEQ ID NO: 312966 - DNA, 1692 bp, Proteus mirabilis; identical to SEQ ID NO: 294630

SEQ ID NO: 312967 - DNA, 1194 bp, Proteus mirabilis
atgaaacatacattgttaaaaacgactgcaattgctatggcattaagtgtgggagttgtgcaagcgactgaatataaagcgagtaccgcagaacatccaatcaaaatagttaatttagatgctcttgaaaatcaagtaaaagaaaatatggataaaggcgctttcggttatattcgtggtggtgctgaagacgaaaataacttgcgttctaatacaaatgcatttaataaaaaatatattatgcctcgtgcattacaagggattgaattttccgatctgaatttaaaaacagaatttttagggattaaattagatacgcctattattcaggcaccgatggcagcccaagggcttgctcatcaacaaggcgaagttgccacagcaaaaggtatggcgaaagcgggctctattttctcattaagtacttatggtaataaaaccattaaagaagtcgcgcaagcacaaccgggttatccgttcttttttcagttatatatgagtaaaaacgacgcgtttaatcagtatattttatcgcaagcaaaacagtatggcgcgaaaggtattattttaacggttgattctcctgtggggggatatcgtgaagatgatattaaaaatagttttcaattcccattaggttttgccaatttggaagcattcgccaaaatcagtgatgataaatcaaaaacaggtaaaggttcgggtattagtgagatctatgctcaagctaaacaagcatttactcctgcggatattcaatatgtgaaaaagatgtcaggtttaccagtcattgtgaaaggtattgaatcacctgaagatgccgatactgcaattaaagcgggtgctgatgcgatttgggtgtctaatcatggtggtcgtcagttagatagtgcacctgcaaccattgatgtattgccagccattgccaaagtcgtgaacaaacgtgttcctatcgttttcgatagtggtgttcgtcgtggctcacatgtctttaaagcgctagcgagtggtgcagatgttgttgctgtagggcgtccaattctttatggattaaatttaggcggtgctgaaggtgtaaattcagttatcgagcaattaaataaagagttaagaattaatatgatgttaggtggtgcaagaaacgtcaaagaaattcaagcaacacacctgtatacagatgctgactttaaataa

SEQ ID NO: 312968 - DNA, 213 bp, Proteus mirabilis
  misc_feature (192)..(201): n is a, c, g, or t
atgtgcaaatctatattgcttaccagcctgttaatctttatcacaagaagttgttatggctctgagttaaatgcaacctcaatcattggcggtgctgttcaatcgcaatttagtatgaatgtaaaaatagctacatgcttacccgataaaatagtcgctgtatcaactgctccaaaagtaacattgtcaacnnnnnnnnnntggagcagttga

SEQ ID NO: 312969 - DNA, 186 bp, Proteus mirabilis
ttgaaaagttcggaactgattaagttgttagaaaaaaacggatggatacttgatagaataaaaggaagtcatcatcaatttactcaccctgatttttcttttgttgtaacagtaccgcatccaagaaaagatttaaaaaaaggaacattaaatcaaattattaaaagtgccaaactgaaaaattaa

SEQ ID NO: 312970 - DNA, 582 bp, Proteus mirabilis
  misc_feature (568)..(577): n is a, c, g, or t
atgtctttgaaacgtaaaattgcgctggggaaaaatgtattagaagctgctcaagagagagtccagtggatatttgatacttttgaacaaatcactctctccttttcgggagggaaagattctactgcgctttttcatcttgttgccgcacaagcgcgaaaacaacatagaaaatttaatgtgatgtttcttgattgggaagttcaatattctgcgactatagatcatattataaaaatgaaatctatctaccaagattgtattgaacagttttactggatagcactccctatcaccactgaaagtggcatttctcaatatgaacctacatggacagcatgggagcctggtaaaaaatgggtaagacaaccgccagaagatgcgataactgaccctcactttttccctttttatcacccaaatatgctttttgaagattttacccctgcatttaaccagtggatcacaggtaatcatcgcagttcgattatcctgctaggtataagagcggatgaatctttaaaccgatttattgccattagtaataatcgaaagttacgttatgccnnnnnnnnnngatga

SEQ ID NO: 312971 - DNA, 579 bp, Proteus mirabilis; identical to SEQ ID NO: 296690

SEQ ID NO: 312972 - DNA, 351 bp, Proteus mirabilis
gtgaaaaagtatatggatgaagtctatacttatggtcacggcaaactatatgaaaacgatggacgtactcgtcatgatccaagcaaacaatatggtagcgggggattgttgcaaggtaagcaatatatgctctccgtgacttggaatgcccctattgaagctttcaatgaatttggtaatttctttgatgggcgaggggttgatggtgtctattttgcttttcataaatcacaacaatttcttggtttatctcagctgcctacttttatgaccaacaacgtgattaaagagcctaatattgagaaagatattgtagaatataaagcacatctaaccaaagtctttggctaa

SEQ ID NO: 312973 - DNA, 243 bp, Proteus mirabilis
ttgaaagcttaccaagttttaaactgtttaggtatgtcgcgcgttgatgtgtttttaactgaagataatcaagtcattatcaacgaaattaatacattaccaggtttcactaatatcagtatgtatcctaaactgtggcaaagtacgggattagattatcaatcactcatcacgaaattaattgaattagcgctagaacatcataaaaaaacagccgtattaaaaactaagtgtgagctttaa

SEQ ID NO: 312974 - DNA, 501 bp, Proteus mirabilis
atgagttctgcagcatgtatggataaagatatcactaagcgcttactggatgatgcaggattagcggttgcaccatttattacactgatggctcaccaattaaatgatatttcctataatgaagttgttgaacaattagggctccctttatttattaaaccagcaaatttaggttcttctgttggtatcagcaaagtcaataatgaagccgagtttaatgctgcattatccatggcatttgaatatgaccttaaagtgattatcgaaagtgctattgttggccgtgaaatagagtgtgccgttttaggtaatgaaaagcctgaagttagcccttgtggtgaaattgtgttaaatgatgctttttatgcttataacacaaaatacattgatgacgatggtgcaaaagtagtagtacctgctgcagaactcatgatattagggcctacatatggcatatcaatcatatgtaatagtccttgtagggtgccatcttcaccataa

SEQ ID NO: 312975 - DNA, 366 bp, Proteus mirabilis
  misc_feature (348)..(357): n is a, c, g, or t
atgagcacattattatctacacaaaatctctcttttcataataatcacggtatattgctgagtaatatttctttggccctcactaaaggtgagaaaattggtttaattggctacaacggttgtggaaaaagtacactattaaaacttttatcacaccaattaataccaacagatggctctattactatcgccaatcaagtcattatggcttatgtcgaacaacagttaccaagtgagctacagtcaatgcgtctcattgatgcggttcttcataaattacctgaagagctacgcatatctgaaagttggcgcagtgaattattattaagtgaaatgggatttaaaagnnnnnnnnnnatctattag

SEQ ID NO: 312976 - DNA, 390 bp, Proteus mirabilis
atgagtaaattaagagtcgctattatttttggtggaaaatcaaccgagcaccaagtttcattacaatcagcaaaaaatattatcaatgaattagatcgaacgaaattcgacctttgtttaattgggattaatgaacaagggcaatggcatgaatatgctgaagacaattatttaattaatagcgataacccctcaactatctcattaagccaacctttgcgtccagtggctgttgtatttcctattgtgcatggtgcttatggtgaagatggcaccctacaaggactattacatatgattgatatgccatatgtaggccctaatatcatgagttctgcagcaggtactactacttttgcaccatcgtcatcaatgtattttgtgttataa

SEQ ID NO: 312977 - DNA, 501 bp, Proteus mirabilis
atgagttctgcagcatgtatggataaagatatcactaagcgcttactggatgatgcaggattagcggttgcaccatttattacactgatggctcaccaattaaatgatatttcctataatgaagttgttgaacaattagggctccctttatttattaaaccagcaaatttaggttcttctgttggtatcagcaaagtcaataatgaagccgagtttaatgctgcattatccatggcatttgaatatgaccttaaagtgattatcgaaagtgctattgttggccgtgaaatagagtgtgccgttttaggtaatgaagagcctgaagttagcccttgtggtgaaattgtgttaaatgatgctttttatgcttataacacaaaatacattgatgacgatggtgcaaaagtagtagtacctgctgcagaactcatgatattagggcctacatatggcatatcaatcatatgtaatagtccttgtagggtgccatcttcaccataa

SEQ ID NO: 312978 - DNA, 138 bp, Proteus mirabilis
atgaaaatagagtatttaagattatttgttgataatataggaggcccaagtaacgaaataaaaaatattactatagagataaatattagaaataataaaccaatgcgatttttatatttatataaaataaaagaataa

SEQ ID NO: 312979 - DNA, 123 bp, Proteus mirabilis; identical to SEQ ID NO: 299922

SEQ ID NO: 312980 - DNA, 138 bp, Proteus mirabilis
atgctctacgcttggttaggcttacacatgaaaaagttgctaaaaaaaccacatgctaaaaaagtgttcaatcgtatgtgctcaagtttattagctagtgcagggattgggcttttagtttcacagaaaagccattaa

SEQ ID NO: 312981 - DNA, 339 bp, Proteus mirabilis
  misc_feature (269)..(278): n is a, c, g, or t
atggaactttctacattacttctttttatcccagcctgttttgctttaaaccttgcaccagggccaaacaacctgctttcaatcaataatgcagcctactatgggtttgctcgttcatgtgcaggaggtctcggtagattactcgcattcgtgattatgattgttctagcttcatttgggctagctgttgtattgcaaacatctgagttcattttcagtgtaattaaatttgctggggttgcttatcttttgtggctcgcatatcaatnnnnnnnnnngccccaactgatgaattcaaatttgattcaaataagaagaataactctattgtcaaattag

SEQ ID NO: 312982 - DNA, 273 bp, Proteus mirabilis
atgcaacagtggcaagcgatattccaacgttatggtcaaccacttgaagtggtaactacggggtgctgtggtatggcgggtacttatgggcatgaagtgaataactataaaaattcattgggaatttatcaactgtcatggggaaatgcattgaaaacactccctacagcacgttgcttgagtaccggatattcttgtcgtagccaagtaaaacgtattgataatattgagttaaaacatccactacaggcgcttttggagattatgcaatga

SEQ ID NO: 312983 - DNA, 210 bp, Proteus mirabilis
atgaatgcgcctgtaattagctttattaatatgaagggtggggtgggaaagaccactctatgtattagtattggtgagtatttagcaaactataaggataaaaaagtattaataatagatattgatcctcagtttaatgcaacacaatcttttatgggtaagcatgataaaataagtgagtacttatttacagtgtatatccaaatctag

SEQ ID NO: 312984 - DNA, 756 bp, Proteus mirabilis
atggcacaatgccctgatgataaaggcctagtgatgggtaacgcaggtattctgcgcattgcaaaaggctgccctgaccaagtaccagcacaagatcaattcttgcgcttaggtgcgctaacaagcaagtcattcgatttcggtatggagacagtgacatctaatgctgatgacaccaaaggcttaactgagtcaattgttactggcgctgactttaccattagtttcgatggtgaattaaagaaagctggtgtaaccggttctacttccgcgtttgatattgccaaagaaatccttgatgaaatcaaagcaagtcgccaaccgtcatattgggttcaacttgatatgaaaggtgacggctctgatgttgttcagggctatatgttatttacatcatggtctatggagtttccaacaaaagaaatctctacctattcaggtgagctgaaagttgctgatgcagaaacggttgaatggctacaagaagaaatcgttgttgaaagtatcgcagtcgagccagccaccctgtctgtaaaagtgggtgaaactaagacatttgccgtcaaatttaccccaactgatgcaactaacaaaaactacaccgctgtaagtgataagccgaactttgcaacagttactcagcttgtgaatgtagtcactgtgcgcggcgttgccgaaggtactgcaaatatcactgttacatccgaagatggtaataaaactgcaaaatgcgtggtcaatgttaccgctgcttaa

SEQ ID NO: 312985 - DNA, 531 bp, Proteus mirabilis
atggcaagtaaaggcgtgaataaatgtattctcattggtcacctagggcaggatccagaaatccgctatatgccatcaggtggcgcagtcgctaatctcacactagccacatcggaatcgtggcgtgataaacaaaccggtgagatgaaagaaaaaaccgagtggcatcgagtatgcatcttcggaaaattagcggaaattgcaggtgaatatctgagaaaaggaagtcaggtatatatcgagggttctcttcaaactcgtaaatggcaagaccaaagcggacaagaccgatacacaacggaagtggtagttaatatcggcggtacgatgcagatgttaggcggtaatcaggcaggaagccagaaacctcagcagaatcaaggatggggtcaaccacagcaaccgcaatcgccaaaacaagcatcgagcaatcaagcaccgcaaagtgagccacctcaagattgggatgatcctatacctttcgcccctatcggactcccctacccacgccacgctatttatgtgatttaa

SEQ ID NO: 312986 - DNA, 249 bp, Proteus mirabilis; identical to SEQ ID NO: 305011

SEQ ID NO: 312987 - DNA, 756 bp, Proteus mirabilis
  misc_feature (75)..(84): n is a, c, g, or t
atggatattcctcgtattttcactattagcgaaagtgagcatcgtattcataaccctttcacaccagagaaatannnnnnnnnngccaccttaggtcgagtattacgaatgaaagaaaactggcaaattcttgatctcggaagtggctctggtgaaatgctatgtacttgggctcacgattacaatattacaggtattggcatcgatataagcccgttgtttactctacaagcaaaatctagagcagaagagttaggcgtcagccatcgagtacattttatccatcatgatgcctcagattatattagtgataaaaaatgtgatatagcagcatgtataggagcaacttggattgctggtggtgtaattgaaactatcgagctactagcaaaaagtattaaaacaggtgggcttattcttatcggagaaccatattggcggcaaattccaacaacacaagagatagcacaagcttgtggtgcttcatccatatcagattttttaactttatctgagcttgttatctctttcgacaatcaaggatacgatctagtcgaaatggtactggcagatcaagagggttgggatagatatgaagctgctaaatggatgactatgcgccgttggcttgacaaaaatagtgccgatgattttgctcaagaaattcgaacggaattgaccatagcccctaaacgtcatgttagttttacacgagaatacttaggctggggggtatttgtattaattgctcgataa

SEQ ID NO: 312988 - DNA, 318 bp, Proteus mirabilis
  misc_feature (286)..(295): n is a, c, g, or t
atgtcattttcaacaggtataaatagcttaagcggcataaaaataaataacgtaaaattatttatttttatacttgcgctactattttcagttgactcaaagtctgaggaggagttttattataacccctatttcttatcagataacccggagtctgtcgctgatctatcttcttttgagaaagggttagaagtacctgaaggtaattatctggttgatatttacttaaatgacatattcttaaaaacccaatatatcaattttattgagaataaagggcagctannnnnnnnnnatgtatcacaaaggcagagctaa

SEQ ID NO: 312989 - DNA, 993 bp, Proteus mirabilis
atgttcgaccgctgcctggtcgccacgggtgccagcccggcggtcccgccgattccgggcttgaaagagtcaccctactggacttccaccgaggccctggcgagcgacaccattcccgaacgccttgccgtaatcggctcgtcggtggtggcgctggagctggcgcaagcctttgcccggctgggcagcaaggtcacggccctggcgcgcaataccttgttcttccgtgaagacccggccatcggcgaggcggtgacagccgctttccgtgccgagggcatcgaggtgctggagcacacgcaagccagccaggtcgcccatatggacggtgaattcgtgctgaccaccacgcacggtgaattgcgcgccgacaagctgctggtcgccaccggccggacaccgaacacgcgcagcctggcattggaagcggcgggggtagccgtcaatgcgcagggggccatcgtcatcgacaagggcatgcgcaccagtagcccgaacatctacgcggccggcgactgcaccgaccagccgcagttcgtctatgtggcggcagcggccggcactcgtgcggcgatcaacatgactggcggcgatgcggccctggacctgaccgcaatgccggccgtggtgttcaccgacccgcaggtcgccaccgtgggctacagcgaggcggaagcacatcacgacgggatcgagaccgacagtcgcctgctaacactggataacgtgccgcgtgcgcttgccaacttcgacacacgcggcttcatcaagctggtcatcgaggaaggtagcggacggctcatcggcgtgcaagcggtggccccggaagcgggtgaactgatccagacggcggtgctcgccattcgcaaccgtatgaccgtgcaggaactggccgaccaattgttcccctacctgaccatggtcgaagggctgaagctcgcggcgcagaccttcagcaaggacgtgaagcagctttcgtgctgcgccggatga

SEQ ID NO: 312990 - DNA, 165 bp, Proteus mirabilis
atgtttgaaaaattaattctagttaaaaataatattacagatgaatacttattttcaataaatgaaaatattagtggtgtttttgtcacagataagtttagaaagcttgttgaaaaaattggattgttaggttttgatttttctaaagaaatagagttatcgtaa

SEQ ID NO: 312991 - DNA, 366 bp, Proteus mirabilis; identical to SEQ ID NO: 25794

SEQ ID NO: 312992 - DNA, 153 bp, Proteus mirabilis; identical to SEQ ID NO: 309629

SEQ ID NO: 312993 - DNA, 168 bp, Proteus mirabilis; identical to SEQ ID NO: 309628

SEQ ID NO: 312994 - DNA, 135 bp, Proteus mirabilis
atgctaacaatcatcggtggctcaggctttattggtactcgcttatcagatcaattaactaaagaaaatattgagtttaaaattgtggatattgctaaaagcgataaatatcctgaaaaatgggtatcaatttag

SEQ ID NO: 312995 - DNA, 561 bp, Proteus mirabilis
atgggtatcaatttagcagcgcaacataaagataatgttcatcctattagtttgtattatgaagttaatgtcgatggagctaaaaatgtttgtgatgttgctgaaaaactaaatatcaaacatattgtatttacttcatctgttgctgtatatggttttgtcgaaaaagaaacaggtgaagatggcgagttccatccatttaatgattatggaaaatcaaaacttgaagctgaacataagtatgaagcttggtataaaaaagataatacaaatacattaatcgtaatcagaccaactgttgtatttggtgaaggaaatagaggaaatgtatacaacctattccgccaaatagcatcaggtaaatttttaatggtaggttcaggtaataataaaaaatctatggcttatgtagaaaatattgcggctttcttaaaatttgctactcaaatagaatctggtcatcatatatttaattatatagataagcctgattttactatgaatgagttaaccgatattatctatactgctctcgacaaaaccatatacagcaacagatga

SEQ ID NO: 312996 - DNA, 396 bp, Proteus mirabilis
  misc_feature (337)..(346): n is a, c, g, or t
atgtcaccattatctgattttacttttagtggcttaccgatttgctcattacttattataacattaccgtcccccataataacacctattagatttcccttatcatcaatcacactatttgctgtattaacaggtttaccatctggtttttttatttctaataaaacttgcttcattgtattgacagggatctcacgagaaaaaacagtaccttttgccaatgcaatatcaaaggatgttgtgcctaacataacattgagtggtaaatttttagtatttaatagaacagttgtttttttatttacaggtaagttaggaataacggcggtaccaaagnnnnnnnnnngtaccaaagtgattagttattgtcgtaccaccacccatagagttaactaa

SEQ ID NO: 312997 - DNA, 228 bp, Proteus mirabilis
atgatgaaacaaaaaaccagtgtcgttattaacgtaaaattaactttagaacatggaattaaatcaccacatgttaaagtaaaaacaaaaatatacgttcatgaagaaactccagaattagaattattactaaataacttctcagataatttagttggagaaaattcaattaaatcatcatttgaaaaagcgattataaatacattactcaataaaaaaacatactaa

SEQ ID NO: 312998 - DNA, 366 bp, Proteus mirabilis; identical to SEQ ID NO: 25794

SEQ ID NO: 312999 - DNA, 366 bp, Proteus mirabilis; identical to SEQ ID NO: 25794

SEQ ID NO: 313000 - DNA, 246 bp, Proteus mirabilis
atgaataatgaatataatagagaacaaatgaaattaggtgttctatatgctcgcaatcatttaattagctcatataaagcaaacttcattgaatgtgacgaatgccagttcgcaatgtttatgaatacattatctctcgttgcaaacgaatcaatagatattgaattaatgatggagaatgttttgtcatgtaatgacgaggctgaaaattggattaaagaaattctaattaaacattctaaataa

SEQ ID NO: 313001 - DNA, 213 bp, Proteus mirabilis
atgcagatgttaggcggtaacggtggtaatcaggcaggaagccagaagtcacagcagaatcaaggatggggacaacctcagcaaccgcaagcgcaaaaacaagcatcgagtaatcaaacaccacaaagtgagcctccgatggattttgaggatgatatccccttcgcccctatcggactcccctacccacgccacgctatttatgtgatttaa

SEQ ID NO: 313002 - DNA, 3942 bp, Proteus mirabilis
atggaaagaaccattgaatttgactcgattgaatctctttatagggggctaaacgataaagatgaggcaaagacccaagccaattggctactaatagttcgcaagtggctgacggaagtctcgggcttcgatcctgtttcagggcatgccctgcatactggaattgtcgattttttgagtaccgtggagagatcggtgcaggatgagtcaccagagggcgagataaaggaccgtatctatcgaattgtgtcgcattcaaaggaatcagttctggcaatcatggagcatactcgggataagatatttcgggaacatgccatgctgccaatacatgcggcaagagaggttgacaataaaagtgtgcaatggctcagccgtcagccgggaagaacactccgcgagaaactttccggtaaaccttatatgaaggctgtcaggcggaggtccagtgttgatacggcagaaaaccgactattaaaagcttttctactgcggctggagcagattctgattgaaagacagtatgctttgtctgcagcggcagaagagacctgtgaggaactgcttgtttccctccagcgctggcttagaactgaagatgccgctgaaattggcaattggggcaatcttccgcccaacaacacgcttcttcaggataagcgttatcgaaaagtctgggatggttggctctggctccaaaccatcgacgagcagatcactggggacagcaaaagagtccatagcgatatcctcagtgttatttattggaataccctttccttactcaaccatagtggccgttttcgaaccgttcagcagccggtcggtctcgactatgataatttttctatctccccagaattgccggtcaggggatatttatttcctgctgctgactcaaagatcaaaggaaaaatcaaaacaataaactatgagaagaagtttggctttgtaacacaagaaagcggtgttgatttattttttcatcaaaacaatctttcaagcaagctcagcctcgattcattatctactggagatgaagtttcttttgttatcggcatcaaccgacagggcgaatgtgctgacgacataacccttccagcaggaatcattcctattgatttcaatttgatgggtgataaatggaagatacaagtcagtgaggataagtatttattacagatcgtttccgagaatctggttatagagcaagctcagggcgcaaaaaagaaattaaaaatagagccaacaactctcaaagagataccgaagacgatactgtcattagtcgcggatgccccgtttgaatactctgtgccgacaaataaccaaagtgatccaatacggatcgatagctctgttgttgacctgtgttctatccgtccgacgttcacgaataatacaggctctcaggcgcacctgccgttcaggttgcttcagcagaactggtcgttaaatattaatggaggggtggtaatagactgcggttacgcaaaatcaatcgccctgcattccgatattgaaacggtcagcatgaggagcctcttttcacatatctcaacactgccagatgccaccaaaagcagtgcagcgatgttttttatgaaaaagttgagtgactatatcaagacggaaaagctgacctatcttgttcctgattgggtcaatgacttcgaccttgagggaatacgaaaaagcgtcaatttttattttgacgattcgacaccgcttcccaaaagcatagccgctatctttgcatggcaatcatcgaagaaatttgtacagggcagagttaaagagagggattttgtgctgttggttgattcatttgacggcggcatttcaataaccccagtccaggcaatataccaaaaagagctggacgaaatattgcctgagacacaaggtatcagttgggaaagacatcctacggttattgtgccacacagaggcattcatgctgtcatggcccgtaatcttgaccgtaatggctgccagacatctgaagaactcctccatttgttcggcttcgatggtttagccagtgattcaggggaagtgtcctttgtgaaagatgaccactggtatcacttaccaggttctattcgggagactctgactcaggatttagatctcaacatattatcaaaagacgcgatcagtaactgcctgaactctacaaacagggattgtcggggagttggcgtctttatcctgcctcttgaagatacaatcaggaaacctgatgtgcgaatggattacaagtggctgggatctgcatggtcaccaattaaaggttgccagactttaaacagatggcaggaagaagttgatgatattgccctttggcgcgatcatctgccagagctgtcgatcagaattgtacgtgatgggctttttgaaaatttctatctggtaaaagatgcaactgtaacaccgcaacgaggcagaactgtgaatataccagtagaaaactcatttactcttcctgctggacaaacgcattacagtttccctctacagcagggagaaggtaataaagggctacattttgttgcatacctgaaatcgccagcctttcctttgaagaaggacacagcctgcaagcttatgatgacctacacctatggagcggatgaaccatacgaacttagatttattccgttaaattcagcagaggcgggtttcaaatctattcgggttgaatggcgtccagcatcagagtgtaaggctgccgatcttgagaatttgccggttccagattttccagcccgtaaaagctggtccgactttcagaactttcctaaagaagatggcaaaagcccctctgaccttctggagtggttggaacgagatctcaaaaaaattagtgatatctcacacaatggtcgtgtttccggagttatctctaaatggattgacaaaggaaacgataatattttctgctttattgatgatgtgtttgtgcacaaatcgtcgttgtggctgagaacggatcaaggattgcctcaacaaggtgaagtactttcattttataaggtgaaagatagcaacggaaaattatcagcagaagacgtaacaataggagcggaacagcctaaggggtgcttcttatctaagagcatccgcttccctgcattaaccatctggaatcatggacactctctttcagaatcagatgtgcctgaccattttagaaacatgatattcgaaggtactcaaaaaatcataacaattattgagtcggtaaatatgccggccccccttaaagaggagcttttcttctttctgtgctgtctacataaggatgctcccgggattgttggttcccggctccttgatgctgtgaaggataaaaagctttttcggaggtactacaagaatattgctttcgccatcggtaatgccgaactgccataccaacaaaagctgttggagaatgtcatcgaccccattgataatgagggcctgaccagatccattaccatggaggttttgtcgatagctctttggcgttccaaaacactgatcaacaaattgactaaagaggatctcgtagctttatctggaagcttatatggctgccttgagttcgacatccagaaggttgttaatgatgggaaaggatatcagatcgcgactctctgtaagcacttggaacttcttcttgcactcctgagaagccgacggattgaagacgaagagttcaaaatgattttcgccccagataatgacctgactaaaaaatatgtggcattggtagatgatgtttcaaaattagtatttgatagtggcatcaatctgaagtcccgaatcaatcttcaaattaaaaagccggaaattttctgcagcactcctgatctagtatatgcattgcgtatgtacctaacaggagacgctggtgcaaacatgataggaattacttctgttttagatgattaa

SEQ ID NO: 313003 - DNA, 2706 bp, Proteus mirabilis
atggacactaatagaaataataacactcagataagcgcagataatggaaaaggagctcagagtgatagaactatatacgctaaagaggaagtcctcctgaaaaaacagcaggaactgaaagaattagaatattctcttggtcaaaaagagacctctatcgttcaaaaggaacatgagctaaaagccgctaaagacgcgatagctaaaaaagaagcggagctgaatggcaaacgtgttcagcttgaagagatggagcttcaggccaaaaacggttttccgcaactctttgaggaaaagttcgcagcattccaaaaacaattggagcagcgggaagctcaatgcgcaagtgagctggagtctcttgaatccgaaaaggaaaaattgcggcagagagaggtggcgatacaaaaggctgaaatccaaagggacaatgggtatgcagatgcccgggcaaagcttgatgacgagctcttcaatcttcggaaagaacatgaaaaggagcaggagtcaaaacgggcaaacgctctgactgccattgaaaaggaagtttcggaggagaggacatccagaatagcaagcttggagaaagagatagctgatagactgaaagttcatgaggctgcgattcaacaggaaaaagatgagctcgaacaaaaaagaaaggctttcctgaaggatcaggctgcgcttgatgaactcaaggatgagcttgagtatcaaaagcagcgccttcaatccagcaaaggccgccttgaggaacgagaagctcatttgaacgttgaggtggatgccaaggttgttgaacggaagcaatctttcgagaatgagaagtctgcgcttaatgatgaaattgcacgtttgagagaatctatcaaaacgagcagtgctctaatttcaaactttgaagaattgaagcataagctcggtgatgaagacccagccgctgttttactgaaactgaaaacctatgaagaggaaattaaaaagctgcgcgatgaccttgccacacgcccaacacaggagatgcgggaagcttttgatcgcttgaagtccgaacagagcgaactgcagctggcctgtaagcgactctctgaagaaaatgaggctctcagaagttcagcacgcgcacagtcggatcttgaaatgcaggtagcggaactgaccgataaaaacaaatctctgctgagacggtttgaatcagtggatgccgacaataatcgattgatggaagagctgaaacgtttacagtcttcttacgagcgtgaacaggaccgagaagcaagggttcgggacattgaaactccatacattcataagagtctgcctcgtgcgcaggagcaaattagtgaaattcaatggcttgataggattaggacatcttgcacaaattatggtttgagatttccacgacgaatactttatgcgtttcatacagctttaaaaactgctgagtggtcacccatgaccgttctatctggggttagtggtacaggtaaatctgaactacccagactttactcccattttggcggtatcaattttctgagcctgtctgtacagccaaattgggacagtcaggaatcgatgcttggcttcttcaattccatcgataacaaatttgatgctcagccagttctgcgtttattggcacaaagtcaaaaggcacaggttgatgactatccaggcttagaagatgtaatgagtctcatattaatggatgagatgaacctcgctcacgttgagctctattttgctgaatttctaagtaagcttgagctgcgacgcggtcgcaaaggcaacgaggtgccgtgtcttgaagtgaagcttggcgcaggtattcaacaatatgatctgcctcttggaagaaatgtgctctgggcaggaactatgaatcaggacgaaacaactaaatctctttcggataaggttctcgatagaggaatagtaatcaatttcccccggccggccactctcgaaagacgccgtcagctgaaaccgttgggcgaacaggctcctctgctgtcccgcaaactgtgggagggttggtggtgcaaagaaagcaaattcaatgacgatcagattttaccattcaagggattcattgaagaaatgaatacctcgttgtccaaggttggtagagctctggggcacagggtgtggcagtctatcgagtattacatggctaattatccagatgtgttggaagcccagagaaacaacgatgacgcaagcttgggcaaagcaatgaaagttgcctttgaagaccagcttgttcaaaaggttatgccaaaacttcgaggaattgaaacccgagggaaatcaaaattagactgccttgataaaatacgaactcaactagtcaatgacgattataacatcgtagaggacttcgatcttgcttgtgagtttggctatgggcagtttatctggaatagtgctaattatctaaaagatgatgcatttttgaatgagagtaataataacgattccagagagtccatagttgcctcacctgaacaatcaaattttcatagtagttcaaaagtgggggatagtcttatccctagtgagctcaaaagatttgcaagtgataatcaaaagaagctatggcagctaaccacaaacgaaataatgagagctatgtcatgtgacgtaaaagaagcgaaatcactcaaggatttgtgtaataagacaaaggagtcatag

SEQ ID NO: 313004 - DNA, 2172 bp, Proteus mirabilis
atgagtgcgccctctacaaaaaaatcagcaaaagaccatcgtcctaaagtaatcagttttcgcacaacattggatggattgaacatcgccgccaggcaaagtgttctatggccatgtcacgctttcaacatctctattccgcaaaagaaaaagagtggcctcaatgtgtttgaagaaactgtcttgaagataacagagattgaatccggagacacagaaaagattgcgctgctcacttgtctggaaaaggagctggtggccttcattcagaatcgcctcaaccagctcggccttttgaatgatcgttatgagttgactcagcaaggacaggagcttctggacgagtggcagaataaatcagacggaaatctggaatacatcgtgggcacagtgtttttagatttgctttccgggaagcttcttccctatgtcagcacggagcagttgaactataaaaaaatagagaatctttactcaaaagagaatcctcagaaaaaaggtgagtttgaacactatgtaaatttcttcattaaccctactgatgaaaaatggattcgttcaattcagatacgcccagcaaaagactcttgctggaaagcagttcctgactccaacgatatcatcagagccattagggagtttaagaaaaaatataaacggcacgccttgttgaaccaaggtatcgatcagtacccgcctccggtgccaatggctgaagccatatccttacatgataatccagaactggtttacttgcattgcaatgtccttatccagataggcaattctgaccttttggtgacagatggatgcggctttggattctctgaacgctttgccaattaccttacttctcaggactggcagtgggtcatagatttgaagaataaaggtgtaattgaccgactgagctccgctcaaattaatgaagaattagaggacgatacttcagcagcagacgggttgaaaaagtacccacggatagctcgggcgcttcgacgcgcacaggaatatctttcagacgccgaaaagatcgaggttaattcatccaatgatgagcaggaattcgcccatttgaccggcttggcggtcgtcgccttttacgaagccatagaatgggcgctgcgatttgttgtatctgataaccctgtgactcactgggaacgcttgttctcgtcacaatcctaccgggaaaatgacaagatactgcgatcgtttgccaccaagattgggtttgatgtttcggacagtgtgaaggcccttcttcaagtgaaacccggcaaaatcagagccgttgaccgtggtgttgctgagatgcagccgctactggctctggcaatagccggggcgataaatgatcccaaccatccgctgaatcatctggccattgaagactctggatgtctctcctttataaatgcgctgaaagaagtcagggacccggtatcccatggaagctcaaccgatgttgaactttcaccggaaacccttgagggttattgcgatagaaccactcggctcatccagtcgctaataccggatataaccgaagatgcctatacagccaaaacaaagcaggaaagaaatattgatcaggtcagattgaaggccaggatcgaactggacaagtcattggggcttggatttgttcaagctgtttcaccgtcgttacgggaagagttggtcaaagcaacgatattaagtcagaaagcgactctagataacgaacagattcagcgctacataaatttgttggcgtccattgtgcaattgtcgttgctggaagtagcgaaggaccggagaaaaatagtcaaaaatcgaaataaactgaaggatgaggcgattgaaaaaatcgttcaatctggtttggttccagcgtctgatgcaataccagtgcagattagtactgtaaatgcagatcgactatatcgtgctactcaaggctcaagcacaactcttggggctcaacttcttgcgctctgtttgctcgcatcagaaggtgaattgctagttctaaaaaggtgttttccgaactgctttgagcttatcgccaagttgataaaacttcgtggtcacgggaatcatcatcaacatgactttacaagggaaaacttggagtcattaaaaataaatgtattcaaactagtcaaaataattatggaagtattttaa

SEQ ID NO: 313005 - DNA, 3438 bp, Proteus mirabilis
atgagactgaaagacataaatgctgaaattaattttgaattatggttgataccggatctgtccggagagactccaaacattggtattggatatatcgcacccaacaataccgagcaggcatacagattgagaatcgatggccagcagtggagcgtgcagcttcgtgatccttcggccggaaaggatctgaattttcatcttaaaagaggttgtgcgcatcttgccgaggtaatgcaggttgccaaggacggcagtgcgcttgttaaaatcatctttttcaatggtgaaatcgttgaaattggcgacgtggagatcggcattgatgagcgcatagaatcaacggctaaaagaaatggcattcgcttcaatggagctgaagagctggggagcgtattaaacgataaatgcaaaatcagcgttggcggcgaagatttctttctgctcatgagcggcccatccgctaaggctgattttgaagcggatattcctgaggatgaagactcgcccaactccaaagccgttgtgcaggagaagtaccgggaattctctatctatggagagagagttcgtatcccagttgaaaggcgcaatgtcgataagtcaaaggacatctattttgcgactaaagcggtctttaaggacaaccagaagagtgaaggagcattgcgtctggcaaggggtacggtcctgttttctgactacaccaagacaggtcgcattcgggctttagccgctggagcgatgagtcaacttaccaaggagactgggagttacttgcaacagtgggacgagtacggcgcaattgaaggtgaaatgctgctggcccgggccaaagcagttggcagaataggttatcatggcactgaacagacaacaaaaggtgttaagttctttgtgtcgtctattccggatcaacttaccgaaggcgatgagatagagatcacctccgaggagcctttatacctcaagaatccggatcttacatgggaatcctacagcaaggctctggaagaagaattcgcaaccaaaatggatcagaaaaagaacgatgctgaaatgccagcttctgtttatgccccgatccttaaaatttcaaaaaccagcattgaattggatctgcagtcaattccgtctggtcaaatgtttttgattctgtccatcaatggcgacaagattcagattgaaagacgaatgcgggcacgttcagccattctggaaggacgctgtgcaaacccgcttctcggcctgctgattgaagaaggtggaacgctaccagacatacagcgagtcaccaaactaaagcctttgacgtcctttgtgaaagagaagatttttaagcatcctcccacagacaggcaggtggaggccatcgatgtcgccttgaacacaccagacatcgctcttattcagggaccaccaggtacaggaaaaacaactgtagttacagcaattcttgaaaggcttaacgaggaatatgacaaaaccaagtcgataagaggtcagatacttgtctccggttttcagcatgatgccgttgagaatatcgttgcaaggttgagtgttaatgcacttccggcagttaagttcggcagaagaaccggtgattcggaatttacggaagatgccgtcactgaaaaaattaacaaatggtgctacaatgtcgccgagaatattcgtatcaagaatcctcaaattgctcagacggaagatcaggtaagactggcagaactgtttgtcgcatattcattgtgtccctcgaagaacaacacagtcagtttaatgaagcgcattctggatttgcccagagacgtgatttctgaggatatcaccagtgaggcagaagaaatcatcaattccctgcaaaccgaactgaagtcgaatgatccttccaccttgcggctcgttagagctctgcgtgtcagtgaagcagcctttgttgacgacggtgccgcaagagctgtcgatttgctggttcagatcgaagacgaactggctaatccagatttaagcgttcttgaaaaagcggcccgttggcgctgtggtaagcctttgagttttctcccagagcttagagaactgaaagaatcactactttataaatatctgcctttgcctgatttcaggactgaaaaaccaagagaagatgttttgagattggtggcaacggtatctcagcttctggagaaaaaactcaattcaaccaataaacgtgatgcaatactggctgagtttttacatgagcttgaaaacaatcctgatggcgttcgtgaggccatagaggattataactttgtgtatgctgcaaccactcaacaggcggtcgggaaagatatcatctgctcaaagaataaaaacgtccgatatgatcagcgaacaaaaatggtcaggtacgatacggtgatcatcgatgaggcggcgagaaccagtccgcgagacctgcttattccgatgtctcaggctgaaaaaagaataatccttgtcggggaccacaggcagctgcctcatttgattgatgaggaggtcgcgagagccttggaaggtggcgattcatccggtccgtcggttgatatcgattttgtcaaaaaaagtatgtttgagtacctgttcaaccgcctgaagaaactggaggagaaagatgacatcaaacgaacagtgacgctggatgctcagtaccgaacacatccgattttgggggattttgcaagccgcaacttttataaccaatacaatgaaggttatcgatctcctttagctgctaagtatttttcccagaagttaaaaggcatcgaagataaagcagcagtatggtttgatgtacctaatagtagagggccagaaggttacaacaaagatggtgggaagagatggcgaagtatagaggcagaagttatcgctgaaaaaactaatacttggatcaaatcgagagaatccagtgcagaatttatgcaggaactgactggtgattcaaaacatgcaggtcttagttttggaattattagtttttataaacctcaagtatttgaagtctacagaaagttagaaaaatatggtatcacggagcgggcacaggatggtacatggcagatatgtcaagaataccgctttcttgaaaatggcgaagagcggctccgcatcggtactgttgatgcctttcagggcatggagttcgatattgtgtttctttccatggtgaggtctcaggacatgaacgccttgccgcctaatatacgcaacgagctggattacaaaaagaagcaacaaaaactattcggccatctcatgtcggaaaaccgcttatgtgtgagcatgagtcgtcagaagagggtcttagccattgtgggagacggcgtccttacaaacacccagattgctgtggatgcagttccggctctgaaaaacttctatgatttgtgcctcgaaaagggggtgatcctatga

SEQ ID NO: 313006 - DNA, 1497 bp, Proteus mirabilis
atgagtcaaagattcaacgagtatgtggatgaatatcagaatgtacatatccttggcgatcagcttgcgcctcctggtggtcaagggattgtttacagaaccaaagattccgatttagcaatcaaacttgttattgattctaaaggtaatcctgttaccgataaaaaattagtagagaaatactcgaaacgctttaagcgcgttcggcttttaccaattccaatggacataaatatagcgctaccagctgtcgtattggaaaacaaagccggttatgtgatgcagcttttgagtgagatggttccgttcagtcatttttggctcgatggcaagtccgcagaaaaaattggtcccgacgatatcccaacatggctttcggcaatgccggagaacgaagctaaaaagattgttcattattatagaactggcgggcttagacgcaggcttcatgcgctctacaagtgcgcatccttactggcacgccttcacggcaatggtatggtttatggtgacatttctcccaacaatatctttatttcagaagggattgatgattcagcagtctggctgattgatgccgacaatattcgatttgaaatcaccgcaggcggaagtgttgtttatacaccaaagtacggagcccccgagctggtgcagggcaaagacggtggaagaccttcaagcgattgtcatgcgttcgcggtcgtggctttctaccttctttcgctgattcacccttttgtcggaaaaaaggtggatggaacggatgaaggcgactgggctgatgaggaaaatgatggcgaggatgttgaagataaagcctatgcagggctgttcccttgggttgacgaacaagatgatgattcaaactcttccgacagcggtctgcccagatcccttctccttacagaaaaactgatctctttatttgagggcacattcggcccaggtaggacatccccattgctgcggccgaccatctatcactggcctgaggctctcgctcaggcagcggatatgactgtcacgtgctcaggttgctcgatgaactattactatgatttcattcacccggaaacagaggctcacaattgcccttactgtaaaaagctgaggccgcaggtgctcattcttgagtcttatcgatggagtggaccggacaaacccataaactcaccatgctggcggtatgtacgtgagatccctcagggtaccgaactcacgataccaagacgaatttttgatgagtttgcaatgcttgattcggatacagcagaggtgctcatctctttgagcaataatggcattttgattaagaagtcagaccatggcaaagccgatttgtccgttgctgctgacagtccgcaaagtggttttcagaagctgtattcacagatgaaaattaaccgggtaacgccgaatgctcagttctggatgttcgcacatttgaatagtcctcggctggttaaatgcatgatcagcggaggtggcaaatga

SEQ ID NO: 313007 - DNA, 729 bp, Proteus mirabilis
atgcttgatcaactctggaatagctggggggcctcagtaatcggccccctacatgttaaagccggtattcccaatcaggattcttggatggcacgccggtataaatggggaaatgtcgttgttgtatcggacggactgggcagcaaggcacattcagatcacggttcaaaagccgcctgtctggctgtgtttgaggcagccaagagctaccagaattcccctgatgccaatatcgttgatattttaaggctgattcatgccaactggctcgtgaaaatagctccgtactcttcaacagattgttcggccacatgccttttcgccatccagattgaaggcattatcactcttggccgccttggtgacggaatgattgccgcccttggagaaactgacgaaaacctgtttattctcagtgataacaaacagggttccttctcaaactacacaaacagtcttcagcaggagtttaagccagatcattgggaaaccgcgacgattgaaagcgcggtatgcaatgcagttgtgctatgtacggatggaatatccgatgacctgttacctgaaaagcagatgacttttgcacaggaactctactccacttatgcagacctggagtcggaggaaagaaagagggatcttaaacgttggctcaatgaatggccggttccgggacactctgatgacaagacgattgcctgtctgtttaagaaaggaggttcccaatga

SEQ ID NO: 313008 - DNA, 582 bp, Proteus mirabilis
atggaactttttgtttttgtagatgtttccggcagtatgaatgaaatgggcaaaatccatcttcagcggaatctttgccgatatgcgactcagttaaggctcatagataaggaaaaatattcgggcttagacatccgtttttatcaatgggcgcagaatgttgccgtggccgttttgcaaagcgacggggatatccctgacttaaacgctgaaggctcatcgaacctatgtgttatctccgaatttctgtcccagaatcagagtaatactgggagattaatggttctcattctttctgacggcaatttccctaattcagacatcgtaagttttcagaaacaactgggcacatttagcaacctgatcatccggacagttgccgtcggcgcagatgctgacctgttgaagttgaagaaaatttccacaaataacactgtttacctttcggagaacatagcttcagctattgacagcacaatctttagttctgatgagccgttgaccgcgccagtatccacagccgggattctggaatccgcaccggctgaaacagaagaaccagaggaggattgggatgcttga

SEQ ID NO: 313009 - DNA, 1731 bp, Proteus mirabilis
ttgaagaaatatttaatgacatggtacggaatgactgatttcagggcctcactcggactggaacaaacaaccggccccgttctgggagctttgctggcggaagattacaccgatgtgatcatcctcggctttacgcacccggataaacccgaaaacaaagctgatgtatttcagcaaaaaattgcaggtgttgaaggctctgacccggctgctgcgagacagtttgtcgacctgttttcaaatacaggggctgcgcaccatcattttaatgaatggctaaagaaacagcttcgggatgccggtaaaaaggtcgatgtgcgtttccaccctgtggagctgacgcatctcaatgacacggagggcatctatgaggccgcgactcattccctgaatgcggttgccgcatctgaaggtgaaaagctcgttacgctctacctgagtccggggactccggttatggctttcgtttgggcttttgcggccctgaggcacccgacgctaaaaaaacgtcttatcgcatcttcccagccaggaagacctccggaaagaatcgtcctgcccaacgagtggctggaatggcacggaagacaggttcgaaaaaccaatacggaatctgatcagtatgatgccatttttcacctgttcggcgaacagcgaatgccaaacctgcttggcgtgattcagttttcaagcaggaagcacatctttgtgaattctgcacagttccctgccgatgtcatgaaacagtttcttggagaagctgaatacggtgaaattgcggtggacccgtatgaccctgaaaatgtcagagccacgattctggatctgatcgcgaaaatgcctgtcgatgcgaagatcggcttcaacttaacgggcggaaccaagttgatgtatgcaggggcgcttgccgcctgtcgtaaagtaaatgcaacgccattttatttcgatttttcaaagaaacaggttatcaaccttaatagtttcacaaaaagtgagactgtttcagtagattcggtcgaaacatttctgaagttgaacggtgatggattaacagtatcgaagcctggtcttacagaacaagaactttctcgagaaattattaatgcttctcagttaatctgggaaaatcgtaacttgatcgcgtcaaagtatcgtgagctgaaaagttatatttcggatgaatcattcaagaattggggggatgatttctacgctgaactgacaattgataaacaagcaaagctaacaattggcggtaagtcatttgtatttgatgaattccctggttttcttgagtttctgctgggtaagtggctagaggtgtatgtttttagtgtgttacttcctttaaaagaatctgctgttctaaaagatttacgccttgggttagaggtgtctgttgtggacgtcgactccaacgataactttaagtattaccacgatgggtttaaagaaaatataggttatcaagagtttgatgttatttgtaccgacggatatcgcttattcattattgaatgtaaaagtggaaaggttgaagcgaaccatgttttgaagctgagtgaaactgccaaacattttggtggtgtgaaagggcacggaataatgatttcgtcttttcgtcccccacatcctgtgataaagcaaaaatcagatgatcttataaatgtggaatggttttttggtagtggtgcctctgagcatttgctaaattttttcgggaaaatttga

SEQ ID NO: 313010 - DNA, 2148 bp, Proteus mirabilis
atggatattaacggaattattgaggccattcgttccggtgtgtcaggaattcagatattgggccaggacttcaatagaattgatgaagaaattgaagcggttgccacgcaactgaacttcacagtaaaggaatggaatctggggtatggctgggttgattttaagactaaacgggctctggtacaggatcaagagccatcactgtttcaggatcttaaagcaatagctgatgacgatccaacaggtaggatttatgttatacaaaacgcctattccgtattgaaagatgacattagagctattgccagattgcaacaggaactgttaaggattaagcgtcattttaaagggcaggctgcgatctttttagtgtcaaaacagagtatagaacttcctgaccttgtagatcttttactccctttctcttgtactcctctttcgttatctcaagttgatgagatatttcacacgctcttaaacaattcttctatctctgttaatactgcagtgagaaactcgcttaaagccatactgtctgggatggagcgagacatggtttttagaatattcgaaacgctcaaaaacaaatataaggacaaatttacacaggaatctgtgggggatgctttggccttaaaaaagagagagttatctcgctcaggtctattggagctggtcgatagtaaaatagatattggacaaattggtggcttggagcggctcaaaagctggttacgtaacaagaaacacatcattgatgatttaacaaaagcccagagcttgggtatttcggctcccaaaggcgtgcttttagcaggtatgccgggatgtggaaaatcaatgagtgcaaaagccgtttcttcattattcaatgttcctctttttcgcttagatattggctctttgatggggaaatttgtgggtgagagtgaagccaatatgaaagccgctcttaaaattgcagaacaagcgagcccttgtgttttgtggatcgatgaacttgaaaaagctttttcaggaattaatggagccggcggaagcgcagaaataacaacccgtctttttggttattttctcacctggatgcaagagaaaccgggggctgtatttgttgttgcgacggcaaatgacattaccaatatcccaccggagctattgagacgtggacgatttgatgaaattttttatgttaatttacctagtgaacgtgagcgaaaacagattttcactgttaaaacaaatcaactgacccctccgcctaaaggactcgaccttgcaaagttggcaactatgtctgaaggcttctctggtgcagatattgaatgtgtgatcaatgatgcattagagagtatgttccgtagtaatgagtctgttctaactcaagaaattattaataagcatataaacctgattacgccaataagtatcgttcttaaggataagatttctatttatcaggagttgtttaaggcatttaacctgaaagcggcctctcttacagacgaagagcttgagagaattaatacaataagtgaaagcgattcacctgcggaaaaagaaaatgctgcgtcaaatgagtttatctcatctgaaaagctcatagaattagttaatgatcaaagcccattagttcgtcaagcggctctaaagaacccccactgtccacatgcagccttacaacaagttgcaagtcgatataggaaatttgatttcaacaaacccggctcatggaatgacagcgaagtaacaaaaaaagagttcgagctggcattgcagcatccaaatatgagtggggacgtcattctcgaactctataaaaagaaatggattgatgcaagtaagttattgtcacttgcccataagctttcttttgaagaacgaaaaataatatttgatacggcaacaataaaatttcctcggtctatcacaacaggtacggttcagaatattccttgcgttacaggcaatattgtcaaatataacgacattattattgaaatagataatgaggaaggtaacacccaaaaagttaatgcttctgttgacgggcttgttgtcaaggtgtgcgtcaaagtcggcgaaataattaatgcgggtgaacagatagcacaaatactcgtacctaaaaatcaagggagtttaaattga

SEQ ID NO: 313011 - DNA, 1572 bp, Proteus mirabilis
atggataggaatcaggacaatttggatttaccagcactgatagctaatggtgcatctaatggtgaagcgcaggctgatgcattagaggaacaaatagagtttactccagaggatgcaaaaaaaacgcgcggagttataagttcatttattcactcttacagggataaatcgcctgacctatctaataatacttggctttgtattgaattctccaaatatccagatatttggagcagtgaagaagagctcaaacacgctgctgatgagattgttgaggaggtagaggttttcgagtcttctcagcaagaattaacggaacatcaccgtaaaggattaagtactaacaactggttggctagaaaaattgaagaaggagcgagcactgctggagttacaaatttcggagcttacgctagcgaaattgatacagctattgcgtccgcaaacaaagcaaacatcgacttgctctaccgaaatgatggccagttgaatcagcagcttaatctggatggctttattgctgaacaacatcatgttgatacatttaaccttgatgcggtagctaaaagtagtgaataccgtgccgaagttttacgacctaaacccagccaaacatatggcaaaaattcagttgatattgtgattaaggatggtgatggaaaaattgtacgtcgttatcaggcgaaatatggggccgatgcagatgctacagacgcgttgcttaaaaaaggcgattaccgaggacaacgcaagctagtgcctaaagggcaatctgaaaatattcctggaagtaccgaaacaatcgaaattgatggagttgaatcgaagcccctttctaaacagaaggccaaagagaggcaatgcaaggcccaagaagaagcagaagccaagcaatatgattggaatgagacaagtaggatcgatattacaaaaaatatcgggaaaaaagctggtgccgcagctcttttatctgtgggatttcaaggggctcgtattctcggacggcgaatctggaatggaataacagggaaagacaataaaagtgttgaagaagacctccaagagtttgtgcagagctccctaaaatcagcaacaacttcgggactaaccgttgctataagtggtgctgtaactgtagctgtaaaaagtggctggttgggtaatgtgttaaaaaacacacccgcaggaagaattgctaatgctgtttgtatcggtattgaaaataccaagattctctacaaattcgcaaagggagaaattaccggtgcagaagcactcaatcaggcgggcagtgccacatgcagccttgtgggaggacttgctggtggaacaaagggagctagcataggtgctgcgctaggaacagtgttaggaccagttggtacagctatcggaggtgttgtgggtggtgttgtaggtggaattgcaggcagtaccgttagcgaagccatttatgaaggtggaaagaagattgtatccacagtcgttgataccgttaaatcggttggttcagcaataagtagtggtgtttcacggttctgtagtggcgtagcttctcttattggattttaa

SEQ ID NO: 313012 - DNA, 702 bp, Proteus mirabilis
atgtttgatcctaaaaaattcaccaccccggccgccaagccgcttcccgtcgttctgcttctggatgtcagctccagtatgtccggagataaaatcgagaaccttaataaggccgtcgaggatatgctggatacctttgcgcaggaagagaagatggagacagagattcttgtttccgtcatcactttcggcaatcaggttgagcttcaggttccctacaccaaggcttctcaggtgcagtggcaaggtctgcaggcaaacggtatgaccccgatgggaaccgccctcaagatggccaaggccatgatcgaggacaaggagaccactccgtcccgtgcttaccgcccgacaatcgttcttgtttctgacgggcagcctaatgacagttgggaaaagccgctggaggactttatctccgaaggacgctcttccaaatgtgaccgcatggcaatggctatcggacgtgatgcggatgagacggttctgaagcgttttatcgagggcacgccccatgaccttttctatgcggaaaacgccgggcagctgcatgaatttttccagcgagtgaccatgtcggtgaccatgcgtacccagtccaagaacccgaacgttgttccagcgtctattgaattggatgagtgcacgaaatcaaatattgctgcgtcaatctctattgagaatgatgatcaaggttattggtag

SEQ ID NO: 313013 - DNA, 282 bp, Proteus mirabilis
atgccagtattcagtgtcacttcaattatcgacggtgataccttcgcggtgtctccagagtggaaatggaacggagagacgggaaccagagtccgtccagctggatacaatgcgcctgacttgcatacggccaaagaacagaaagtgaaggatgctttgtcaaagcttatcattgggcagcaggttgaactcagggccgcttacaaagtggatcggggccgactggtctgcgacgtgtttgtcgggagcagaaaccttgccgagtttttccccgagtattga

SEQ ID NO: 313014 - DNA, 1491 bp, Proteus mirabilis
atgaatattcttttaagttttacggggtttaatgacccttttagtaaaggtctagtggagcaagaagagcaaccaggcccaatacttagtgtgttaaaagccaaaaccttccagatcgtttacttgtttgacactcctgctactcgtgaggccagtagtaatacaaaagaagctatcaagcatttgtatcctcaatgtattgtgcatgtcttggacatgaagttatcagatccgactaactatcatgatattttcagaggattgaaagagttcgctctcaccattcaagaagagcataaacatgcaaagttctatatatcagtagcgtcgggaacaccgcaaatgcatgcttgttgggtgctgctggcagcatcaggtgaaattcctgccaagattcttcacgtaaggcctccacggtttgtaactaaggaccgaccactgctcagtgagatagagctatcatccgatgagtttccttcggtcagattcaaatcctccagcttcactattgatgaacatgagatggatgtggattcggtcagagcacagctcgggattgtcggagatcatccggctatgctcaaagcccttgagatgggtgccatgctggactcatcgctagctccaattttgatcacaggtgaaaccggcaccggaaaagaattgtttgcccgctatgtccatgcattgagtggtcgtccacaggaaacctttgtcgctgtaaactgcgctgcaatccctgaggatcttgttgaaagcattctttttggacacaaaaaaggtgccttcaccggagcggtgaacgaccagaccggaaaatttgatgcggctgacaaggggacgctgtttctcgacgagcttggagaattgcctctgccggctcaggctaaacttttgagggtgcttcaggatggtatcgtcgaaccgatcggacaacgtaaggggcatgccgttgacgttcggattgttgcggccaccaacctagagcttcgtaagcaaatccgccaaggcagcttccgggaggacctctattaccggctgaatgtcggtgagatcaaactgccttctttgcgtgagcgacgttcagatattcccaaactggtactccatatcctagatcgtttgaatacttctttgaaaagacatcgccgactaactgccgatgcacttagtcgtctgcaggcccacaattgggaggggaatattcgagatcttgagaatgtcatcgagcgccctgtgaggctgagtcgtgtggaagtgctggatgcttcagacctgcttattaccgaaccgatcacctatgccgatccattggatgctttgcccgagccttacgagggattttctctggatgagtttctcggcagtgcccgcaagcagatgattttgagagcgcttgaggccgtgaacggcaaccagagtcaggcagcgagaatgttaggtgtaacccctcaggcggtgcacaagtttttgaataatactaagcgataa

SEQ ID NO: 313015 - DNA, 600 bp, Proteus mirabilis
atggtagcggtgaacaaaaagataaaagttggttttatcgttgaaggtggtagcgagaaagttatcgttgaatcaactcaattcagagattttctagatggaaaaggctatgagttggttacgcccgttattgatgccaagggtggtggtaatctgttgcctcaaaatattgaatcgtttgtagcacgctttgatgttgaagaggttgaccatatttttgtattaacagatctcgagaatgagcctagtgttgatgcagtgcggcagcgtatacaaaatgagtctattcagttttcttttgttgcggtaaaagcattagaagcgtggtatctcgcagatagtgcagcaatgaattcttggctagatgactctgactttcatgaggcacagccagaacaaacgcaagcaatgccatgggataggttaaaagagatcgctaccgaaagaggaaagcgaggccctgggcagaagatttcatttgcaaagaaaattacaaaacatcacggcttttcattagttcatgctgctcagcaccaaaactgtcctagtgccactgaattagtagactattttactcaaggaatagcggatgcagattag

SEQ ID NO: 313016 - DNA, 1119 bp, Proteus mirabilis
atgaatatacaaaaacttgaaataaagggttttaaaagtattgcccatgtgtcgctggaaaatatttcgccttttctagtattcgctggagcgaatggatcaggaaaaagtaaccttgttgatgctctggtatttttgggcgctgtcgtgcagcgtggcgctattcaagccattcgtgagtttggtggttttagtcaaattcattgctttaagtttcgaaaagaacagcgcacaacgatgtcttttgccttgtcgattgatatagacggaatgctgtttgattattcgttaaaaatacgtgcgttaaataaagcccctgagttgcaagaatcattaaaaatcaatcaggctagcatcataatagaccgcaaagcagcgggcgaaacattcattagtctaactgacggggctcccttacaaaaactaccggattatcccaaggagatgtcagcgttaatgctattgggtaaaaatcctttatatggatttctaaccaatatacgagtttttcgcattgacccctttgcggcaaaagagcccgatacctcaacggcagatgccagtattttagatgcccaaggtaaaaatattgccactatgctatctgttcttgaaaaagatgaggattttcgagagcaaatcattgagtggatagagctcattgtgccaggcatggaggcggttgcgaccgaaaagcagcgtctagactcatctaccgtcattacttttaaggaagagggaacaagggctagatttccagctaagttaatctctgatggaaccatttatgcgctgtgtatattaacagccattcttagccgctctaaatcatccggtattaccatcattgaagaaccagagagagggattcacccgaaagccatttcagaactggtttcattaatgcgtgacaatgcgtcaactgagcatcctgtttttatcactacccatagcgaatctgtggttcgtaacctagaaacgaatgagctctattttgcgagtaaagccgatgggaaaacgcaattgcaaagcgcgttagactctggggtagataaaacaaaaattccattagataccgcatggttaaccaatctttttgatggaggtttgccatggtag

SEQ ID NO: 313017 - DNA, 3540 bp, Proteus mirabilis
atgaatacgaacaacattaaaaaatacgcaccaaaagcgcgccgcgaatttatggatgcggtagctaaacgattaaatacctttggtatcaccgcgaataaaaaaggcgagctacaaattgcagaagcgaatctacaaggttctgtgcttcaaatcgccggtaacagttttgacggtaaactggctgagcccagaaaacgcatagtggccagaagccagaagctggggtatgcacaacttattgaacaagtagcttatacctggttcaaccgtctgtgtgctattcgctatatggaaatccatgactatctaggccacggttttcgtgttttgtcgcacccagacaatcctaaaggctttgaaattatcgaccatgcgcaagatgctgcggatgaactcggattagatagagctcgcattatcgaactcaagcttgcgggcaacaaagacgaagagctgtatcgtgaactgttgttaggccagtgccataagctacatgaagcgatgcctttcttatttgacgcattggacgatgaaactgagcttctgctaccagacaacctaacacgtaccgactcaattctgcgtggattggtagacagcattcctgaagaggactggcaacaagtcgaagtgattggttggctttaccagttttacatttctgaaaagaaagatcaggtcatcggaaaagtggtcaaaagtgaagacattcctgccgctactcagctatttacacctaactggattgtaaagtacttggtacaaaactcagtcggccgtcaatggctgcaaacctacccaaactctgccattaaaagccagatggaatactacattgagcctgctgaacaatctgacgaagttaaccaacagctaaaggctattacgccagaatctattgaacctgaaaccatcaaagtattcgatcccgcttgtggctcgggccacatactgattgaagcttacaacgtactaaaagccatctacgaagaacgtggtttccgctctcgtgacattccaaagatgatcctggagaacaacctcttcggcttggacatagatgatcgtgcagcacagctatctggctttgccctgatgatgatggcgagagatgacgacaagcgtatttttacccgtaacgtgcgactcaatgtactgtcattgcaggaaagtaaccatattgatctgccgaccttatggaaagcactcaacctatcgggaagttggcaaaacggcacatcacaaggcttgttctcagatgaagagcaagatttaagctcgttcaatgcagacaaccgctaccaactgctgaagcgaacgttggcaagatttactcaagccaagaccttcggttctttgattgatgttccaagcgatgattatgaacacttaaaagagctactaagcactcttatcgagcttcaagagtcaggtgactcaatgcaaaagcctgcggcgaaagaattgattgagtttgttcatcaggctttaattctatcgataaaatacgatgtggttgtagcaaacccgccatatatgggttctaaactaatgaaccagtcacttaaagactttgctagcaagacttatcctgactccaagaatgacctttatgcattatttatcgcaaagagctttaatattttaaaaagaagagggttcaacgctcaagttacaatgcagtcatggatgtatttgggaagttatgagagctttaggaaaaatgttgtattggaaaatacaatagttgatgtccttcacctgggaccaaatgcttttgaaaatatcgatggcgaacgtgttcaggtaacggcatcaattttcataaaagatgagtgtgttgattttattcctaagtttcacaggttaatagatttttcttgtgaagaaaaacaagttaatttcaaaagggatgaagtttgctttagcttgtcaaaaatactagatttcaaaaacctacctgattactcaattgcttataaattgaatccatctagtgaatactacaaaagtatagtggaaggtaacttggaaaatgttgaaacaaaaattgggtgtcaacctggtagcgatctaatattttattggtgggaagtttcagataataaagatgttttcgttccttataataagggtggcgaatatagaaaatggtatgggaatcaatattgggttttaaagtacggtatcgatggtgacgctgtaaaaaataacaatggctctttaagcaatgaagcatattattttaatgagcacatcagttttactcgagtttctagtaggttgaatatgagatattacgactcgagttttatttttgacaatacatcccccgcagtttttggaaatcttaagtatttgttaggcttttataattcaaaagtaggagagtatcttcgtaaaacaaaatattcaggaacaaaaattgaggcaggacatatttctcagctgtctccaataaaattacgagaaagctctatggtgatatccactgtagaggaattgatatctttattaaaagaagattgggattctcaagagctttccaataactttgtggcgccagaaattttgctcttcccggatcttagacagtcttatgaggatgttaagaataagtggctaaatgcagcatctaaagttaagagttacgaggagttgttgaactataagttttctgaggcttatgggttggaagaagaagttgattgtcgggttgaactatctgagatatcaatgaagcgcaatgtattctttaattatagaaaagaacctgacttggttgccgagaataaacaattaagtgattatgctatagagattatttctttttttgttggtttgctttcaggaaggtatccaattgaatcaattgatctacagtttaaaggggaatttaatccagatgaagacggaattatacctgttactgattttgaatggtttaaagatgatgcggcaaatggggtgaaggaaatcatccaattaatttcaagagatatatcttttgaagaaaatcttggttttattgctgaatcactatgcttaaatgctataaagtccaaaaaatcagaatcagcgcttgagacgatccgccgttatttatcgactcagttctataaagaccacctgaagacttacaaaaaacgccctatttattggctgtttagctcaggcaaacagaaggcttttgagtgcctggtttacctgcaccgttacaatgagggcacgctttctcgtatgcgtaccgagtatgtcaccccgttactaggcaaatacgatgcgtatgcagagcagcttgagaagcagattgaaacggcagactcgaccagtgaagcgaaccgcttcaacaaagagttagatgctttaatcaagaaacaggtcgagctacgagagtttgatgacaagctaaaacactacgccgatatgcgtatttcactggatcttgatgatggcgtgaaagtgaattacggcaagtttggtgatctgttggctgatgttaaggccattaccggttcggccccggaggtaatataa

SEQ ID NO: 313018 - DNA, 396 bp, Proteus mirabilis
atgttagaaataaaaagtattgagccaaaccaagtaagagataattgtttaaaagaaagaattaaagaggcatcttcgtgtaaaactaccgagtacattgcatttatgaacggtgtagaagcaggctttctttctctggaatattgggctagtacatcaagtgcatgtatatatgaaatatatgtactaccagaatataaagaaaaaggaatcggtaaagagctactaacttttgctgaaaaaaaagcaatacaacttgagtgtaattatatacaactaatacctcaccctctcgatagtaatacaaaattacataaattaatttcttggtatgaaaagcacggctataaaaaagacaacacttctaatgaatattggataaaaagtcttttctga

SEQ ID NO: 313019 - DNA, 585 bp, Proteus mirabilis
  misc_feature (524)..(533): n is a, c, g, or t
atgcaggcactgattaataatgtgactcattcttttacctctatttttggttatgccccaacacattttattcaagctccaggcagagttaatctgattggtgagcatactgattataacgatggttttgttcttccttgtgccattgattatcaaatggtagttgctgccgccaaacgagatgataatcttattcgtgtgattgcggttgattatcagaatgcgcaagatcaattctctctcgaacatcccattgagtttttacctaataaaatgtgggctaactatattcgtggcgttattcattttttacaacaagccaaatatgtatttcagggtatggatattgccattacaggtaatgtgcctcaaggggctggcttaagctcttcagctgcattagaagtggctataggacaaacagtaaaaacactttatcaacttcctattagtcaaaaagaaattgcccttaacggtcaaaaagcagaaaaccaatttgttggatgcaattgcggtattatggnnnnnnnnnnattatggatcagcttatttctgcatgtggtgaagagagccatgcactattaa

SEQ ID NO: 313020 - DNA, 198 bp, Proteus mirabilis; identical to SEQ ID NO: 311949

SEQ ID NO: 313021 - DNA, 165 bp, Proteus mirabilis
atgatgaccaaatttcatttttacggctttgctgttgatgaagtatcgttacctgattgtttaagggtgacacataaatcactatttgatggttcgctacaaggtattcatcgcacagataaagccgtggttttgggcggtgatcatcacactgttattatctaa

SEQ ID NO: 313022 - DNA, 420 bp, Proteus mirabilis
gtgaatttagcagagcaagcggtagtggtgttaaataattttttattggctatgaataaatgggaaaactattggtataatttgaaaattgcaaatcctacagtagattatagaatagaacagaaaaaagaaattgatattatttatgaaaaatatgtaacgactaaagaaagaaaacaaggcaggcaggtttctttatctgctaggtatccatcaacatttactcccaattatggatttattagttatgagctaagttctaataataaaaaaatagctattgaaattcatcataaatttgatacaggtattgaaggtaagtatcgttataatttgatttttaaagataatgagtggcgaatagataggagagaaatatttgattattacgataataaatggataaaagataacttataa

SEQ ID NO: 313023 - DNA, 147 bp, Proteus mirabilis
atgaataaaaaaacttatattcagcaaacggttaagaaagtaaaacaagttattgtatgggttacaggcttgtttttgagagaagccatacgcgagtatgtaatccctcacgtaaaagaaatattctggagtcttttcgatgagtaa

SEQ ID NO: 313024 - DNA, 246 bp, Proteus mirabilis
atgaaattaaaaaaactgcatttagttttagggttaggcttatctatcattgcgggctctgcattagcggcagatcaggggcatggtactgttgaattctatggttcaattattgatgctccttgttctatcgatcctgattcaggtgctcaacgtattccattaggtcaagtgtcatctagcgcactgaaggacggtggccgtagtgcgtcaaaaatgtttaaaatcaaattattacggtgctga

SEQ ID NO: 313025 - DNA, 561 bp, Proteus mirabilis
  misc_feature (17)..(26): n is a, c, g, or t
  misc_feature (515)..(524): n is a, c, g, or t
atgcgagttttaaagcnnnnnnnnnnaaattattcaggctcaattgaggacgttttttttaaccaactctttgacttatcccaaatcccacagcaatttgagacaaaatcttttaccccgataatatatgatgttccgtttagtgaacgctatacagatgttgaatttattgattcagctaagaatttagatactcaaatgttttatatcgcaaataataaggaagttattgttgtttggcgaggaacggcaggaaaaactgatatattcacagatataaaatttaaaccagttaaactgcaacaagatatgggaatagaaggctatgtgcactctggtttttataattcatttaggactatggataatgattatgacttaaggccaaaaataaatgtaaataataactcagggaataataatccaggtgatgataatccattaagtttaatcaaaggtttagcttcagaacgaaaattatttatcgcagggcatagtctagggggggcattagnnnnnnnnnnccagtgctttatactattggtatgcctcgggtattaa

SEQ ID NO: 313026 - DNA, 360 bp, Proteus mirabilis
ttgaaaaatgccattaatcgccctttcgtatggggtgaacatgattgttgtttgtttgcttctgactgtgtcatagccgtttgtaatttcgatccctgcggacgtattcgtgggcgttataaaacaaaaactggcgcattcagagtgttacaaaaagagtttggaacattggacggagcagtgagccgtttttttgatgaaattccaacaaatgaagctggtcgtggtgacattgtgatgttcgagggtgacgaaggggaaacgttaggggtgttatgggcgggtaaattatgggctgtctcaacagatggcgttcgtgcggtgagcaataaaccaataaaagcatggagagtacaataa

SEQ ID NO: 313027 - DNA, 645 bp, Proteus mirabilis
atgggcttttatctggggcagcctgatcagaaagggggattaattagtaaaggagaaatgaaattaagtggcaataaattagtgagtaataaaggacgtattgtaacagaaaatggggatatggagcttaaattcacctctgttgataataccagtggtactattgcatcacataaaaatgcctctgtagtgacaagcacctttaccaattcacagggcacattgtttggccaggataaattaacactgcaaaccgatacactgaaaaataacagtacaggttcggttgaaagtaataccttaaaaggtgttattgcgtcgagtggtgatactgaagtgacggttaaccgtgattttgaaaacaatggcgtcatttctggtgtagaacatttacgtgtaaatataaatggtaaatataccaatgccagcaatagtattatgtcaggtaaaaatagtttcgaattaggtgtgacaggaaatattattaatcgcggcattcttaattcaataaaagacacgactatttctggtgagaatattactaatgaaaaatcaggtattattgttggtagagaaagtattactatcgataataaaggcacttttactaataaaggtaaagttgtcgggccgttaaataaataa

SEQ ID NO: 313028 - DNA, 1857 bp, Proteus mirabilis
  misc_feature (1829)..(1838): n is a, c, g, or t
atgaataggaaaaaaattgtttcttttaaaattaatttattagttttctctgtattatcaacgttaaatatggcgacagtagtacaggctgatccgtctgctcatattgttgtgcaacaacagcaaaaaaatagtagtgttgatattcttaatattgccgcagcgattaatggctattccagtaattcattaaccagttttgatgtttctgaagcaggattaatattaaataatagtcctgatggtgctgatactcaattatcggggcatattgacggtaatagtaatttatctagcggtgcggcaaaagagattactcttgaggttaatgctaaaaaagccattacgttaaatggccctgttgaggtggccggaacaaaagcacgggttattttatctaatcctgctggaattatttgtagtagctgtaactttcttagtgctgaccgtgttgtgttgactactgggaaagtgaatatacaaaatgataccgttgatagttataaagtggaaaaagggaatattactgttaaaggtaatgccacttttgataaaagtgcgcaacagattgatttaattgcccgcaatgtttctattgaaacgcctcttgatgcatctggtattaatgtgaatgtgataactggcgctaatgaagttaaagcacaagataatacggtggttgcacaaaagccaacaggcgttgctagtaaatatagtttgcagatagtcaagaatgcaggagtgagaagctcatcgctaaaatttataggtactgaagctaactcaccactgaaaaataatggtaatgttgaaactgctgggggagggatcgagcttattcatagcggtgcacttgataataataaaggtaacttcttatctgagggggatatctattttgctttcgataaaggtgttacaaatagtactggtgaaatacaaagtactaaaactatctcaatagaaacaaaagaagcgaaagttgataatatctctggtggtaatatttctgctgatggaaatgtaactatcaatagtggtgaatttaaaaacaatgcctcctatattgcaagtaaagataaattagatattcagacaaacggtaaaccaataacgaatactgcaacggtcggtgaaggcgtcggtatttctgctactaatggtattaagattaatagtagcttatttaataataaagagggtcaaatcaattctaaaagtgtcattgatattaatactaacctaaaagacttcaataatattgatgcttatattgatgcgtcaggggatattagtattaatagtggcgcaatgaataatacccatagccgcctacgttcagttactcgtgttgaaattgatactaatggtaaggcgctgaaaaataccggtatgacggcagatactgctagcgatgattcattaggtattcttagtggtctggatggtatgacagttaatattgctggactgaataatgaccaagggattattgccaccgatggcgatatgaacttcactaataaaggcgacattaccaataaatggggacatataaaatcaggggggtacttgacatttagtagtgataagatcaaaaacctctatggtggcttagcatctaaaaccggtgctaatgtgactttctcccagacattagataataactttggtgttttttacttagaaggcgatagtgtcaccatcagtgcgccttatataaataataataaaggtgttattaaaggagacgctatttattttaaaacagataaatttaataacacatcaggatttgtgatcactgaacagaaattagagattgatannnnnnnnnnattgatacaccagaactga

SEQ ID NO: 313029 - DNA, 1353 bp, Proteus mirabilis
atgtttggattagatgcttttcacctagcaagaatacaattcgcgtttaccgtttcatttcatattatattccctgctatcaccataggattagctagctttctagccctattagaaggcttatggttaaaaacaaaagaaccaagttacctttctttatatcagttttggataaaaatttttgccgtaaactttggtatgggggtggtatcagggttagtgatggcatatcaattcgggactaactggagtggtttttcacaatttgccggtagtatcacagggccgatgctaacttatgaagtcttgaccgcctttttcttagaagcgggatttcttggcattatgttgtttggttggaataaagtggggcgaaaacttcacttctttgcaacttgtatggtagcgcttggcacattgatttctactttttggatcttgtcatccaatagttggatgcaaacaccacaaggctatgctattgaaaatggtgttgtcgtgcctgttgattggctacaggtcgtgtttaatccttccttcccttaccgtttattgcatatgtctattggggcttttttagccagtgctttatttatcgcctcttgtgccgcgtggttattattaaaaggacaaaatacagcacctgtacgaaaaatgttttctatggccttatggttagtactaattactgcccccatacaagcgtttgtaggtgatgctcatggattaaatacactagaacatcaaccggctaaaatcgcagctatagaagggcattgggataatgcaacgaaagaagcgactccgctgattttatttggcatcccagatatggcagaagaaaaaacaaaatatgcgattgaaattccttatttaggtagcctgatccttacccatagtttagataagcaaattccggcattaaaaagttttgcgccggaagatagacctaattctagcattatattttggtcatttagagtcatggcaggtttaggtatgctgatgatttgcttaggtttgttgagcgttattttacgtaagaagaaaagactctatcactcaccccttttcttacgctttgctttattaatggggcctacaggactgattgcgatccttgcggggtggtttaccacagaaattggccgtcagccttgggttgtttatggtctacaacgtaccaaagatgccgtttctgctcatggtgatattcaaatgagtttgagcttattggcctttattttggtttatttttcagtatttggcatcgggtatttttatatggtgcatctgatgaagaaaggccctgtagtgcttaaatccgaccaattaacacagggtgaaaaataa

SEQ ID NO: 313030 - DNA, 291 bp, Proteus mirabilis
  misc_feature (279)..(288): n is a, c, g, or t
atgactaatgcgtatattgaaaaaggctatattacttcacaagcttttattgccgatcaagatctctcaaatcatcaattaaccattaacgtaattgaaggaaagataaaatcaatctttattgataatatgacttcccccatggttgatattctatttccttcatatcaagataaacgacttaatttacgtgagttagagcatgggcttgaacaacttaatcgattaacaacatcacaatatagattagatattcaacctagtgacaggataggatannnnnnnnnntaa

SEQ ID NO: 313031 - DNA, 258 bp, Proteus mirabilis
  misc_feature (245)..(254): n is a, c, g, or t
atggaacttgttacgtataaaacgctacctgaatggcacttaacagcgatccctttagcattattagagcgtcataacacaaaagaaggcacttatgcgcaaatgcggatattacaagggagtatgacatttgtgctatttaaggatgatggagaacaagtgttcttagagtgtgatagcgaaaatcagcctccgcttattcaacctcagcaatggcataaaatcgataaagcgagtgatgatgnnnnnnnnnngtga

SEQ ID NO: 313032 - DNA, 171 bp, Proteus mirabilis; identical to SEQ ID NO: 301943

SEQ ID NO: 313033 - DNA, 180 bp, Proteus mirabilis
atgcgattacaagatgttaagttattgcaagagttaggagaatatcatgaaggagataacgaattaaatgatatcgcggtaagaaaacaagccaagatagaaagctttcttactcaatcctttaaagaaaaagccgattttcaacaaacattagaacaaatgtatgagattaccgcctaa

SEQ ID NO: 313034 - DNA, 204 bp, Proteus mirabilis
atgtctgatcaaatttatgatttgaaggagttaagaaccccagaacaacgcattattgcgatcaataaaaatcctgaaatcatagataaaatacttttcaatgagcatgagtggctagtttttaaagatttaaatacacctgaagggtatttttctaaaaggaataaatacggtgatgttgagcattacccaatagagaactaa

SEQ ID NO: 313035 - DNA, 222 bp, Proteus mirabilis
atgttaacagtcagaaataaaaatctacgaaaaataaaacaaactttcttggaaatatttacccccaacgctcatctatcactagaagaaaaagaagtcatttacactcgtttaaaggggcaattacatgcggcaggacaaataaataagcgattcaaacaaaaagccaaacatataaataaaaatcaaaaaaaatacctaaaacaaaatcaaacactataa

SEQ ID NO: 313036 - DNA, 453 bp, Proteus mirabilis
  misc_feature (400)..(409): n is a, c, g, or t
atgagaacccgtttccctgaattagacgtaagttgtgtgatgggatttggtgctgatgcatggtctaaactattccctaatcaagctaaaccgcgagaattaaatacctttaagcaaatcaacggcgatgtgtataccgcagtatcgacacctggcgatctgttttttcacatacgggcattaaaggtatctgcttgttatgaattagcctcaattattagccaaaaattaaactctattgccacctcagaagatgaagtacatggtttccgctattttgatggtcgctcaattattggctttgtggatggaacagaaaatcctgagtttgaagatgagcgtgtcgcttatgcggttattggtgatgaagatccactgtttaccggtggaagttatgcgnnnnnnnnnntgggaaaaccaatctctcatcgagcaagaaaaagtgatcggtag

SEQ ID NO: 313037 - DNA, 387 bp, Proteus mirabilis
atgacatcccttaagtgtaacgtcaatcctgaaggcatattcaccactaacgacgaatcagaaggcgctacagttactcgagtaggacagggtgaatatcttatcgaaggtgtgctcggctttaactcagatgcaggttggagaggtattgatggtggtattgaaatttcacttgatgttaataaacagccgttgatatgggtagactctgaagttatgggggacggttctattctcgtgagaacgtatcatcgaactcatcctaacgcacctgagtttgccaataataaaattgacggtttcaacaatgatgatccaatgatattcctgatggtcgttttatttccgttcgcgtacagatgcctgagcaatcaatctataacgtga

SEQ ID NO: 313038 - DNA, 378 bp, Proteus mirabilis
atgagtactcctgcaaatttcaatggtcaacgtccagttattaatccagatgatgctgttatgttattgatcgatcaccaaagtggtttattccaaaccgttggcgatatgccaatgacggaattacgtgctcgtgctgcggtattagcaaaaatggcaacattagcgaagatgcctgttattacaacggcttctgtccctcaaggtcctaatggcccattaattccagaaattcatcaaaatgcaccacatgctaaatatgttgcccgtaaaggtgaaattaacgcatgggataaccctgagtttgttgaagctgtgaaagcaacgggtaaaaagcaattaattattgctggtactattacgagtgtttgcatgtga

SEQ ID NO: 313039 - DNA, 225 bp, Proteus mirabilis
atggcagaagaaattaccttagcacgtattgttcaagccggtgttgtgcctatggatacggcagcagtggcttctgaaatgcaaaaaacttggaaccgtgcagatgccgctgaatgggctcaagcttatacccaaatattccctgcttatcagttattaattgaaagttatagtaaagctcaagatgttataaagaataatgaaactttagattcacaacgttaa

SEQ ID NO: 313040 - DNA, 381 bp, Proteus mirabilis
atgccatatcgtaaaaatactattggactaaacataaattcgttacccgagtttagtaatactaaaactcaaagtaaaatcatcgtacctactttaggtgcggtagcaaaaatcaatttccctataaatgtcggctataatgttttatttacctcaaatacaccaattccttttgctgccaatgtaatggtatttgatgataataacaatctcatttctattgattctgtctatgaccacaatagaatattcctctccggaataaaagaaaccggaacggtacaagtaaaatggggagatacagaggagcaacaatgtttcttcaattataacgtaaaaaatgaaagtaaaaataattcaattattaagaaacaattttaa

SEQ ID NO: 313041 - DNA, 285 bp, Proteus mirabilis
atggggaaaatatcatgggaagaaatggcctatgccgataatggctctcctgatatcttttggaaatcgcttaattttcaagaacgattagaacaaggatataaacccaatactattaattgggatgaatatacttttgttacttataacgacaatcgagtctttcgctatgaggttggttttagccgattatcccctattgaattaatcaactctgaaggaagaaattatttttataacccttacctttctattattgatggaaaagtgactattgtccgataa

SEQ ID NO: 313042 - DNA, 864 bp, Proteus mirabilis
atggctcgctcaataaatagaacaatcttagtaaataatatcggtatcactatttcatcagtgaatgaacaggattacataagtcttactgatatggtatcaggctttgacggcggttctacgcttatcgaagcttggttaagaaataaggatactgttgaatttttgggagtatgggaacgtatcaacaatgataattttaattcccccgaattcgagggaattaaaaatcaagctggtgctaatcgcttttctctttctgctaaaaagtggattgatgcgaccaatgctattgggcttatcgctaaagcagggcgttatgggggaacatacgcgcataaagatatagcctttgaatttggttcatggcttagccctgaattcaaattgtacttgattaaagaatttcaacgcctaaaggagcatgaagctagtcaaggtgctatcgagtggcaaatcaaaagagaattagcaaaaataaactatcgattacaaacagatgctgttcaagctaatttactagaaaataaacctaaatcacaacatggatttatatacgctagtgaggctgatttaatcaatacagtagtctttggaaaaactaatcaggattggaaaaaacaaaaccaaggtatcaaaggaaatcagagggatcatggttcggcattagataacgcaatcatagcaaacttagaatttcaaaattcattaatgatagagaaaggcgcaagtcaagcagaaagagttacggtattaaaaaatttagaaagaacgcttcgagctagtatgggaaattcaccagctatgcaacgcttggaacagcagtcaaattctccattattaaacgataaagaagataaataa

SEQ ID NO: 313043 - DNA, 516 bp, Proteus mirabilis
  misc_feature (503)..(512): n is a, c, g, or t
atgaccatgaatgaggcagatgcccgcccaacgaactttattcgtcaaattattgacgaagatctggctaccgggaaacataatagtgtccatacccgtttccctcctgaacctaatggctatcttcatattggccatgcaaaatcaatttgcttaaattttggtattgcacaagattatcaaggtaaatgtaatttacgttttgatgatacgaatccagtaaaagaagatgttgaatatatcaactcgattcaaaaagacgttcagtggttaggtttccaatgggatggtaacgttcattactcctctgactattttgatcaactgtatcaatatgcgattgagctgattaacaaaggcttggcttatgttgatgagttgagtgctgaagaaattcgtgaatatcgtggcacactcaaagagccaggaaaaaatagcccttatcgctctcgtagtgtagaagaaaacttagcgctatttgaaaaaatgcgtgcgggtggctnnnnnnnnnnttga

SEQ ID NO: 313044 - DNA, 309 bp, Proteus mirabilis
atggctgcccgaccacgaacccataaaattattatccctaatctatatcgaaagctagataagcgtaatggcaaaatttattggcaatataaacatcccatcaccggtaaatttcatagcttaggcaccgacgaacaagaagcgagagaaaccgccattcaggccaatacaattattgctgaacaacatactcgacagttattaagtattaatgaacggttatcaaaaattaagacaaacaagtctgaaatatctgtcgatatatggatggataaatatttagatattcaaaactttagatattgctga

SEQ ID NO: 313045 - DNA, 312 bp, Proteus mirabilis
  misc_feature (232)..(241): n is a, c, g, or t
atgctgttacttattgataattacgactcgtttacctacaacctttaccagtatttttgtgaactgggggcggaggttgttgttaaacgtaatgatgagattgggcttaaagagatagaaaagatgatgccatcacatcttgttatctctccgggaccttgcacgccagatgaagcagggatctctcttgaggcgatacagcgatttgccggggaaatacctattttaggtnnnnnnnnnnattttaggtgtttgccttggtcatcaggcgattgggcaagcttttggtgcatccgttatcagagcccgtga

SEQ ID NO: 313046 - DNA, 267 bp, Proteus mirabilis
atgaagactattaatgaaattgctaatttaatagcggaacaacgtaaaaaattaggtattgagcaaaaagatatgtatctacgtatcggtatgaaacagcaacaataccaacgtatagaatcaggaagtgatttagagttatcaattaaggctaaaaattctaatataaaccctatgattgcaagtactgtgatagcgaataaaagcgaaattgatttgaaagatgatggggatgatctcgacttttggtttaaaacagaggaataa

SEQ ID NO: 313047 - DNA, 315 bp, Proteus mirabilis
ttgccaaatgaaaaacatggtatcaacattcattatcagtatggcgatttaactgcttttggtcgtgccatttactataaaaaacagaaagaaagtggtggtttattgcgtggtggtgatttaattttcccttcttataccctcgttgatgccgggatcggaaaaaaattcccgttggataaacttactgtttctgttgatgtagtgattaataatctaactaatgtcgaagcaagacccgctagctctcaattaaaatatttagcacctctaccaggtagaaattatggattaaacgttaaagttgatttttaa

SEQ ID NO: 313048 - DNA, 2001 bp, Proteus mirabilis
  misc_feature (1922)..(1931): n is a, c, g, or t
atgaagagaagaacaaagagaaagcagatatccttactgttagagaaactagatgaaataaaagctaatactattggtaataccgtttccaaaatagctggggtacaaaccgaaggttttggccctaatgcggcaagacctataatccgtagcttatcaggtaatcgcgtagggattttagttaataatttaccgattaacgacgtttcatttattagcggaaatatgcctatccccatagatataaataaaattaatgaaatagcaattagcaaaagctctgaagcacttctttatggtggtggtagtagtggtggcgctattcatctatgggatgatcgcattatgacccaattacctgaaaagaccatttcaggtgccgtcacctttaatggtagtaccaataatggtaatggtggatctgcaacaattaaatttagtgaccaacaaaactgggtatttcatctttctggcgcgaccaaaagagttactcactataaaatacccacacgttcaaaagccggtgcttgctatagttatcagcaactcaaagatcactttaaattacgtgatcaatgccaagtggagatgaaagtttctaaccgtcttaatcctgcattttacccttatatcagcgaattttggaaaaaaaataagattgcatacgaacttgatgaagatgataaatacacttttaaagataaagattatatctcaggtcttggctatgttaataatgagcctaacgtactctataaatcaggtagctctaattttattgaacatgttagccccccaaaacattatgttgaaaataataataacgagatccctaatagctttttaaaaagtcaaagcggtaccgcatcactcacttatattaacgatgaaggatatttaggtctatctattactgattttcaaacttcttatggcgtgccgggatatgcctatcttaccacaaaaactagccgaaaaatgtataaacctgtttcggtttcaaaccataatcaacggatagatatacaaggaaaacattatcacttagcgccttttttaagagatagtgccttttattactcttattctgaatctaaagatgaagagttagtcggtcaaatagcttcatcgatatttgatactcaaagccatcagttggctttagaaactgcacattcccccctatttgatagacttactggtgcgattggggtgaatgctaatcatcgtgacctaaaaacctctggttatgatgcctatttacctagcgtattaactaaagaatatggattctattggatagaatcattagatttatcgccttttgaaatcaccgcaggataccgtcgtggctatacaagtcatcatctaaatattcctagtcattataatagcggaagaggaaaaggtgccaatccacaaaatagctcttttaatacaagtgccaacaccttagcgctctcttttacacctattgatgaatggacgttaaaattacagaaaaatatagcttatcgtgcaccggaaataaatgagctctatacccatggcccccattttgcttatttaattgaagagcaaggcgatggtaaatttaatacagaaaaaagtaacagtattgaattatcatcggtgattgaagtcggtaatttctctaataaaataagtgtgtataagacagattatcgtgattttaaattccgacgtcttacaggcgtaagtcgtggaggggtaaccgtcatggagtgggatgaaaccgatctcgaaacaaaaggattagaatatgaatttaaatatttatatgaaatgccacgcgatcatcatctcacctttacattatttggagattttgttgaaaataaaagtaaaagaaaactttttattgcaggtaattatttacctaatttgccaaatgaaaacannnnnnnnnnggtaattatttacctaatttgccaaatgaaaaacatggtatcaacattcattatcagtatggcgatttaa

SEQ ID NO: 313049 - DNA, 132 bp, Proteus mirabilis
atgaaaaaaattaaactctctattatgttacttatgcttttttcatttcctttatatatttgtgcaaaagaaattgatgaagagaagaacaaagagaaagcagatatccttactgttagagaaactagatga

SEQ ID NO: 313050 - DNA, 348 bp, Proteus mirabilis; identical to SEQ ID NO: 312939

SEQ ID NO: 313051 - DNA, 516 bp, Proteus mirabilis
atggcgttaccacgcaagctaaagaattttaatttatttatgaatggcgccaattatgtgggcgttgccgaagaactcacattacccaaaatcacccgcaagttagaagcctatcgcgggggcggtatgaatggctcggtgcaaattgatatgggccttgatgacggtgcgcttgatagtgagtttactcttggtggcgctgatattgacgtttaccgccaatggggcgcatccactattgatgcggttcaattgcgtttatgtggcgcctatcagcgtgatgatacgggggaaacattagccgttgaagtggttctccgtggtcgttatagcgaaatcgatccgggtaactggaaatcgggcgataacacacaaaccaaaatcaccgtaaaacccacttactacaagttagtgatggacggtcaagaaatcattgagattgatatcgtcaatatggtggaaaaagtggacggtaaagacctgttacaagcacagcgtgacgcgctggggctttaa

SEQ ID NO: 313052 - DNA, 738 bp, Proteus mirabilis
gtgatttgtcaaaagctccgcgcctttggttatgtgtctgcttacgactgtaaaaatatcagcgaagcaatcaagtaccgtgacaactttggtcagcgtgaattaatggtcatttttcctgattttacctcatgggatagcaccaccaacagcgaatcaaccgcttacgccacggcgcgtgcgttaggtctgcgtgccaagttagacaatgatatcggttggcataaaaccctatcaaatatcaccgttaacggtgtcacgggcatttctaaagatatctattgggatttacaagatcccgcgactgatgccggtttactgaatgaaaaaggggtgacgacacttatccgccgtgatggttttcgtttttggggttcgcgtacctgttcggatgatccactattttcctttgaatcttataccagaactgcgcaagtcctcgctgacaccatggcggaagggcagatgtgggcaattgataaaccgttaacgccatctttagcgcgggatatcgttgaaaccatcaatgcaaaattacgttcactggtcagtcagggctacttgttaggcggtgaatgttggtatgacccgacatcaaatagcaaagaagcacttaaagacggcaagctcacactggattatgactacacacccgtgccaccaatggaaaatctgatgttacgtcagcgtattaccgataaatacctgatggatttcggtaacaaaatcaaggggtaa

SEQ ID NO: 313053 - DNA, 927 bp, Proteus mirabilis; identical to SEQ ID NO: 303920

SEQ ID NO: 313054 - DNA, 534 bp, Proteus mirabilis; identical to SEQ ID NO: 297706

SEQ ID NO: 313055 - DNA, 162 bp, Proteus mirabilis; identical to SEQ ID NO: 303541

SEQ ID NO: 313056 - DNA, 1143 bp, Proteus mirabilis; identical to SEQ ID NO: 307291

SEQ ID NO: 313057 - DNA, 1098 bp, Proteus mirabilis
atgttgccagaaatgatcaccggtaaaagtagcatgccggcttttgtgttaattgctggtgatgaagatatcagtgccaaaattcaagggcgattaatttcgctttcattaactgacaatcggggctttgaagctgaccggcttgatattgagttagatgattctgacggcgcattaatgatgcctaaacgaggtgaggtattgaccttgcatcttggttggcagggtgaaaaccttattcataaaggctcatttacagttgatgagatagagcattcaggtgtacccgataaaatgacattgcgcgctcgtagtgccgattttagggcaacactgaatgtgcgccgtgaaatgtcttaccaccaaaaaacattaggcgatatcgtcagaaccattgcagggcgtaataatgtcacggcggtggttgatcctggtcttgatacggtaaagattgaacatatcgatcagactaatgagtcagacggtagttttttaacgcgcttaggacaattaaacggtgccaccgcttgtgttaaaaacggcaatttgttgtttatggtacaagggggcaatactaccgccagtggtcaagcattaccgctagtacaaatcacccgaagtgcgggagatggacaccgtttctcattagtggatagaggggcttacacgggagttgttgctcattttttgaatactcggaagcctcaagaaaagtctcaagcgcaaataagaaggcgaagacgaggtaacaataagccgaaaaaagaacaagaaaaacaaggcgattatttagtaggtgaagaaggtaatgtgatggtgttgtctcatacttatgcgagtaaaaccaatgctgaacgtgccgcgaaagccgcgtgggaaaaaatacagcgaggtgttgcctcttttagtattacccttgcgaaagggcgtgcggatctctttcctgaattacccgtaaaggttagcggatttaagcctgagattgatgaggcctattggacgttggtcacggtgagtcattcattgaacaatagcggatttaccacctcgttagaattagaagttaaaagcagtgagatagatatggataaggaatag

SEQ ID NO: 313058 - DNA, 789 bp, Proteus mirabilis
  misc_feature (749)..(758): n is a, c, g, or t
gtggagcctggtgattatgatgttgacatctacattaataatcgttttattgaaagaaaaaccgtgagttttcaattaaatgataagggtaaagtcacaccttgttttactcaaaaacagattgaggaaatggggctcttgctagatatcgagccaaatcaagataataatcaatgtttaatattgagccaatttaataaaaacatcgtagactcgtatgatgcttctaactttagaataacgattacagtgcctcaaattttattaaaacgaaaaccacaaggttatgtcaatgaagacgatttagatgcgggtaacaccatgttattcagcaattactctggtaattactataagaataaatcgaacggacaaacttcagactatggttttggtagtattaatatgggcgtaaatctaggaacttggcaatttcgacaacaagcatcttactcttataattcatcaaaatcgggaagtaacagtgaatttaattggataagaacttatctacaaaaaccattactgacattaaagtcaatgttagttgtcggtgatatttatacagcaggatcacaattttctagtctggcatttaaaggtattcaattaatgtctgatgaaagaatgttgccggattctcaaaaaggttatgcgcctgttattcgcggtattgcaacaacgactgctcgagtagtgataaaacaaaatggtactgaaatttatcaaacgacggtatcaccagggcnnnnnnnnnngtgccatttaccgcattacctgaatcagtga

SEQ ID NO: 313059 - DNA, 1083 bp, Proteus mirabilis
gtggtttgcaccgctgatgatgcggacgaaaaaacctttcctttaaacaaacccgtcttactcatcgatgtgtcacaggctattggtaaagcagggaaaaccggtactttagccagcacgttaaaggcgattgcagatcaggctaaacctatcactattgtagtacgtgttgcacaaggtgaagaagaggcagaaaccaccactaatattatcggtggtactaccgaagaagggctaaaaacagggttacaagcactgttagcatcacaagcccaacacggcattaaacctcgtattattggtgtgcccggtcatgacacgttagcggttgccaatgagattgcggtgatttgtcaaaagctccgcgcctttggttatgtgtctgcttacgactgtaaaaatatcagcgaagcaatcaagtaccgtgacaactttggtcagcgtgaattaatggtcatttttcctgattttacctcatgggatagcaccaccaacagcgaatcaaccgcttacgccacggcgcgtgcgttaggtctgcgtgccaagttagacaatgatatcggttggcataaaaccctatcaaatatcaccgttaacggtgtcacgggcatttctaaagatatctattgggatttacaagatcccgcgactgatgccggtttactgaatgaaaaaggggtgacgacacttatccgccgtgatggttttcgtttttggggttcgcgtacctgttcggatgatccactatttgcctttgaatcttataccagaactgcgcaagtcctcgctgacaccatggcggaagggcagatgtgggcaattgataaaccgttaacgccatctttagcgcgggatatcgttgaaaccatcaatgcaaaattacgttcactggtcagtcagggctacttgttaggcggtgaatgttggtatgacccgacatcaaatagcaaagaagcacttaaagacggcaagctcacactggattatgactacacaccagtgccaccaatggaaaatctgatgttacgtcagcgtattaccgataaatacctgatggatttcggtaacaaaatcaaggggtaa

SEQ ID NO: 313060 - DNA, 462 bp, Proteus mirabilis; identical to SEQ ID NO: 297224

SEQ ID NO: 313061 - DNA, 159 bp, Proteus mirabilis; identical to SEQ ID NO: 297225

SEQ ID NO: 313062 - DNA, 390 bp, Proteus mirabilis
atgtctaaatcggcaaaaggtgcgacagaacggcctggacggaacgtaaaagctaaatctggtttaaaccgctcaatactggagcagggctggtatgaaatgcgccgtcagcttgagtacaagcagctctggcgaggaggtcaggtagtggcaataccaccagcctacaccagtcagaagtgcgcttgctgtggtcatacagcaaaggaaaaccgccagtcacaaagtcaattcgagtgccttgaatgtggatatacagcgaatgctgatatcaacggggcacgtaacattttagcggcaggacatgccgtgcttgcctgtggagggagggtgcagtcagaccgcccgtcgaagcaggaacccgccgaggtgattcagacatcagtctga

SEQ ID NO: 313063 - DNA, 357 bp, Proteus mirabilis
atgggcattgataccaccggcttaggacatggggtttatcagaatgtcatccagttttttcctgctgcgcgtgagtttatttataacccgaatgtcaaaaatgccttagtgattaaagcctatgacgtgattagtcacggacgtttagagttcgatgcacagtgcgttgatatcattcaatcttttacttccattcgccgtacgaccaccggaagtggtaaccgacctacttatgaagcctcacgcagtgaagaaagcggacatgctgaccttgcatgggcaacgatgcacgcccttttcaacgaaccattaaccggcaccaccgagaacagtaataacattgtggagatttattga

SEQ ID NO: 313064 - DNA, 357 bp, Proteus mirabilis
atgggtattgataccaccggcttagggcatggggtttatcaaaatgtcatccagttctttcctgctgcgagggagtttatttataacccgaatgtcaaaaatgctttagtgattaaagcctatgacgtgattagtcacgggcgcttagagttcgatgcgcagtgcgttgatatcattcaatcctttacatccattcgtcgtaccaccaccggaagcggtaaccgcccaacctatgaggcctcgcgcagtgaagaaagcggacacgctgaccttgcatgggcaacgatgcatgcccttttcaacgaaccattaaccggcaccaccgagaacagtaataatattgtggagatttattaa

SEQ ID NO: 313065 - DNA, 231 bp, Proteus mirabilis; identical to SEQ ID NO: 312941

SEQ ID NO: 313066 - DNA, 231 bp, Proteus mirabilis
ttgcacccgcacagtttgcccgttgaaaactatcgcccggcaccggctaacgtgaacattcaacaacagcgttatcaaggcgcgccggcacattatgaaattaatattcatcctcaaccgaatcaatccgcgcaagatatcgcacaacttgttatcgcggaaatcgaacgccgtgagcgtgaaaaacaagcacgattaaatagccgttatcaagacagtgaggtgtggtaa

SEQ ID NO: 313067 - DNA, 141 bp, Proteus mirabilis
atggcgggtattccgaaagaaagacatgatttaaaatttgaagattttaaaacatcggaaatattcgacattattaaagctattaatcatatcaaagccgttacggcattattacctaaacaattagcattaccgcaataa

SEQ ID NO: 313068 - DNA, 474 bp, Proteus mirabilis
atgacccaatctaccactccagcgccaagcgcttctgtcgctgtttctaaagaaaatactgtgaatcaaaaaacaaaaatcaatctgttagatttaaatcgtaaacagatgcgtgagctttttgtctctatgggcgaaaagcctttccgcgctgatcaaatcatgaaatggatataccattattgctatgatgattttgatcagatgacagatatcaataaagtgctgcgtgcgaagttaaaagagattgccgaaatcaaggcacctgaagtgtctgaagaacaacgctctgcggatggcactattaagtgggcgattaaagtaggctctcaacaagttgaaacagtctatattcctgaagatgatcgtgcgacgttatgtgtttcgtcacaagtgggttgcgcgttagagtgtaaattctgttcaacggcacaacaaggttttaaccgtaaccttaaattattggtgctttaa

SEQ ID NO: 313069 - DNA, 2175 bp, Proteus mirabilis
  misc_feature (2158)..(2167): n is a, c, g, or t
atgtccaaagatccttttcaggatagagaagccgaaaaatacgcctctccaattgctagtcgtgaatttattttagaagaaatgaagaaacgtccggccccgatgagccgtgaagatatcgcgcaggcattgaaaatttcaggtgaagaaaatctggaagcattacgtcgtcgtttacgggctatggaacgagatggtcagttagtttttactcgacgtcagtgttatgccttacctgaacgcctcgatctttggaaaggtaaagttatcggtcaccgtgacggctatggttttttacgtgcggaaggccaaaaggatgatctctatctttcacaagatgaaatgaaaaaaaccatgcatggtgatgtgattttagcgcaacccctaggcatggatagaaaagggcgtcgagaaggtcgcgtcgttcgtgttcttgaacccagaaacagccaaattgttgggcgctattttattgagtcaggtatgggatttgtggtacctgacgatagccgtttaagttttgatattcttatccctaaagaagatatcatgggcgcacgtatggggaatgtggtggtggttgaagttaccacaagaccaacacggcgtactcaagcggtaggacgcattgttgaaattttaggtgaaactatggggacgggaattgcggtagaaattgcactacgcacccatgaaattcctcatacttggccacctaaagtagaaaaagaaatcgctgatttaaaagaagatgtgccagagtcagcgaaacaaggccgcgttgatttgcgtgatctccctttaattaccattgatggtgaagatgcgcgagactttgatgatgccgtttattgccagcgtaaaaaaggcgggggctggcgtttatgggtagcaattgcagatgtgagctattatgtacgccctcaaactgcattagacacagaagcgcgtagccgaggcaattcggtctatttcccatctcaagttgtccctatgctgccagaagtactgtcgaatggattatgttcattaaatccacaagtcgaccgtttatgtatggtttgtgaaatgaccgtttctgagcaggggcgcctttcatcttataaattctatgaagccgtaatgagctctcacgcgcgaatgacttacaccaaagtatggaaaatcattcaaggtgatgaagagttacgtgagcactaccaaccgatcgtaaaagatattgagcacctttatgagctataccaagccctcgataaggcgcgtgaacagcgtggtgccattggttttgaatcggaagaagcgaaatttattttcaatgcagaacgtcgtatcgatcgtatcgaaccggttgtacgtaatgatgcacataaattaattgaagagtgcatgattttagccaatattgcggcggcgcgttttgttgagaaaaatgaagagcctgcgttatatcgtgtgcatgataaacccaaagaagagagcgtaatgaatttacgttcggtatttaatgaactgggtttaacattaccgggaggattaacaccggagccaggcgattatgcgcgggtcatgaaagaagtcgaagagcgtccagatcacgaaatgctacaaaccatggtattgcgctccatgaaacaggcaatttacgatcctgaaaatcgaggtcactttggtttagcattaaaatcttatgctcacttcacttcccccatccgtcgttatcctgacttagcattacatcgtgctattaaataccagatagcgaaacagcaaggccatggctcacaacgctggaccccaacggggggctatcatagtgatatggataccatgcttcaattaggggagcactgctctttaactgaacgtcgggcggatgaagcaacccgtgatgtggctgattggctgaaatgtgattttatgcttgatcaaataggtcagcaatttaccggtattattaccagtgtcactggtttcggtttctttgtgcgcttaaacgatctatttattgatggtcttgttcatgtatccacattaaataatgattactatcaatttgataatgttggacagcgtttaattggtgagtcatccggtcaggtatatcgtctgggtgatgaagttgaagtgaaagttgaagcggtcagtatggatgaacgtnnnnnnnnnnactattga

SEQ ID NO: 313070 - DNA, 351 bp, Proteus mirabilis
  misc_feature (9)..(18): n is a, c, g, or t
atgaacgtnnnnnnnnnnactattgacttctcattgatttcaacaacacgtaaagcacgtaaccccgggaaaacagcacgtgttcgtgcgttaaaagggggaaaagacaagaaaaatgcgagcagtagtaagtctcgtcgtcgtgatgccagcaaagacaaaaactttgaacctgatagtgcctttaggaaaggtaaatcaagtaaagaaaaacagagtaaagataaagtcattaaagagaaaattgcgaaggacaaggcgagtactaaacgcaaaaaagcctctgcacaaaccaaaaagatagaggcgaaattaaaagccaaacgtgcggcgaaacgcactaaagcgtag

SEQ ID NO: 313071 - DNA, 384 bp, Proteus mirabilis
gtgggattaagtacccctattgaattgggtgaagttaaccgagtgacaacagcgggatttcatgctgccggtaaaggtatcaatgtagccaaagtattaaaaagccttggtattgatgtcactgttggcggttttttaggtaaagagaatcaagatggctttcaaaaagagtttagtgaagccgggattgctaatcgcttccaaatggttgaaggtcgcacacgtatcaatgtcaaactaactgaacccagcggtaaagtaactgattttaacttttcagggtttgaaatcactaaacaagattggactcgttttgtaaatgacacactcagctgggcgggtcaatttgatatgtgtcagtggaagtgtaccaccaagtattga

SEQ ID NO: 313072 - DNA, 885 bp, Proteus mirabilis; identical to SEQ ID NO: 296990

SEQ ID NO: 313073 - DNA, 798 bp, Proteus mirabilis
  misc_feature (730)..(739): n is a, c, g, or t
atgaaatcacaaactcaagcgcccttagtggttgaaggaaaactatctgatagtgaacgtatgaaaaaagagagtaatttcttacgaggcactattagtgatgatctacaaaatggtctaaccggtggttttgagggcgataattttttattaattcgttttcacggtatgtaccaacaagatgatagagatattcgtgccgagcgtgcccaacagctactagagcctcgtcatgccatgatgttacgttgtcgtttaccgggcggtgtcatcacaccaaagcagtggctaagtatcgataagtttgctagtgaaaatacgctctatggcagtattcgtattactaatcgtcaaacttttcaatttcatggcattttaaaaggtcatgttaaaccggctcaccaaatgctagcgtcaacaggccttgatgctcttgcaaccgccaatgatgttaatcgaaatgtgctatgtacctcaaaccctgaacaatcttcattgcatcaagaagcttatgaatgggccaaaaaactatccgagcatttattgccacgcacccatgcctatgcagaaatttggttagataaagagaaagtggcgacaacggatgaggagcctattttaggtgaaacctatttacctcggaaatttaaaacatcggtggtgatccccccttataacgatgttgacttgcatgccaatgacatgaattttattgccatcgcagaaaatnnnnnnnnnncggttgcaagagcatcaaggcctgttgacgctagcatttggttggttttaatgtgctag

SEQ ID NO: 313074 - DNA, 1050 bp, Proteus mirabilis
gtgactaaacctctttatgagagctacctgcaagcaaaaaatgaaaaaaaagcatcttatgcgcgtgatttagcaacttaccttaatgtaagtgaagctgagcttactcacgcgcgtgttgggcacgatgctaaacgcttacatggtgatgttcgtgatattttaaccgctctcgcaaccgtaggcgaagtgaaagccattactcgtaatgaaattgcggttcatgaacatcttggtgaatataccaatgctcgttttaacgatcatgcaggattgatcttaaaccctcgagccctcgatttacgctttttcttctctcattgggcaagtatctttgcattaaccgaagagacggctcgtggcattcgtcatagtattcaattctttgatcttcatggtgattctctccataaagtgtataccactgataatactcatatggacgcatggaataccttaatcgatacttatttatcaccagaaaatcccgtattagagattacccccgctaaatcttttactgatgcaccggtaacaacggcattagcacaacagttagaacagcaatggcgctcgatgactgacgttcatcaattctttaaaatcctgcaagaaaataatctcagtcgccagcaagcgttcaaagcggtcagtgatgatttagcttatcaagtagataatagtgccttaaaaacattattagcactggcgaaagaagtacaaaatgaaattatgattttcgtgggaaatcgaggttgtgtacagatctttaccggtaaaattgatcgtttagtacctcatcaatttgaaaatagtgaacaagtatggattaacatttttaatcctgcatttacactgcatttaattgagagcgaaattgtggaaagctggatcactcgtaagccaacccaagatggttttgtcacaagtcttgaactatttgatagcaaaggtcaacaaattgctcagctttatggacaacgcactgagggaacaaaagaacaacaacaatggcgtgagcaactcaacgctcttgctaaaatagcttaa

SEQ ID NO: 313075 - DNA, 1593 bp, Proteus mirabilis
atgagaaaatacttatcgcaactttggattatgttgctattgatgctagtcagtatcaacagcttcgcaacagatccactttggcaagtattgccggatagcattgaaaaaagtgaaagtgatccacgtgattatcaggctattaaattagctaatgatatgaccgtattactggtttcagataaaaaagcggtcaaatcattaaccgccgttgctctgcctgtcggtgcattagaagatccagatagccaacaaggtcttgcccactatttagaacatatggtgttaatgggctcgaccaaatacccaaaatcaggggatctgacagagtttttaaataaaaatggtggctctcataatgccagcacaaccacttaccgcaccgcattttatttagaagttgaaaatagtgccattaatgaagcagtcgatcgcttggcagatgcattagcggagccattacttgatcctaaatatgctgatcgtgaacgtaatgcggttaatgcggaattaaccatggctcgctcccgcgatggaatgcgtttttggcaagtgagagctgaaaccttgaatccggctcatccaagctctcgttttatgggaggaaacttagaaacattaagtgataagccagagagtaaattacaagatgaattagtgaaattctatcaaacatactattctggtaacttaatgaatggggtgatttatagtaataaatcactggacgaactcgctaaattagcggctgatactttttcccgtattcctaataaaaacacccaagcaccagtaacgacggtgcctgcgatgacagaaaaagaaaaagggataatgatccacttagtcccagctcagccacaaaaaaccttacaaatcgaatttggtattgataataatcttgccgattttcgcagtaaatcagatgaatatattggctaccttattagcaatcgtagcacgggaacactagcaacttggttacaagagcaaggattagcagagaatattagtgcttcatctgaatcctatatcgatcgcaatcaaggttcatttaccatttatgtttctttaacagacaaaggccttgctgagaaagataaagttatttcagcgattttttcttatattcaactgatccaaaataaaggggtcagtgagcgctattttaaagaaatagccaatgtgcttgacctctcatttcgctatggctctattgtcagagatatgaactatattgaagatatctccgatatgatgctgcgttatccgattaaaaatattcttaatgcagattttattgccgatgattatcaaccttctgcgatcctttctcgcctaggatcgcttacaccagaaaatgcgcgtatttgggtgattagccctaatgagccttcaaataagcaagcctattttgttcatgcaccttatcaagtggataaaattactgcgaagcaattagcttcatggcaggaattagccagcgacatctcattgtcattaccgacactaaacccttatattcctgataatctgtcacttattgatgctgatagtaacatacagttaaacagcaagtcatacaaacattga

SEQ ID NO: 313076 - DNA, 174 bp, Proteus mirabilis
atgaacatcgtacatagactcaaacttgtttcattcctccaattttttatttggggctcttggcttgttacgtttgcttcatatctatttgataaattacattttaaaggtactgacgttagcatcactgatcgcaccggtgatcatgggatttattgcggacaagataaataa

SEQ ID NO: 313077 - DNA, 612 bp, Proteus mirabilis
  misc_feature (577)..(586): n is a, c, g, or t
atgaattttttttcattcgagtttctcggagcctttacgagcttttttattatctattggctcttccaaaaacaggttaagatccaaaatatcttactcatcatagtaagttatgcttttctattctatgtcgactaccgtcctgctgttatcttattaagctatacgcttttgatttactcattagccaatatactcacccgctatacatcaacgaaagtgatttattggttacttgggctgttagttgccctctattttactgcctttaaatattactcatttttccaagaatcattgacacaactattctcacagtggggattaagtgttgaattaccaattattgaactactggcaccattagggttatcgttttatatcttccactctgttagctatgtcgtttcagtgtgtcgcaaagagatccctaaagccccttttcttgatgtcgtgctctacttatgctttttcccaagcattgtggcgggaccgattaatcgtgccaaacaatttttaccacaaattcaagcaccaacccgtaaaattatcgactataaaggggctatcatgctgnnnnnnnnnnagcaatcgctaagctcttttggttaa

SEQ ID NO: 313078 - DNA, 1014 bp, Proteus mirabilis
atgacgagtaagtcgggaaatcaacctcacacagatgaggcgcctgcaacgcttttggcagatacccatgatcaattaagccagcaatctattgatgaacaagctgcgctttggttcacccgtcaacatagtcagcaaatgagttcacagcaacgacaagcctttaaacagtgggtagcagataaagataatcaacaagcttatcaagctatcgcggaaatttggcatagttgtgaagccttaccacgccctactattgtgcctatagaaaaaaggaaatcttcactctggcgcccctttattcacactacagccacactctgtttagttgctgtgttatatcttccttatagtcatttacctgccctgttaatggataatatgaccttagccaccagcaattttcctaaagagatgaccctcgcagatggctctaaagtttttttaaatagaaatacacaggtacgcgtctcgtatgtccaaacccaaagacgcctttggttagataaaggtgaggcttattttaaagtaaaacccaatccttatcggccattttatgtccatgctgatgagcgattaattaaagttgtcggtactgaatttgaagtgagtcgttatcaaaataatcaaattagtgtcgccgtacatgagggcattgttgaagttaaagccacagaaaaatcccctgcgacttacctatatgctggctctcaagcaattagccaatcaaccgataatcaatttgtcatttcctcagtcaatgctgattctgtaggaagctggcgttttgggcaactccatttctttgaacaaccacttggtgacgtgatcactaaattaaaaccttatctggatatcaacgttcatatctcatcagccgatgtagcaaaaataaaggtatcaggtgtagcaaatattaatgacgcgaaaagctttattactgcacttccgctacttttaccggttaatgttatttttactgataaaaataatgtgttaattatcaataagtaa

SEQ ID NO: 313079 - DNA, 696 bp, Proteus mirabilis
gtgattgtgttacttacgctgttaggcatgcaacctgtcgcagatactctattgatgccgagtgaaaaagcgtatcaagcacgttatgaattacgcgaaaactcaccacaagatgttaactacattgtcgttttagggggcggttttacttataatcctgaatgggctcctagtgctaacctgctaaataatagcttatttcgtgttgctgaaggcgtaaggctttattatcgttatcctaatgccagcttaatttttaccggtggtgccggcgtcaataaaataagtagcgccgaagtggctgcacaagttgcacaatcattaggtgttccagcagaaaaaacgatcgccctttctcaacctaaagataccgaagaagaagcgtatgaagtggataaacttatcggtaaacaaccttttttattggtgacctcagcaaaccatttagcgcgagcagaacgtttctttttagctagaggtatgcaccctattgttgcacctgctaatcagctagccattactaccccactgcatccttgggaaaaatataccccttccgcgtattattttcagcatagtgagcgagcatggtatgaatttatcggctcgatttggcaaaccataaagcctagcgaatcatctaatatagaggcggttgttgagaataaaaatgaagctgacaatggcataaaatag

SEQ ID NO: 313080 - DNA, 1905 bp, Proteus mirabilis
  misc_feature (1890)..(1899): n is a, c, g, or t
atgattgaacgaggaaaatttcgctcattaacattgatcaactggaatgggttttttgctcgtacttttgatttagatgaattagtcacgactttatccggtggtaacggagcgggtaaatccaccaccatggcggcttttattaccgcgatgatccccgatctgactttacttcattttagaaataccactgaagccggttcaaccagtggctctcgtgataaaggattatatgggaaattacgcccgggagtttgttacgctgttttagatgtgattaattcccgccatttacgagctgtcgttggcgtacgcttacaacaagttgccggacgagataaaaaggttgatatcaaaccttttatgatccaagggctacctattgctgaaaatccaacagaaattttgacgcaagctgtcgatggacgccaagcacgtgttctaccacttaatgaattaaaagaaaaagtagaagcaatagaaggcgttgtttttagacaatttaactcgattactgatttccactctgtactctttgatttaggggttattccgaaacgtttacgctcagcaagcgatcgggcaaaattctatcgtcttattgaagcttcattatatggtggtatttcaagtgccatcactcgctctttacgcgactatttattacctgaaaatagcggagtaagaaaagccttccaagatatggaaggggcattacgtgaaaaccggatgaccttagaagctattcgggtcactcaatccgatcgtgatctgtttaaacatttagttaccgaagcgacctcttatgttgcagcggactatatgcgtcatgctaatgaaagacgagtacaccttgatcaggctctatctttacgtaaagagttgtgggatcagcgtaaagcgattaacaatgaagcttatcgctttattgaaatgggcaaagagttagaagagcaacaagcgttatcggctgatttggaaacagattatcaagccgccagtgatagacttaatcttgtacaaaatgcggtacgccaacaagaaaaaatcgatcgctatgttgcggatgttgaagaaatcacattccgtttagaagagcaaagtgaagttgttgaagaagcaacatcaaaaaaagaagagttggaagcgcgagttggatctgcggaagaagaagttgatgaactgaaaagtcaattggcagattatcaacaagcgttagatgttcaacaaacccgagctattcaatatcgtcaggcggtacaagcattagagcgtgcgaaagcacaatgtggcattgatgatttagatgaaaccatcacgcattcattactttctatggagcagaaactcggtgtttctgatgcggccaaaacgcaatttgatcaagcctataaattgatcacctcgattgttggggaagttgagcgtcaaaatgcgtggagtgcggctaaaagcgcattacgtgaatggtcatcacatcgccatcaagccgatcgtgttcaccctattcggatgcaattagctgaattagagcaacgtttacagcaaagaaataatgctgaacgtcaacttgcagagtttaataaacagtatggcaaaaatgttgagcctgatgatctatttactctacaagaagagctagaagcaaagattgaagagctgagcgattatgttagtgattctggcgaacagcgtatgcaaatgcgccaagagcttgatcaactaaagcaacaaattgaaaaattaagaaaacaagcgccagtttggtttgctgcacaagatgctttaacgcaactgtgtgaacaaacgcatcaatcttttgaaacaagcaatcaagttactgaatatatgcaacagttacttgagaaagagcgtgaagccacggttttnnnnnnnnnngcgtga

SEQ ID NO: 313081 - DNA, 261 bp, Proteus mirabilis
atgaccgctcattgggaatcaatattaacgcaaattagtgagaagcaatttaagtatcaagattttatgatgccattaagtaacacactatttgaattaattactcaagctaaacgtcgtcctaatattcaagcgtttagaaacctgcctgcgcctgcgcagaataaaaaacgtaaaggtgcgacgaaaaaaagtgcacaagggaaaagtcgttcagcgcagtctcaatctacgaatcgcaatataaagagtgatgcttag

SEQ ID NO: 313082 - DNA, 627 bp, Proteus mirabilis
  misc_feature (602)..(611): n is a, c, g, or t
atgtcagaacaaacaattatttgggatcttgacctgatccataagtataactattcaggtccgcgctacacatcatacccaacggcattggaatttaatcagcaatatagtgatgcggatttcgaacaagcaacaaagcgttatcccgaacgacctctgtcactgtatattcacattcctttctgccataagttatgttatttctgcggttgtaataaaattatcacgcgccataaacataaagctgatgaatatcttgatgttttagaaaaagaaattattaatcgcgctcgctattttaaaaatagaaaagtgacccaaatgcattgggggggcggtactcccacttttcttgataaacagcaaattagtcgcttagtcgccttattaagacaacattttcattttgtggaaaatgctgagctctctattgaaattgatccccgtgagattgagttagatgttattgatcatttacacaatgagggatttaaccgcctaagtatgggggtgcaagattttaataaagaggtgcaacaaaaagttaatcgtgaacaagatgaagcatttatcttttcattagtagcaagagcgcgtgaagnnnnnnnnnnaccagtattgatttga

SEQ ID NO: 313083 - DNA, 447 bp, Proteus mirabilis
  misc_feature (430)..(439): n is a, c, g, or t
atgccagataataccgtaacggaagaaaaacaatttaaatgcattggcatcgtcggtcatccccgccatcctgaagcactttcgacacatgaaatgctctattattggctccttgataaaggatatgacgtcattatcgatacccaagttgctgaagaattaaaactcaccgatgcacaaacgggcgatttaacacaagtcggcaaactcgctgatctagttattgttgtcgggggtgatggcaatatgctaggcgccgcccgtgttttatcgcgctataatatcaaagtaattggtgtaaaccgcggtaacttaggttttctgaccgatcttgatcctgataacgcattacaacaattaactaatgtattagcaggccattatcgtgaagaaaaacgcttcttacttgaagctcgtgtctgtgctgaannnnnnnnnntgtgctga

SEQ ID NO: 313084 - DNA, 1401 bp, Proteus mirabilis
atgtatcagcgaaacacgagcaaaaaatcgcaaaatcaacaacgctttaattggtttagaaaagcgaaagaaactaaccttgccccggtgaaaacgcttattctttccgccattatcggtacgttagccggattaattggggtactatttgaaaaagccgttagctgggtcattcatttaagacaagataaattagccgaggcattaaccaacccttatcttttggctattggcacgttacttgtttcctctcttttagccatgagtggctactacttagtgaagaagttttcaccggaatctggtggttcaggtataccggaaattgaaggagcaatgatagatattcggccagttcgttggtggcgggtattgccagtaaaatttatagccagtatcggtactttaggctcaggtatggtacttggtcgtgaaggccccaccgtgcaactaggggctaatattggtcaactcgttaatgatgtctctcgcgttaaagataaaggaacacgccaaacactattagccacaggtgctgctgccggtttaacggctgcctttaatgctcccttggcaggcattctatttattattgaagagatgagaccacaatttaaatataatttaatctctattaaatccgtcttcattggcgtgatcatgtcttgtattgtatttcgcctaattaatggtgaaggaggcgtcatacagataggtaaattttcttcagcgccgatgaatacactgtggctctatttagtgttaggaatgttatttggtgttgttggggttatttttagtaaattactgttttatgttcaaacacaattccaacatttttatcaagataaaacctcacgttttgttttagccggtggcgtgattggtggtgcatgtggtttacttgcattgattattcctgaaataaccggaggcggttttagtattattcctgcattaagtgccggaggatattcgttaactgcactgctaatattttttgtgttacgtaccatcaccaccattatcagcttctcctccggtgcaccaggaggaatttttgcccccacattagccttaggcacactctttggtagcgcttttggattaatggcaacctatcttttccctgattatcaaattcaaattggcacttttgctattgctggaatgggtgctttatttgccgcaacggtgagagcaccactaactgggattgtgttagttctagaaatgaccgataactatcaacttattttgccgatgataattacctgtcttggcgcaaccatgctggcgcaattattaggcgggcgacctatttatacggttctactcgaaagaatactacaacgctcagaagccaaagaaaaaacagaggctcccaaagagcccctatag

SEQ ID NO: 313085 - DNA, 513 bp, Proteus mirabilis
atggataccaactttggaccattagtcagcttccctcatcttgaaaaagttttaagctatatcgagttaggtaaagctcaaggtgcaaaactactttgtggtggtgaacgtttattcgctggtgcattggcgaaaggggcttatgtggcgccaacggtatttaccgattgtactgatgatatgaaaatcacgcaggacgaaatcttcggccctgtaatgagcattttaagttatcaaacagaagatgaagttattttacgcgccaataatagtgtctatggattagccgcaggcttggtgactcgagatctgacaacggcacatcgcgttatacatcaattagaagccggaatttgctggatcaatacttggggtgaatctgcagcagaaatgcctgttggtggttataaacattccggtgttggccgtgaaaatgggcttgtcacactacaaaattacactcaaatcaaatctattcaagttgaacttggggagttttcatccgttttttaa

SEQ ID NO: 313086 - DNA, 150 bp, Proteus mirabilis
ttgggagtcggtaatgtagaagccgtgcctgatatcaagggaagaattcctctcattaactgggttcaggccggtgattggactgaaatagcgaaggaatttgcctatgaagatgctgaagagtggcgtgaagtcacagggaaagcataa

SEQ ID NO: 313087 - DNA, 567 bp, Proteus mirabilis
atgcgacaaaagttattacaaacctatcatcactatatgacgtggttagcaaataaaacggaacctgcacattatcaggcgctagaagaatacgccaatgcatcacaagccggaacattgcgcgtattgccggggcctactggcgagcgtaatacctatcaattagtcccttgtggcaaggtgctttgtctctcagataatgagcaagatatatttactcagttagcgggagtctttgcatcaggatgccatgctattgtccataatgctgttttctcccaaaaaacctatcgtgaattgcctgatatgatcagaaaagcaatcacactcacggacaactggcaagatgagtcactaagcattaatgccgttatttatcatggcgatagtgatcagttaaaagaaacttgtcagcaaattgcacaacgtaaaggggctattatttcagtacaaggcttctcacgtggtgagacagcattgttattagagcgtttattgcatgaacgagcattaagcgtcaataccgccgctgccggaggcaatgccagcttaatgacgattagttaa

SEQ ID NO: 313088 - DNA, 2109 bp, Proteus mirabilis; identical to SEQ ID NO: 297129

SEQ ID NO: 313089 - DNA, 336 bp, Proteus mirabilis
atgcaaacacgtttttatctttacggcattattaaaggggaagatcatccttttccagccactcccaaggttaaatttaatccactgcaacaaatggcttatttaggtgtgatgtatgcattagtaccattacttttaatcactgggatcttactgcaaaatcccatgtttatccctgctgatgctgtgctatttaaagcttggttattaataattcaccaaatactagccgtgtgtagtgtcttttttatctttggtcacctttacctgtgtaccaccggaagaacgccattccaaacctttcgcagtatggttgacggctaccatagacactaa

SEQ ID NO: 313090 - DNA, 585 bp, Proteus mirabilis
  misc_feature (558)..(567): n is a, c, g, or t
atgaaaaaaagagccatctatcttattttattaatgctaatacttattgcattagccgttcttttccgcgcgcataatcaatatttattactgcaaggtgaagtggatgcacctgaagttattgtggcctctaaagccaaaggacgtgttatagagcgtcatattgagcggggtgatgatgttaaagcggggcaattgatgatcaccttagatagcccagaactcaatgctcaagtggctgcactggaagcggcaaaagcccaagctcaagctcaattagatctctctattcacggtacaagagaagaaagcattcgcaatttacaagcgatcttatctcaggcgcaagcacaagccaccaatgcaacgaaagattatcagcgtcttagtgcggtcgccaataaaggttatgtctctgccaatgagcttgatagtgctcgtagtcgtcgagatgttgccgtgcagcaagccaaagcagcacaagctgaattagatgaagcgaaaaatggtgatcgtattgaattacgtgagaaataccgagccgcactacaacaagcnnnnnnnnnnaagcagagcagcaattaa

SEQ ID NO: 313091 - DNA, 270 bp, Proteus mirabilis
atggttgctgggtggacaggggactttattggcgctcaacgtcgttcaccgatggatgctgatccggctgctacttattggtcattaccaaaaagtaaaggctatgccattcatggactattcgctaattggaaacctgcttttatcgataataccgagatacgttttactgtcgccaatttatttaaccgtgattattacccttatttaggtgagtcggtatctggtactgggcgagattatcgctttactgtggttaaaagtttttaa

SEQ ID NO: 313092 - DNA, 1560 bp, Proteus mirabilis
  misc_feature (6)..(15): n is a, c, g, or t
atgagnnnnnnnnnnggtaccgataccgcccttgcattaggaatgatcaaattaatcattgaagaaaatcttacagataaaccttttttgcgtgcccataccggagcggtgtatttagtcgatgaacaacaaaaactactacgtgattcagctaatgataaagatagctatttagtctttgataccctaactcagcaaattgttcgccatgatacccccaatattgtaccggcgttaactcatgatgaactgccaaataaaataaattacaccaccgtttttgaacaaatctattggcaagctaaaccctggactatcgaaaaaaccagtaaagaaacagatattccacaagagactattattcgtttagctcgagactacgcgacaacaaagcctgcaatgattgtacaaaatatgtctggcgcacaacgcactgaatttggtgcctatgttgcagcaagccagttttatcttgctctattaaccggcaatattggtaagaaaggcgcgggtatttgtgatgccggtggcgtgcgtcagatggcaaaatttaatcctattattccccctgcaccaaatgttaaacccattaatcctattcctgttgcaaaagtgggtgaatggatagtcaacgaaagaccccacccaattaatttctggtggatcatgacaatgggggtgatgacacaattacccaataccaatatggtacgtaaggcgctaaaaaaagttccttttgttgtcgtagccgataatttaatgtcatcaacagcgctttatgccgacttagtacttccagtgacaaccatttttgaagatacaagtttaatggctggtgtgcgtagccaatatgttcaattaatggaaaaagccgttgaaccaccaggagaagcaaagcctgattattggatttttgcccgccttgctgaacgctttggtttcggtgacgtatttaatcaacctattgagcactatattgatacttgcctcgcgggatcggggattacgcgggaaatgctagaaaaagggcctgtacgaccagtagaaggcgattggatcccatttaaagacggaatatttcgtacatcaacccaaaaagcacatttctttattgaagaatggcaagataaaaactactcccctatagtcacttattatccagtaaaggaatcgacaacaggctcccctgaattagcaaaaaaatatccgttaatggctgtgcaacgtaagctagcacgtagtgttcattcaagccatgggatgaatgaatggattttagaagtacagcgtaatcaacccaatattttaatacatcctaatgatgcgttatctcgtggaataaacaatggtgattgggtgtttgcttttaatgatagaggtgaacatagagcaatagccgttgtcaccacacacataaaacaaggtgttgtttctcttgataatggttggtgggaacaacaaggggggagtagtagccatgtaacaaatgaccatgttgaacctttaggtaatggtcattgttgtaacagtaccctagttaatgtgagacgggaggcataa

SEQ ID NO: 313093 - DNA, 150 bp, Proteus mirabilis
atgacctataactttaataaaaataccatgctaaatttagccgtattgaatattaccgatgaaacgggtcctgcggtcaacgataaagggggaaactgggtcgttgatgaaggccgtcgttattgggcaaatatcaaatatagtttttaa

SEQ ID NO: 313094 - DNA, 276 bp, Proteus mirabilis
  misc_feature (256)..(265): n is a, c, g, or t
atgaataagcaagaatttttatcccgtcgtcaggcattattagctcagatgaaaccagcaagtgcagctatcttttttgctgcgccagaagcacaacgcaatgctgatagtgaatatccctatcgccaacatagtgacttcttgtatctcaccggatttagtgagccagaagctatccttgtgttgattaaaagtgatgaaacacataatcatagcgtactgtttaatcgggttagagatttaaccgcggaaatcnnnnnnnnnngatgtaggtga

SEQ ID NO: 313095 - DNA, 417 bp, Proteus mirabilis
ttgggtaagattgaacaagtagggcagcgtcattgctatccattagttctgcaaaaagcacagcaaatgatcagccatcgtttagcattgataggtaatgcatctcaaaccttgcaccctattgcagggcaaggttttaatcttggtttacgcgatgtaatgacattagccaatacattaacctcggccatacaatcaggtcttgatatcggcagttatcgcgtattatcacaatatcaacagcttcgcgaacaggatagagaaagtactattacgatcactgatggcttagtgaaagtgtttgcgaatcgttgtatgccgttaattatctcccgtaatctaggcttaatgacgatggaattagtgcctgcacttcgtaacaaattagcacaccaaacattaggttggacaaactga

SEQ ID NO: 313096 - DNA, 264 bp, Proteus mirabilis
gtgtcaactgcaaacacacctgaagatgaacagaaaccgagtctgaatgcgtttaaacagcctcgtgcattttatctcatcttctcaatcgaattatgggaacgttttggatattacggcttacaagggatcatggccgtttatctggttaaaatgctgggtatgagtgaggcggaagctatcactgtttttgccgcatttaccgcattagtttatggctttgtggcaattggtggctcactatggcgatattatcggccgtaa

SEQ ID NO: 313097 - DNA, 462 bp, Proteus mirabilis
atgaataacaacaaaaagaccaaaaaaagattttctcttattatcaccctgcttattgttatcgctggcgctatcgcctattggcaatactcttcaaacaacagcgcacctcctgtgagtaaagatacccctactgcgaatacaccaaatagaagtacagctggctcaagacgaccaccgatgcctcctgtacaagtggcgacatcagcacaagaagatgtgccgcaatttttaactgctttaggtacagtgaaagccgtcaatagtgtgaccgtgacaagccgtgtggaagggcaattaatggcgttgcatttcaccgaaggccaacaagtgaatcaaggcgatttgttagcagaaatcgacccacgtccttttgaagtgcaattagcgcaagctagcaaagacccatttggtttcacaacaagaattagacaaccaagcggctttagtcaaacagtctga

SEQ ID NO: 313098 - DNA, 879 bp, Proteus mirabilis; identical to SEQ ID NO: 297138

SEQ ID NO: 313099 - DNA, 159 bp, Proteus mirabilis
ttgattggctctcgctctaaacctaaaaaccgcattgaagaaattgcacttgagctagcaggtaaaacaggcattcgtcgtatgagtgagttttcaggtcgccaagcatggaacagcatttggaagcaagcgatagaaatgttacaggagactcagtaa

SEQ ID NO: 313100 - DNA, 687 bp, Proteus mirabilis
  misc_feature (653)..(662): n is a, c, g, or t
atgaaactactcttaacgccctatattcagtctgaccttggcgttgttttattgaagcctggagcggagttgcttaagcaatttaaaccacattcgcgcgtgattattagcgatgtaccaaaaagtttagataaatggccttctggggcattaacaggaaatgaacagccattattggataacaagggcattgttgattttttgaataataaaaaagttctccaagctatgggaggattgtcatcgatgaatatgtggataggcagaaatatccattgttgtcagattaacgataagcatgacagttatcatcatcatgaattaacaaccacatggcataaagacggtgtgatacggacttgttggtaccatgataatcatattcgccattcatcagctgagtgggttgctgaattggctcataaaaatcgtattgcttggatggtagacactattcgcagtcgtttaagattggataatggccaccagctgacagtacccgattttttctcatttgctgtgatgcataaactggttgatgaattacctgatgcgatattacgtcaaattttggattggtctgaaaaacctaaagagcgcagggtacatggtggttttcctgaagcagatattattccaagcaatgtaacagnnnnnnnnnntaacagcactatcaacaatgaatga

SEQ ID NO: 313101 - DNA, 363 bp, Proteus mirabilis
atgaatgaacgattagacatgataagaccagtcataaaagttgctatcgatcctgagccactagcgtcattccttttgaaacctaaaatgcaacgttgggagaattcccaatggcttcaatgggtgaaaacacagccttgttgtgtttgcggacaacaagcagacgatccacatcacattatcggccatggtatgggaggtatgggaacgaaagttcatgacttattcactattccattatgtcggcaacatcatgatgagttacatcgtgatcccaagttgtgggaagccacttatggcaatcaaatcgaattgttattttcttttctaaatcgttcattaggaataggggcattggtttaa

SEQ ID NO: 313102 - DNA, 273 bp, Proteus mirabilis
gtgaactggttgaaaacaccagcctttattttagacttagcagcaaaaagtccgttacctgaattacaaaattaccaatatcgtttagtcgatacatcaacactagaagttgatgtgaaaagagagcaaggattgaatggggtttttgctcagctcaatgcacaaggtattcaggttttaagtatgcgtaataaagctaaccgccttgaagagttatttgtgcatttagttaatgaagatcatacagaaacagaaaaaggagagagggaatga

SEQ ID NO: 313103 - DNA, 621 bp, Proteus mirabilis
atgcaacgtcgtgaatttttaaaattaggggcaacattaagcgccgtcacactattaccaagttggagccgtctcgcattcgcccaaactaacacgccttcactcgctattccacctcaaattagcccagacaaacaacaaaagattgttcttaatatccaacaaggtgtttcccaatttactgctacagcaagtacaactacttgggggtataacggtagcttattaggcccagcattaaaattaaaacgtggtgaacctgttactattgagatcaataacacgctaccagagactacgacggtgcattggcatggtcttgagataagtggtgaacaagatggaggtcctcaagcgactatcgcaccgggtaaatcacgaacagtaacttttacgccagatcaagcggagtcgacatgttggtttcatccccatactcatgggatcaccggaaaacaggtggcaatggggttagggggattagtgatcatcgaggatgacgaaacggccaagcgaaagttacctcatcgctggggagtggatgatttaccggttattttacaagacaaacgcttagacagtaacggtcaaattgattatcaacttgatgtgatgaggtaa

SEQ ID NO: 313104 - DNA, 1530 bp, Proteus mirabilis
  misc_feature (1513)..(1522): n is a, c, g, or t
atgtggcattctagtcatatcaatgaacctcagaacaatgatgaacagattatggtccagatagcagaaaacccctttatccttgtagatggctcttcatacctttatcgtgcctatcatgcttttcctccgctaactaatagcaaaggtgaacccacaggggcgatgtatggtgtgttaaacatgctacgcagcctaataattcagtataagcctagtcatgtggcggttgtgtttgatgctaaaggcaaaacattccgtgatgagttgtatgaggaatataaatctaatcgcccaccaatgccagatgatctgcgtgagcagattgagcctttgcatgaaatggttcaagcgatgggcttaccgttactttctattactggcgtcgaagctgatgatgtgattggcacattggcattaaaagcagccagtgatggtcgtaatgtgttaatcagtaccggtgataaagatatggcacagctagttacgcccaatatcacacttatcaacacgatgacgaatgttattttaggccccgatgaagttaaagaaaaatatggggtgccaccggagttgattatcgactttctcgccctgatgggtgactcatcagataatattcccggtgttccaggggtaggtgaaaaaacagcattagggctattgcaaggacttggtagcttagaggatatttatcaacagcttgataaaatagccacattgagtttccgaggtgcgaaaacacttggcgctaaaatggttgaacatgagaaagttgccaaactttcttatcaattagcgacaattaaaacagatgtagcgcttgataaaacctttgatgacttagtggttaatgaacctaatttagataagttacttgaaatgtttacgcgttatgaatttaaacgctggataagtgacttacaaaatggtggttggttagctcaacgcagtagccgtaaagcgccagtcccctatagtgcagaagtcgcaacaccaaaagaacagccatccgcagacaatttcccggttatctctcaagagaactatgagtctatattgactcatgaaagcttaatgcgctgggttgaggtactgaaaaaagcgcccgcttttgcgtttgatactgaaacagatagcttgaataatattgatgcacgtttaatcggtctgtcatttgcggtagagcctggcaaggccgcttatattccattgcgtcatgattatctagatgcaccagagcaattacctgttgatgaggtactaactgctttaaaaccgattttagaagataaaaccatcttaaaaattgggcaaaacctgaaattcgaccgcggcattatggaaaatgaaggcatcgaattaaacggtatttattttgataccatgttggagtcttatgtcttaaatagtgtgagtagccgccatgatatggataccttagcggaaaagcatttaaatcataaaacgacgacatttgaagagattgctggtaaaggtaaggggcaacttnnnnnnnnnnacttttaa

SEQ ID NO: 313105 - DNA, 1374 bp, Proteus mirabilis
  misc_feature (27)..(36): n is a, c, g, or t
ttgctggtaaaggtaaggggcaacttnnnnnnnnnnacttttaatcagattgaggttgaacaagcgaccttatatgcagcggaagatgctgatattaccttgttactgcatcaagcgctttatcctcaaatagaggcgattgcaccgctaaaacacgtttatcatgatattgagatgccattagtccctgtgctttcacgcatggagcgtaagggcgtattgattgacgcacaagtgcttgccatgcaatcccaagaaatcactcaacgtttagctgagattgaaaaagagacattcgcgttagcagggcaagaatttaatctctcttcacctaagcaattacaagagattttatttgaaaaactcaatcttcctattatcaagaaaacaccaaaaggtgctccttcaacaaatgaagaagtgttagaagcgttagcgcatagtcatgagttacctcgtttaattttagaacatcgtggattggcaaaattaaaatcgacttatacggataaattgccgttgatggtcaatagtaaaactaagcgggtgcatacttcatatcatcaggcggtgactgcgacaggacgtttatcttctcgtgatcctaatctgcaaaatattccagtaagaaatgaagaggggcgtcgtattcgccaagcgtttattgcccgtgatggttttaaaatagttgctgccgactattctcaaatcgaattacgtattatggcgcatttatcgcaagataaaggtttgcttgatgcttttgctcaagggaaagatattcaccgagctactgcatctgaagtgtttggtatacctttagacgaagtcacctctgaacaacgtcgtagtgcgaaagcgatcaactttggtcttatttatggtatgagcgcatttggtttatcacagcagattggtgttgaacgaaaagaagcacagcgatatatggatctctattttgaacgttatccaggggtattagattatatggagcgtacccgtaaacaagcgtcacagcaaggctatgtggaaacgttagatggacgccgtttatatctgccagagattaattctaaaaatgcgatccgacgtaaagcatcagagcgtgaagcgattaacgcacctatgcagggaacagcagccgatatcattaaaaaagcaatgattgcggtggataattggatctgtcatgaatgccctgatgatgtacatatgattatgcaggtacacgatgaattagtgtttgaggtacgagagtcatatttagaaaaagcaaatgcgatgatccataagctcatggaaagtagcatggagcttgctattccactgaaagtcgaagtcggagtcggtaataactgggatgaagcccattaa

SEQ ID NO: 313106 - DNA, 504 bp, Proteus mirabilis
atgttagctatggcacctaaaggtattacctacactaattttggtcccggtatgagtatggggcatagtgttgccgctaaagctattgatggtgtaagagatgcactatcaatgactattccattaggtactggtgttcatcggcgtatggtttatgttgaattagaagcgggtgctaactttgcacaggttgagcaagccattaaggccgacagctatttctcatctgatgaaacacatattaaacaagttgatagtgttgatagcttaaaagatgttggtcacggagtacaaatgacccataaaggggtgtcaggcaaaacacacaatcaattatttgaatatgctatgcatattaataatccagcattaacatctcaatttatggtttctgcagccagagcaagtatgaaacaacaagcgggtgcctatactgtgattgaaattccccctgttgattttttagcaggggatttaaatacattaatcgcaaaactggtgtaa

SEQ ID NO: 313107 - DNA, 249 bp, Proteus mirabilis; identical to SEQ ID NO: 297123

SEQ ID NO: 313108 - DNA, 900 bp, Proteus mirabilis
  misc_feature (295)..(304): n is a, c, g, or t
gtgcccttcctatttattttagcgacggtgatcttggctatcttaattactgcttattttagtttgcgccctttaagacaagccgcagagctgatttctaatcgaaaacctcgtaatttaacgccaattaatgtcggacaacaatttaaagagatccgccctatctttaaagagcttaaccaattaatggcaagaatagatgcggctaatattagagaaaaacaatttatggctgatgcggctcatgagctaagaaccccgattgcagcagtgattgcccaattgcacattctcnnnnnnnnnnatgaaaagcaggagcgagaagaaattattgaatatatgaaacaatctctggatagagccgccgcactttcccaccagcttattgatttagcaagattagagtgtgacgatttccctataaaaatagaatcctttgatgtttataatattattggtaatgctattgctcagcgcgtgccttatgccttaacaaaaaatattgagctatctttaaatgaaggtatgtcacttaaaatagaaacagataaacaagcactactgtctatttttaataacttattggataatgcaatcaaatattgccccaataatagtcaagtcgaagtgactattgaacataaagatacccatcatctcaatattattctgcgtgataatggaccaggaattgcacctgagtatattagctcactattttcccgtttttatcgtgttccgggatcacaagggacgggcagtggtttaggcttatctattgcacaaaatctcgctgaaaaaattcaagcaaccatttccattactgaagggctacacaataaaggtattggttttattattaccttaccgttaaaaattaaaccactagataatgagtaa

SEQ ID NO: 313109 - DNA, 342 bp, Proteus mirabilis
atgagtcaatttattcaattacatattttaacttcttatgctccttctaatttaaatcgtgatgatttaggacgacccaaaacagcgataatgggaggatttgaacgtttaagaataagttctcaaagtttgaaacgtcattggcggacatcagagttatttaatattgctctttctggtaatattggtattcgtactaaaaaatttggtttacagctttacgatgcattaattgaaggtggggtttctgaaaaaaatgccaaaaagtgggttgggttaattatagaacaatatggaaaaataaagaaagattctattgaaacagaacaacttgctcagtag

SEQ ID NO: 313110 - DNA, 300 bp, Proteus mirabilis; identical to SEQ ID NO: 309887

SEQ ID NO: 313111 - DNA, 975 bp, Proteus mirabilis
  misc_feature (120)..(129): n is a, c, g, or t
  misc_feature (886)..(895): n is a, c, g, or t
atgtctattattcatcttgaatttgaaaagcctattgttgaattagacgagaaaatagatgcattacttgcatttaaacagtctcaagatgaaacaacggcagttgatatagacgaagannnnnnnnnnaaacttcgccaaaaaagcctttcattaacacgctctatattttctgatttaggggattgggagatcgtacagttagcacgtcatcctatgcgcccttatacattagattatatcaaagctatttttactgatttccaagagttggccggcgatcgtgcttatgctgatgataaagcgattgttgcagggttagcgcgtttagatagaaaaccagtgatgattatcggtcaacaaaaagggcgagatactaaagagaaagtaaaaagaaactttggtatgccatcaccagaaggttatcggaaagcattacgcctgatgaaaatggctgaacgcttccatttaccagtgattatttttattgactccgcgggtgcttatccgggggttggcgctgaagagcgggggcaatcagaagccatagcacgaaatattcttgaaatgtcccgattaaaaacaccgataatttgtacaataacaggggaaggtttttctggtggtgcattagcaataggtgtgggggatcgagtaaatatgttgcaatatagtacttatgctgccatatcgcccgaaggctgtgcctctatcttatggaaaaatgctgataaagcgcctattgccgcccaaaccatgggaatgacggcacctaaattacaggcattgggtattatagactcgattattcctgaaccattgggaggcgcacatcgccactaccagcaatcggctgaattcgtaaaaaaacagctcctcgcagatnnnnnnnnnntaacagaattgaatagttattctaaagaagaactgcttgagaaacgttatcaaaaattaatgtcctatggttattgttaa

SEQ ID NO: 313112 - DNA, 1689 bp, Proteus mirabilis
atgcgctggctgataaaaagtttggtatctctgatacttatcgttattttatttattattgtgatttatgcctttcttcaaacacaatggggtgcgcaaaaaaccagtgaatggttaacacagtatagtgattatgacattcgcttttccggtattgaacatgatttaactcaaccagaacaaattgttgtttatgatctgtccattaaccccaaacaagataaaaccgccgtattagcccaatcagcacaacttagatttaactggcaattttttactatgccgtcccatctgcaaaaaattactttagagaatggtaaaattattttagctaataaaatagctccccttcctgttagtgcagatattctccagtttaaaaatatgcagttagatagcatgccaacatctagcacaacattcacctttagcgctaacaaaataacggggggtatcacaccttggaaacctacctcgaccgatcctattggtgcggggcattttcagttttccattgctgatggcatgataggaaaaaatagctttaataattttattgttgctggcgaatatcaaccaaatcgtattttgattgaaaaattagccacccagttccttaatggctcactctctttatcaggccaatatcaagataaccaatggcaacttaatgatgtttacttaaccggactgcgttggcaatccacaaaaaccttagaagagttacaacaatcattaagtcaatctccagcaatgactatcaagcaattgaacattgttgattttactgccgaagggaaacagtgggcaataagtggatttgctgggcagttttctcaagttgcgtggaataatagcctatcactgacatccggtgagctaaacaccgatgatattgtgtataaaaatcaacatgtcactgatgtgatcgctaagttaaatcagcaagataatttatttaacatagataatttaagcttacgctatgaaaaagggctaataaaactagcaggacaatggaacagcgagacaaagactttaaatattgaagatgcaacactctcaggtattttatataccctacctgagcaatggctctccttctttgctaaacctattgagcaagatgtgaagagtatcaatattaagcagttatcattaaaccaatctatcctcatcgatattaatcccctctttccttttcaatttaccggcctaacaggacaactgaaaaatttaatcatcgccaaagatgggcaatggggattatggcaaggcaccgcgacgttaagtgctgatagtggtacattaaatggcgtagagcttcgccgccctgacataacattaatgacacaacaagatactgccattattccacagttttctgctttcgtagataaaggcattgtacgtggctctgctgcattagaacaaaacaataaccaaagactattttctcttatcgtcaatgggctgaatgtgcccctctctttgcctaataatatgggttggaaattatcgcaacctaccaatgaaacaggacaatttaccttaaaactgaaaggcaacttagccgctgacgctgttataccgaccttaaatggtacattaataggtaaaaaagatgaccaaacgcctatcgatgacaagatgcaagacggcgaaataataaataatttatccttttga

SEQ ID NO: 313113 - DNA, 1503 bp, Proteus mirabilis
atgagttatacaaaacggttgtcacttatttgtgctatctgtttaggcacatttatggccactcttgatattagtatcgtcaatgttgctctacctactattcagaatgatattaatgccaatatggctacattacagtggattgtggatgcttatgcactatgtctatcagcttgtattttgtcttcagggccattaagtgatcgtttcggacgaaaaaaagtgtggctctggggggtgattattttcactctaggctcccttatctgtgctattgcacaacaacatgaaatattaatccttgggcgtattatccaaggtattgcagctgcagcccttattcctggcgcattatcacttattacacatgcctttcctgttgatattgaacgtatccgtattattggtatttggtcttcggttagtgcattatcgctgattattggccctatccttggtggtgcattagttcatgccagtggttgggcaagtatatttcttattaatattcctattggtgctattacagtattactaggctggtatggattaagtgaaagtgccgatcctgaggatgttgcgttagatcccctaggacaattaaccagtatcttgggattaggtttactaacctatggttttattgaagctggctctgtaggttggtctgattatcgtactgtattcgcattaattgtcggtctgatttttattaccctgtttgttatagtcgaaaaacgtattgaacgcccgttattaccgctatcgttatttaaagatcgctcgtttttccaatataacctttcctcttttactttgggatttgccacttatagtaatgtcttttttatcgcttttttcctacaaaaagcacaaggctggagtgcattagaaacaggtttaagaatggctcctgagtttatcgccatggctcttttttctatgttatttggacggttctctcgttatatatctgttagaaaattaatgatctttggctttttgttgattgcaatatcttcttgtttattggcaacattagcaacaaatagctcttacacaataacaggaagctatttatttatcttaggtgcaggaatgggattagcgacacccgcaatcggggttttagtgatgaaaagtgtagcaccgtcccgctcgggcatggcgtctgcaaccatgaatgcattaagacaaaccggtatgacaatgggaattgcgttattaggtacattaatgatacagcaagcaattaattatatgatgatacaaagtcaagcattaggaatagtggcagaaccgattaatattattacgttagtaacagaaaataaaaccgcttccctagataatcagttggttgccctattacctgaagcatttaattcaggatttgcctatgccatgctaaccgcaggactttcctgttttattactctgtttattatgctttttccttgcaaagagaaacaaggtgcactttctcagcagatagcggattaa

SEQ ID NO: 313114 - DNA, 1020 bp, Proteus mirabilis
atgtctttcttattgatcttgaatagtctttttattatttactcgatattactttctcgtggtgtttatcttgattgggaaatacacggttttgctgattggctaaaatcgttaggtatattgaaattacttgatattcctaaagtgatgttagcgagtgcacttattttgctctctttctttatgtatatgggggcgcggattgcgtggtgcgtttcattaatattattagtgacgatcgtttttttagatgtcgcggtttatcaccaagctggtactcaagcctatacttcattagcattagccattgtattggttatcagtcggcgtgcttttcctcatcatagcttaactagtgccggttttgttgcttttatctgtacgatttcgctactgtgtttctctatgttaggcagcctctatattggtgattcaagtaatgcgagaatgtttaccctaacagtggttattttggggatcactgtttttacgacttctattgtttatgtgatgggatttttggctcgtggtactcgcgatattgtgaagaaaaggatcgctaaaatgcatgatcattttattattattggctcttcaatgctggcagcacaattagagaaagggcttagagagcaaggtaaaccggttattgcgatttgttcggataaaaagcaagccatgtatgataaagaagccaatattattgaaggtgatccaaccaatgtaaaaacattacaaacggcaaatattcgccaagcgagttgggtagcgacgttatctgaaagtgatgcggaaaatacctttattttattaactattcaagagtgtccagaccttcaagcgaaattaatcactatcattaataaagatgagaatagagaaaaaataagtcgattacgtccagatatgctgttgtctttagcttcgttaggcaaagaaattatgatgaaagtcctttgtggtgaatctattaattcgtctgatgttactgatttattaatcaataaatatttaaaataa

SEQ ID NO: 313115 - DNA, 225 bp, Proteus mirabilis
atggaaaacacagcaccacaaacctctcttagtaaaggccttattttacttatggccgttgccactggcatggttgtcgcaagtaactattatgcacaaccgctacttgattcaattgcaaattattttcatatctctgccactttagctggctttattgtcactacagcacaattaagttatgccttaggtttaatgctattggttccccttggcgatatttga

SEQ ID NO: 313116 - DNA, 960 bp, Proteus mirabilis
atgacgctgatttcagcgagcggcttattaattacggcaatggcacctaatatttggcttatgttaattggtactgccctatcaggtatgttctcggtcgtcgcccaaattctggttccttttgccgctacacttgctgcacctcatcaacgaggaaaagcggtaggtactattatgagtgggcttttacttggtattttactggcaagaacagcgtcagggctgatggcttcctttactaattggcagggcattttctggctagcaagtgtttttctagctattttagctattacactatggcgctgtttacctacctataaaagtcaaacaaatttaaattattttcaactgctcggttctatttttaaattgtttgccacgaccccagtattacgtacccgctcactgattggtgcacttatctttgcccactttggtttactgtggacatcaatggcttttttactcgcttctgatccctttaattattccgatgcagttattggcttgtttggacttgtcggtgctgcgggagcactaatggcaggtaaagcgggtgtatgggttgataaaggcaaaggtaaaaaaacgactacttcaggtttaattcttctcttcatttgttggggacttattgttatcgccccttattatcaatggattggactgattagttttattattggtgtggttttattagatttagccgttcaaggtgttcatgtcactaaccaaagcactatctaccgtattttacctgatgcccgaaatcggcttactgccgcttatatgactagctattttatcgggggcgccctaggctctttattatcgggttacgcttatcaccaatatggctggattggtgtttccagcgccggtgcaatcattggcttattaggtttactggtttggttatttggttataaaaatgatccagtgatccaatctgaataa

SEQ ID NO: 313117 - DNA, 405 bp, Proteus mirabilis
  misc_feature (390)..(399): n is a, c, g, or t
gtgttaacgccaaacccttactattgggatcaccacaatacggtgttaaccaaagtcacttttgtgcctattaatcatgaatcacaagcgactaaacgttatttagctggggatattgatattacagagtcttttcctaaacacttatatcacaaattgatgaaagatattcctgagcaagtgtatatccctgagcagttaggtacttactattatgcatttaatacacaagcagggcctaccaaagatattcgggttcgcaaagcgttagctatggcgattgatagaaaaattattacagacaaagtccttggtactggagaaaaatcagcgaatcgctttactcctgatgtgacggctaattttacacctgagccaacgctatatgannnnnnnnnnatatga

SEQ ID NO: 313118 - DNA, 585 bp, Proteus mirabilis
  misc_feature (5)..(14): n is a, c, g, or t
  misc_feature (571)..(580): n is a, c, g, or t
atgannnnnnnnnnatatgatgaatacagtcaggatgaattagatagccaagcaaaaatattgttatcagcagccggctatggtcctcataatcctttaactctctctctgctttataataattcagaaaatcatcaaaagatcgccattgctgtcgcttctatgtggaagaaaaagttaggcgtaaaggtaaacttacgcaatcaagagtggaaaacttatattgatagtcgtaattcaggtgattttgatgtgataagagcgtcatggataggcgattacaatgaaccctccacattcttatctttattaggctctaagcatgctggaaatatcccaaaatatcagagccagcaatatgatgagattttagtccaagccaatatgacgacagatgaagaggaaagaaatcgtctctataatcgtgcagaacaggttattgcggaagaggcgcctattgcccctatctatcagtatactaatggtcgtctaatcaaaccttggctaaaaggttatcccattgagaatcctgaagatgtcgcttatagccatatgctgtatgttataaagnnnnnnnnnnattaa

SEQ ID NO: 313119 - DNA, 462 bp, Proteus mirabilis; identical to SEQ ID NO: 298454

SEQ ID NO: 313120 - DNA, 435 bp, Proteus mirabilis
atgccatcagaaacatcatcacaaatatcaaatgcaaccaatggtatcgagccacctcgtggttatatcagtattaaagcttctaaagatggcatcttacgtcaagtggttccagaatatgagcgcctaaaaggggcttatgaattactgtggcaaatgccaagtatcgaaggttatttgcagttagtcggtattatgcaaaagtttgtcgaccaagcgatttctgccaacactaactacgatcctactcgtttccctagtggtaaggttcctatgaaccagctgctaaaagatttgctgctcgcctataaatatggtgtgaaaacactctattatcacaatacccgtgatggtgcagaagatgtacaaggtgatctggaagaagtcgttgaaacggcagattcagattgtgaaggcggcgcgtgtaaaatttaa

SEQ ID NO: 313121 - DNA, 543 bp, Proteus mirabilis; identical to SEQ ID NO: 296761

SEQ ID NO: 313122 - DNA, 279 bp, Proteus mirabilis
atggaatatccacttgtaccagcacaaatatggttccatgaaatagactcatatcgtagtaatattttttcatgggagacgatagagtatccgttagatgattctggtgaagattgtgtaaaatccacaatagttgggtttatcctgaaaaagtcaaaattagcatctaataattcattattagatatggcaacgcctaataacggggatgacttatcaattggtttaatgaataaaactggatggtggactgaattttgcatcctgcttattgtgtaa

SEQ ID NO: 313123 - DNA, 255 bp, Proteus mirabilis
gtgataatacgctttactcttgcattaactttatacttagctctcaatgctgatgaagtcgagatccgttattttaaaagtattgaacttgccgctggtgatggctgctgtactaacgaagatcataatggttataaattgagattctccaaaagcacactacgccgctatggcgcttcaccacaaaatgtgatctgtttttccgtctatggtgatagtatgtctccggttattccaaatggttcagccacgtag

SEQ ID NO: 313124 - DNA, 513 bp, Proteus mirabilis
atggcatcaaatcaacctgctttatttcatatgatggcaaagccgacaagctaccactgtaatattaaatgtgaatattgcttttatctggaaaaagaaaatatttttcaagatgagacaaaagaaacaggccatacagtgatgcctgatggtgtacttcgtcgttatattaaagactatattcagtcacacagtggcgatcaggttgattttgcttggcaaggtggtgaaccaacgctggcaggattagccttctttgagaaagtggtcaaataccaaaagcaatttgctaacggcaagacaattaccaatagtgtacaaaccaatgcgattgccattaatcgtcaatgggcacaattctttgctgataaccactttctattaggcgtttcaattgatggcattgaagccgttcacgataaatatcgtatttcagtcaatggtagcccaacatttgaacgcgtaaaacgcgccatcaatttactaaatgagtatggtgttgaatgttgctaa

SEQ ID NO: 313125 - DNA, 294 bp, Proteus mirabilis
atggccattatgtctaatgaaaaatcggcattttatcctgatgttcctctctttaaagaagcaacaggttatgattgggatttacaagcatggaatatgttagttgcccctaaaggacttgataaagaagcacaagataagcttaccgcagcaatgaagaaagtttatgcttcaggtgaattagctgaatttgctaataaacaaggatttgaagtcattgaattgtatggtgatgatgcgacacaatttatggccaatgaagataaaaagtttggcgaaattataaaaaaataa

SEQ ID NO: 313126 - DNA, 192 bp, Proteus mirabilis; identical to SEQ ID NO: 296623

SEQ ID NO: 313127 - DNA, 225 bp, Proteus mirabilis
atggagttatttgcacgcgatcgtccaggcttattagctattataggtaaggtttttgccgatctttctctttcgttacatggcgccaggatcaccactattggtgagcgtgttgaggatttttttgtattaacagataacgaaaataatgcgttaaaccaaaaaatgaaggatgaagtcgtagaaaggttgacaaaagccctcgtttcaaaggataaaatatag

SEQ ID NO: 313128 - DNA, 216 bp, Proteus mirabilis
atgaaagttgctttagaaggtgttccggtacaaatgatgccgatgccaaaaggcgttgttgctgttcaaatcgatcgcaataccggtaagttggcgggagatggaccatcaatgaaagagtattttattgaaggcactcagccaacagaaaaagcaaaaagtgaagtgggtacacggatctttgaggataatggcgaatccaacgagctattttga

SEQ ID NO: 313129 - DNA, 135 bp, Proteus mirabilis
atgtctttttcttctgttgattatcaaggtgttctaacaatcgaagaacctcatttattttggcaacaatatcagcaagggtttggcagagcaaaagcgtttggttgtggattgatgcttatcaggaatatttaa

SEQ ID NO: 313130 - DNA, 399 bp, Proteus mirabilis
ttggtcgaaaaagagtatggcagtgaaattaccaatcaggtatttaatcaatttacagaaaatgaatttgcccaaaatggccatggtattgacctgtcaggattgaaaaaaattcaccaagcaattgaacaacaagtttcaccaatcagttctacactatatatctggaagcccagcaaacatagtcgcttggggcatgctgcgctacaaataggttctgggcgcttacaattagatagcgatagtgtgcaggataaccatgatgataattatgtcagttggtggcctgccgggagcaaatcgctcgtaaacccactgaatattacaacagaagaaaatcctgatttaaaattacgcaccagtgagtcgctcaacaaatttcatgacgttacaaattga

SEQ ID NO: 313131 - DNA, 1578 bp, Proteus mirabilis
ttgcgctttttacctgttaatttatctcacatattagttgagttgacttcattaaaagagacattggcgttttatgaagcaattaagcaagccaatattgctgagatagaagatattgttcctgcggcaaaaacactattgatccaatatgtaccttggttaattacggcgaaagagttagtggcaatattgcgcaatatcgagataaaagcgatcgcgatgcgtcaaagtcacttattaacaatccccgttcattatcaaggagaagatctgcatgaggtggctgaattattggggatcactgcgacagaggtgatccgcagacacacagaacaaacttatcaagttgcttttacggggtttgcaccgggatttgcttatttaattgctgataaaactgagctttatgttcctcgacgtaaaacaccacgtacacgtatccccgcaggctctgtaggattagcgggagaatttagcggtgtttacccacagcaaagccctggtggctggcaattaattggtactacagagataaaaatgtgggatctctcacgtgaacagccggcatttttattacctggtgatactgtacagtttgttgatgtacaaaaagcgccagtgacggtttcattacctgagaaaaaacaatctattaatgctttatcctttaacaaggataaagggctatatgttatttccgcaggtctacaaaccttatttcaagatgaagggcgtttaggtgctgcatcaatgggggttagtgcatcaggagcacttgataaatgtgcgttacatgcagcgaatcgcttagtgggaaacccgccttcattagcagcattagaaataacacaaggtggattaatactaaaagcgcaacaagactgtgtcatagcgctgtcaggtgcagattgtacgattagcttaaaacaaacgaccggagatatagcctttttttctacctatcaaactattgatgtacgcagtggagatgaaatcacagtaggaatacctacagcgggggttcgtagttatctggcggtgagagggggttttgaattaagcccagtgttaggtagttatgcgtttgatactttagctcagattggccctcgagccttacaaaatggcgatattcttcatctaaacgatgataacgcatcaacgggcattattagccaagagcaaccgagtttcagtgtaccaaagcaagaggatatcgttacccttgatattgtgttaggacctcgtacggattggtttacagaagatgcgataaaaacattaacctcacaattatggcaagtgacaccacaatctaaccgtatcggattacgtttattgggggataaatcgcttgaacgtcagcaacaacaagagttatcgagtgaaggaacttgcattggtgccatacaagtaccgattaatggtcaaccggtattatttcttcatgatcaccctctcactggaggataccccgtaattggggctgttgccgaataccatctgtcattggcggggcaaatccctattaacgctaaaattcgttttaacccaattactttatttcaagaatattga

SEQ ID NO: 313132 - DNA, 534 bp, Proteus mirabilis
atgctgaaagataagcaaattgccaagactatacttttaattgctttttttaatatcagtctatttgcttattaccaactagcaccttttatgtttgataatcaaggttatagtgcaagtacttttggctatagtggtattgtattagcaataggtgtcggtattggttcttacattaataaagcattattaagccatcattggcaatgtgagaaattagtattacttgcgagtattattgcagtaattagtgctgtaggtgtttatttattgcgcaatcacattagttttattattccaatgatgacaagtgtcgttgcctatggcattgctattccaaatatcttagcaacggctttagcgcaatataaagatcgcttaggcacagcgggtgcactattaggtttattctactatttacttattggtggtggtttagcactggctggatggggacaaagtttagcgattaccttgctgatttgtagtataggtgctttgttactctctttctctcgccaaacagcaaaataa

SEQ ID NO: 313133 - DNA, 423 bp, Proteus mirabilis; identical to SEQ ID NO: 300734

SEQ ID NO: 313134 - DNA, 159 bp, Proteus mirabilis
atggctattatttgccatgttataaaaaaaacaacaacacaaagaattattaagtatattatttttttagatattctctacccattctctcccattgatcagtttgttaaagttgttgaatacactcgccaatttcctgaatcattgatcacggcataa

SEQ ID NO: 313135 - DNA, 945 bp, Proteus mirabilis
atgaaaaataataccgattttcgtttcatattagtgatgcgaaaaagtcgcctacaagaattaattgagcgttttaacacttggtcacaagccaaattctatttagaacataaccatgttgaggtaacagattatcttaatgaacataatctctataaaaaacaactcacagaagctgagcttattttaaaatcatttgggcgttttcagctcttggaaagaggattattgcctagttatcaattttcctctcatgatattgtagtggtaataggtcaagatggcctcgtcgctaatactctgaaatatcttaatcaacaacccgttattgctatcaatccagatccttcaagatgggatggtaagctcttgccctttgaaatagggcaattgaaagagattataattaatacaataaatcacaaaatgccttttaattcggtcacttttgcacaagcaaaaaccaatgatggtcaatcactgttagcggttaatgacttatttattggccctaaaagccacacttccgcacgttatatcttacaatggggagactctcaagaagtgcaatcctcatcaggcattattgtatcaacgggacttggctctacagggtggtttcaatctattcttgctggagccatggccatcaccggaaaagcatcacaccctcttttacaagggtttagctggagtgataaaaaattacaatttagtgtaagagagccatttcctagtagaacaacaggcaccgctttaacttttggcacgattgagccggactctccattgcaattaggatctttaatgcccgaaaatggtgttattttctcagacggcattgaagaggattatttacattttaatgctggctgtattgtgcaaatcaatatcgcagatagacaagggcaactcatcgcccctaaggggcgtcagcctatttaa

SEQ ID NO: 313136 - DNA, 450 bp, Proteus mirabilis
gtgacagatgatatctgtctccataaatccaatctcaacagtattttcaaagtgctctccgaaatcgtgacaacaggtaaacgctatcgcatcaaaatcaccgagtggcgtgatttaagaaccataccaatgaataaaacatggcgtatgtggatggaaaccacaggcgagtggttacgtgcacgtggcgttgttatcgatattaaaaatggcttcggtgaaatcgttttatcaaagcccattactaatgaagaaaagcatgaatatttcgttggacattggttagggcgcaatgaaaacggtgagcgtgaaaaaaccagcaagatggataaggaaaggatgctttacatgatggagaaacatgaacaatggtgcattgagaaggtaattccgatcatcattcctagcaattctgaatatatgaatttgaaaagaaatcaagaggaataa

SEQ ID NO: 313137 - DNA, 336 bp, Proteus mirabilis; identical to SEQ ID NO: 294439

SEQ ID NO: 313138 - DNA, 714 bp, Proteus mirabilis
atgaataatcaatcaaaaaaatatgacagaacatatcactatcctttttcaccaggcacaacaagcgatgatcgtattaatgccaattggtggcaagatatctgcaaaataaagcatcttattcatactgaaaaattagatggtgaaaataattgcttaaatcgaatgggggtttttgctcgctctcatgcgactccgacacaatctgcgtggacagtacaactacgccagcgttggcaatccatcaaaaatgatttaggtaatttagatatttttggtgaaaatctttatgccattcattctattgaataccaacatttggaagagtatttctatgtttttgccatacgttgtcaggataaatggctaagttgggaagaagtgcaattttatgccactttatttgatttacccaccgtaccggaaatctcgctaccaaaatcggaaaataaaatagagtttgaaaagaatattgttttacacgcacaaaagcatagctcttttcaatcacgagatgtgttaaccaagaaaccaagtgcgatggaaggcattgtcacacgagatgctcaagcattttcattagatgaattttcacatcgggtgtttaaatatgtgagaaaagatcatgttaaaacagatgtgcattggaaacgtaattggaaaagagcgccactaatttgggaaaaaacacaggagtctcatgatgcttcataa

SEQ ID NO: 313139 - DNA, 1134 bp, Proteus mirabilis
atgcttcataaaaaattacatagcgaaatgtcatgggaacaacttggtgagtactatgatgaaattagtgatatgtccggtgttcgacaagatccgatccaccatgctgaaggtgatgtagctattcatacacagcaggtgatccacgctataaaatcactccctgaataccaagagctgtcagaaagagagcaacaaattctatggattgcagcacttttacatgatgtagaaaaacgttcaactacccgtgaagagaatgggcgaattatttcgccaggccatgctcgtaaaggagaattaacgacaagacgttttttatatgaaaaagtgccggttagctttattgatagagaacagattgcggcattagtacgctatcacggattacctttatggttaatggataagcccgatcctaaaaaagccttattagcggcttcgttaagagtagattgctatttattggcattgctggctaaggcggatgttctgggacgaagctgtgaagataagcccgctttattggataaaatagcgttatttacactttactgtgaagaattaaattgttggagaacacccgcacgatttatttctgatggcgctcgatttcactattttcatagtgaaaatagtgtcgatcctcactatgaaccttatcctgagcaaggaagtgaagttattgtgctttgtggactaccgggaatgggcaaagatagttatattcgccaatattgtgcagatatgcctgtagtaagtttagatgtattacgtcagcagcataatataaaaccagatgatcgtgatgcgaatggatggattgcacaacttgccaaagagcaagcgagaatatatttaagagagcataagccttttgtttggaatgcaacaaatattactaaacaaatgcgtaatcaacttattgctctgttttatcgttatcaagctaaagtgacattggtatatattgaagtcccttatttgcaatggaaaaaacaaaacagcgcaagaaaggaagcggttcccgataaagtgatggaaagaatgttgagcaaactggaagtcccaacaccagaagaagcgcttaatgtgatttattgggttgatggggaagctcaaaatttgatttaa

SEQ ID NO: 313140 - DNA, 225 bp, Proteus mirabilis
ttgttattatcaggtaaagagtaccagctattatatgagctgatgcgcaatacagataatgtagtacgtaaatctgatttagaacaacgcttatttggcttagatgacaaaattgaaagtaactcacttgaagttcatatgcacaacttacgtcgtaaaataggcaaagagcgtattattacggttcgcggtatcggttatctcttaaaaaaagaagtgaactaa

SEQ ID NO: 313141 - DNA, 951 bp, Proteus mirabilis; identical to SEQ ID NO: 86446

SEQ ID NO: 313142 - DNA, 477 bp, Proteus mirabilis
atggcgggttattcaaccaaaattaaacatcctcaagaattaaaacccggtgatacaatagcactgcccaatgatccaaccaacttggggcgcgcattattattgctacaaaaagagaaactgatcaccttaaaccctgacagtggcctattacccacaacactcgatattattgataatccacttaaattaaatattatgcaattagaaggtgcgcaactaccacgagtattaaacgatccccaagtaacagttgcgataattagcacaacttatatccaacaaattaatttatcaccaaccaaagacagtatttttattgaagataaaagttcaccttatactaatattattgttacaagagaagataataaagaagcagagaatgtacgcgattttattagagcctaccagtcacccgaagtggcaacagccgctgagactatttttaaaggtggtgctattcaagggtggtaa

SEQ ID NO: 313143 - DNA, 390 bp, Proteus mirabilis
  misc_feature (327)..(336): n is a, c, g, or t
atgccattacatttttctggtaggatttttgcgtctcttttattagctgggacactattaacaggttgcgataacaatgataacaaccgttatgcaattaaagtgggggtgattaatggtgcagagcaagatgtggcagaagtcgctaaaaaagtggctaaagaaaaatatggtttagaggttgagctggtgggttttagtggctcattgttacctaacgatcccactgcaaacaaagaattagatgccaatgtgttccaacatcgccctttccttgagcaagataatcgttctcgtggttataacctcgtcgcggtaggcaatacnnnnnnnnnnttgtttttcctatggcgggttattcaaccaaaattaaacatcctcaagaattaa

SEQ ID NO: 313144 - DNA, 624 bp, Proteus mirabilis; identical to SEQ ID NO: 296788

SEQ ID NO: 313145 - DNA, 156 bp, Proteus mirabilis; identical to SEQ ID NO: 301425

SEQ ID NO: 313146 - DNA, 207 bp, Proteus mirabilis; identical to SEQ ID NO: 300770

SEQ ID NO: 313147 - DNA, 765 bp, Proteus mirabilis; identical to SEQ ID NO: 309813

SEQ ID NO: 313148 - DNA, 1182 bp, Proteus mirabilis; identical to SEQ ID NO: 312155

SEQ ID NO: 313149 - DNA, 786 bp, Proteus mirabilis; identical to SEQ ID NO: 312156

SEQ ID NO: 313150 - DNA, 1224 bp, Proteus mirabilis
  misc_feature (1208)..(1217): n is a, c, g, or t
atggcactttggggtggacgttttagtcagcaagctgatcaacggtttaaacaattcaatgattcactgcggtttgactatcgactcgcacaacaagatatctttggttcagtagcttggtctaaagcgttagtcacagtaggtgtcttatcgcaggatgaacaagctcaacttgaacaggcactttatgagctgtctgaggaagtaacagctaatccccattctattttacaaagtgatgcggaagatattcatagttgggtagagagcaaactgattgccaaagtgggtgatttaggtaagaagttgcacactggacgtagccgtaatgatcaggtcgcgacagatttaaaattgtggtgtaaagaagaagtcgcccacttacgtcaggctattattgaattacaaaaggcgttagtggtaaccgctgagcaaaatcaacatgctgtgatgcccggttatactcatttacaacgtgctcaacccgtcacttttgcgcattggtgtttagcttataaagagatgttagcaagagatgagagtcgtttagcggatgcattaacgcgtttagatgtaagtccactgggtagtggcgctttggcgggtaccgcttatgatattgatcgtgaacaattagcccaatggttgggttttgccagtgcaacaaacaatagtttagatagcgtatcagatagagatcatgtgttagagctattatctgcggccgctattggtatggtgcatctttctcgttttgctgaagatttgattttctttaatagtggggaagcaggttttattgagctttcagataaagtcacttctggctcttcattaatgccacagaagaaaaatcctgatgcattagaacttattcgtggtaagtgcgggcgtgtacaaggggcattaaccgcaatgatgatgactctaaaagggttgcctcttgcttataataaagatatgcaagaagacaaagaagggctgtttgatgccgttgatacttggtctgattgtttgcatatggcaacattagtgcttgatgggttgcaggttcgccgtcctcgttgtgaagaggccgcaaaacaaggttatgccaatgcgacagagcttgctgattatttagtcgcaaaaggggtgccatttcgccaagctcaccatattgtcggtgaagttgttgttagtgcaattgagcaaggtaaagcgcttgnnnnnnnnnncgcttga

SEQ ID NO: 313151 - DNA, 759 bp, Proteus mirabilis; identical to SEQ ID NO: 296415

SEQ ID NO: 313152 - DNA, 147 bp, Proteus mirabilis; identical to SEQ ID NO: 304244

SEQ ID NO: 313153 - DNA, 1752 bp, Proteus mirabilis
atgcctaaagcatggttttttaaagttatatggcgctttaaaaagtattactatcaaatcattcttgctacttttgttattaattttttggcacttgttagttcattatatgtcatgaatgtttatgacagagtaatacctaataagtcatatcaaacactctgggttttaagtatcggggtaattattgcaatattatttgaatttacagctaaaatgctccgaggccggttaactgatattgctggtaagaaagctgatttaattatcagttctgctttatttagaaaggtcacaaatcttaagttacaggaaaaacctatatcatctggctcctatgttaataatttacgagattttgaatctgtccgtgattttatgacgagcgcgagtttattaacattagttgatatgccttttttaattttatttgtatctgtaattgcgcttgttggaggctatttagcttttgtgccacttacgataattccattggttattattgtcggacttttagctcagatccctttatccaaatatattaatgaatcgatgaaggaatcatctcaaaggcaaggattagctgtagaagcgattgaaggcatagaaacattaaaaacgaataatgccatgaattgggcgcaaaagcgttgggattattacacagcaaaaacagcatcttcatcaatgaaagttaaaaacatcagtaattttgttatttattttgcagtaatgatgcaacagttaaatacgatatttttagttattattggtacttatttgattcatagcgatgatcctgcaagtaaaattacaatgggggcgttaatcgcaacggttattttatctggtagagcgttatcaccattaggacagattgcgggtttagccgtgcgctttcaacaggcttgggtcgcattaaaaggtgttaatggcattgttgagcgaccatcagaacgtgaaccatctaggaaatatattacgttaaaacaaataaatggaaatataaaattccaaaatgtttcatttgcttataaccaagatagtagcagtgtagtgaaaaatttatcatttgaaataaagccaggtgaaaaagttggaatacttgggcgtattggcagtggtaaatcaacgactttaaaattagcagctgggttatatcctgcagagcaagggagtatcacactagatgatgtcgatattcgccaaatagatcctcattatttgcgtaatcaggttttgttattagaacaagagccaaggttatttttaggtagtttaagagaaaatcttgatttagcccgtatggatggcttctctagtgatcaagatttgattgtggcactgaagcggtttggtttggataaagttattaaaaagcatcctaggggattagatatgtccttgggagaaaatgggttaggtctttctggtggacaaaaacaaattgttgctttggctagaatgacgttgagaaatcccaaaattgttttacttgatgaaccaacaacggggcttgatcaatattcagaaattcaggcattaaatgccatttcagcatggtgtcgctcaaagacattattggttgttactcatcgacctcaggtactgagtattgtcaatcgaataattgttgttgataacggtaaagttgtgatggatggtcccagagatgcggttttacagcagttagctaaaaatgaaacagaaaaacaaataactgctcactcaaaaaccaaaatagataagtaa

SEQ ID NO: 313154 - DNA, 960 bp, Proteus mirabilis
gtgtataagagacagacaatcttctttttttctgctgacgtctttgcagcttgtattcagaatcctaatttaaaaaatattcaggctcggatccccaataaaacctattcaattcaatatgatgatatagggacaagagtattagatgagtttcagattaattatgccaatgggcctataacaactttttcaggtaacgatgggcggtgtgggaacgcatcaatcactgccaattatactaatggctggttgcctaatgccaataaaatagcacagaccaatattgcgggtattgggatacaggttaaatttgctggaataggtgcattaaatacaacgtatttgaccccaaaggacccaagtggcaattcttatcgacttcttaccccttattggacagtcaaaattataaaaacaggcagagtaacgcaatcaggaagccttcaatggggcaagattgctcaagcagtacaaaataatacacaacctaaaaacacaacttggaacttaacttcactttatttgcctcttaatgcaataaagataaattcattaaaatgtactacaaaatcatcaaattataatattaatatggggacttggtatgatactcaatttaaaaatattggtgatgtcagtaaaagtgtagatgttcctattacattaaactgtgcggctggcactaacattaaagcggcagtgacaagtagtgctggatatatagatgcaaatacagggaaattaaacctatcgggcactaatcgagccactggtgttgccattcagttattagataaaaacaataacccgataaaactaaatacaaaaaatagtctacaaaatggggtctcctccggtgattatatatttggttggaaagcaagatatataaaaacaggtaataaaataacgcctggtagtgctaactcaacagcaacagtaaatatcttatatgagtga

SEQ ID NO: 313155 - DNA, 1716 bp, Proteus mirabilis
atgaacataaaaaataaaatttactgtatcattggaattatcattttttatagcttctttttgccaactcaagcggcagaaggaaaggttatttatacacatcaggttaaaaaacctgatgtttttgttgcggtaaatacacatattgaacagtttttcctagtgctatcagataaattaaataaaccttttattctaagcagcgcagtaaaaaaagagcggatcagtggaaaatttgatatttcttcacctgaagacgcctttgaattaatggtaaaacgtttgtcattactttattttaatgacggagaatctatttatatttatcgcgataatgagatacagcaacagctatttcaagtgaaaaatatcagcttgagtaaactgaaagagtatctacaagatgttggattatatgatctccgctacccattacgtgcaggtcacgatcagcgtactttttatctctcaggtcctcctatttatattagcctagttaaggctgctgctgagcttttggataatgatgtacaagaacaaattaatgaaaatatcaataatcaagttccaaccggaagctctcgttatggcgatgagtttgtgcagatatttccattaaaaaacacttttgtacaagatagaacctatatattacgtgatgaaaaagtggttttaccaggtataacaacggttttgcaacagctatttatgccatcgggagagaaagaaaaaacagtcagaagagcgcgtgagattatcgaagataatgataaatatcaggatgataaaattaccaacgatatacaagatactcattcaccgattatcactcaaatgggcaaatataatgttgaactcgttcctttacctggatcaaatagcctgttggttaaaacgagtcgagaaggtttagctttagttagctcacttatttcacaattagataaaccgaaaagacaagttgaattgtcattatggataattgatatttctaaaagtaaagccgatagtttgggggtgaattggcaggggagttatggctcgggtaaaaatacatttttctttaataccgctagcttaagtgctgtatctggttttagttttttaagtaaaatcaaagcactcagtgaggaaggggaagctaaaatggtttctcgtcctattttgttaactcaagaaaatacccccgccatatttgataataacaccaccttttatacacaaattaaaggtgagcgagttgcttcattagaatctacaacattcggcactatgatcagtgtgttgcctcgtattagtaatactaaccaagagattgagatgattatcaatcttgaagatggcgccgagaaaaaaagtgatgatgaagatagagaagaagggattgaaaaattacctgttattaatcgcacaaatatcagcaccgtggcccgagtttctgaaggcggtagtttattaattggtggatatacacgagaagataacataaaagcagaaaacaaaattccttttttaagtgctatacctttagttggccgagcatttagctatcagtcagataataataaaaaaatggtgcgtatttttatgttacaaccgcgtttattagataaaactgatacgcacggattggactctttaactgaacacccatttttaccgatggataaaaaaacatctcaagcgctaaaacaaattcaggcatttatgaggtga

SEQ ID NO: 313156 - DNA, 354 bp, Proteus mirabilis
gtgacaataagacacagtgaaagttactggcttatattacatctgattagttatttggatgagaaaaaaagcaatattgcacaaataggtgaacgatatggtgtatcagggacacattttagacggctgtgtaaacgttatttaggtaattgtggtaaaagtcaattacgttcatggcgtgcggcatcttctattttgacaacgctatcaacagatgaatcattgactcaaattgcagtcgataatggttttagttcagcatctcatttttctaatgaaattaagacattatttggtattacaccaactgaatttcggcgaattggccaatatctttatgaacataaaaaataa

SEQ ID NO: 313157 - DNA, 711 bp, Proteus mirabilis
atgaaagtatacattttgtgtgtccacatgtttgtatacataacgtataatgctggtatgaaaatgaaatggtacgaactagccaaatccttaatgaaggaaaaaggcattacttatgatgatttagctgagcgcttttcggtttcgaaaggtgcagttggtcattggatgaccggcaaaagagagccatccctgcatgatatagcgggaatactggcgtttgttggcgtgaataatgcagttattaattcagatggttcgattagcatcgaaaaagaagatattaatcatcaaccaccaatttaccagtaccctctattcacaaaagtacaggctggtgctttctcaacagaatttaactcatatactcagaaagatgctgtgtcgtggataccgacagctaagaaagccggtgagcgtgctttttggttagaggttgaaggccaatcaatgacagcaccaccaggaggtaagccaagttttcctgaaggaatgcttatcttggttgatcctgatgaagaagtggaattcggagatttctgtgtcgctcgtttgctaaatgatgaattcacattcaaacgattgattagagaaggtggaatatcatatttagagccgttaaacccacgctatgacctgatccctattaacggtaactgcacaatcataggcaaggtaatcaagtcacaatggcctgacgacacgttttag

SEQ ID NO: 313158 - DNA, 270 bp, Proteus mirabilis; identical to SEQ ID NO: 304115

SEQ ID NO: 313159 - DNA, 642 bp, Proteus mirabilis
atgcgttattatcaaaggctaataaagtcattatttattattaatatcttatttcattcgtcacagggggcggcaacacaacctaatcaagagcagcttaataaagagaaggtcgctcaattaggtcaacaactgtatcatcatttacagcaacagcagtggtatcaagcggaaaaactattagttaattatcagcaattaccattacacgaaactttattagtctattatgctcaagcactattagcacagaagaatggtaatttcttacaagctgaattttattatcagcagcaacttaagcagcaagcagattttattccggcacaaactggcctaattcagctctacttttctcaaggagaatataaaaaagcacaataccagctaaatcaattaagtcgtttatcgggattatcacctaccattaatcaagcaattatctattatcagaaacagcttaacgattattttaaagctaggcgtttttatcaaatcagttttttttatgatgataatattaatcatgcaccttatcttgatgagcaaattgtttcgcaatcaacgcaagtcatcatgaccagaaaaggcgctcaacctatagcatcgatgggggttagtctgtctcttatacacatctga

SEQ ID NO: 313160 - DNA, 276 bp, Proteus mirabilis
atggaaatatggtttaaggagtttgagtcacacgggcgtcagattctaatcaagaaagctcatgacgcagatgagcaaaaagtcggagtacagtattgctggcctgagaagattttcgatgtcgactttggattatggatagattacgacgacgatgacgaggaaagctttgataaagcggaagaagcacgcaacaagctattcgacaccatcgatcaggaagcagtagataccacagtgagtaacttaattcaaaaactcaagcttgatgattag

SEQ ID NO: 313161 - DNA, 1050 bp, Proteus mirabilis; identical to SEQ ID NO: 304678

SEQ ID NO: 313162 - DNA, 183 bp, Proteus mirabilis
atgggcagcgcttttctctgtgcgcagttaagcgttgagggagaggtgaatcatgaaagttatcttgacagctggctgcgggtactgaaagcggacaaaaaagcgttgttccgggcagccgggcaggcccgtcaggcctgtgagtttttactgaatacggccgcctcccgacaggccgcgtag

SEQ ID NO: 313163 - DNA, 741 bp, Proteus mirabilis; identical to SEQ ID NO: 312451

SEQ ID NO: 313164 - DNA, 507 bp, Proteus mirabilis; identical to SEQ ID NO: 311352

SEQ ID NO: 313165 - DNA, 753 bp, Proteus mirabilis
gtgagtaaaaagaaaattgttatttctttagccataatcgctggattgagtacaccgacagcctttgcgggagaatggtcaatagggggttctgtattatcacaagtaacaccttataagggtgctaaatctaaagactacttattacctgtacctttggttaattatcaatctgaaaatttctattttgcgacattagccgcaggatattatttatggaattcaccgaaagatcagctgtctgtcgatgttcactattacccacaagcatttaaaccaagtgactctgatgatgagcagatgaaaaaacttaatcgtcgccgtgataccgtcatgggtggatttacctataaacatcatgagtcatggggaagtttacgagggattatttctggtgatcttttaggtaaaagtaatggcattattgctgatgctgcttacctttatccttttgaactaggcaattggtcacttcaaccgggaattggtgctgtttgggaaaataaaaagcagaatcgttacgcatatgggattagtcagggagaatctcagcgtagtggtttagctgaatatcgaccaaatgatagctggagaccttatgttgaaatctcagctaactataagtttgctgaaaactgggatttcttcgcgatgggacgagtggatcgcttacccagcgaagttaaagatagcccgatggtaaataaatcggtaacggctattttatggacaggtgtcacttatactttctaa

SEQ ID NO: 313166 - DNA, 459 bp, Proteus mirabilis
atgactcatgatcacaaactaaaagttgaagctatcaaacgtgggactgttattgatcatattccggcgcaggtgggctttaagatcctatctctatttcgtttaaccgaaacagacgaaagaataacggtaggttttaatcttccttctgaaaacctaggtaaaaaagatttaatcaaaattgaaaatgtctttttaaccgcagagcaggcaaatcgcttagcaatgtatgcccctcaagcgacggttaatattattgatgactaccaagtcgtcaataaaatggcactaagtttacctgaattactcgaagatgttgtaccctgccctaatagcaactgtattagccataatgagccggtacaaagtagctttcgcgtgaaaaaattcgcgtctgacgtggtattaacctgcaaatattgcgaaaaagaatttgagcgccacgccgttattcgttga

SEQ ID NO: 313167 - DNA, 372 bp, Proteus mirabilis
  misc_feature (349)..(358): n is a, c, g, or t
atggaaaatattcaatcaaaaaaagaaagaatcatgcagttagtgatggtttatacaccttggatcactgtgatatgtgttgttgcgtttattggtatagcgactgcagattgggatcgctggtggagtgatgctcgttatcaaacaacagataacgcttacataaaagcggactcaacgatattgaaatcacgaatgactgggtttatttctcagattaataaagaggattaccaagtagtaaaacgtggtgaggtcattgctgaaattaataagaaagaacaaatattaaatcggcaagcggcattagcagagtatcaaaaagcccaattagctttagataatctcnnnnnnnnnnggaataagtgctga

SEQ ID NO: 313168 - DNA, 597 bp, Proteus mirabilis
gtgtggattttacattatatgaccgcctctgcctttataggattaatgggagaagttcctctcgccgcacaaacactctatttccaactatcattattcttaatgttatttggcattgcgattagcattggtaatgaaatattagtcggtcatttagttggtgcaaaacgatttgatgatgcatttacacggggttttaaaagcctaaaagcaggtgtgctatttactattggcgtggtgattatttattggtttatgcgtgatcctattttgtattctatcaccgaagatcaacgcattatcgaccaactgttgcctttatttattttatcggtctttttggagcctgggcgtacatttaatattgttatggttaatgcgttacgtgcagccggagatgccaaattcccactcattacagccgtttgttttatgtggggagttgctattcctattggctatttccttggtataaaaatggaaatgggtttaattgggatttggataggttttctttgcgatgagtggctacgaggcttaacaaatgcatggcgttggcgctctcgtaaatggcaagctaagcgcttagatatttga

SEQ ID NO: 313169 - DNA, 1200 bp, Proteus mirabilis
atggttatgcgcgcattaggggaaatggcagtccatcatccagtggcgggttctttttcacaatatgctagccattatatgggaccattagccggatttttaactggctggaactacgtttttgaaatgcttatcgtttgtcttgcagacgtaaccgcatttggtttttatatgaaactttggtttcccgatgtcgaccaatggatatgggtattaggcatagtctgttttattggtgccttaaatttatgtcatgtgaagatatttggtgaaatggaattttggctctctatcgttaaagtgactgcgattattgccatgattatcggtggtgttgccataatgatctacggctttggtcagcaaacagaacatccaattggtatttctaacctatgggagtttggtggctttatgccaaatggtatagaaggcattattgcctcactcgccattgtgatgtttgcatttgggggtattgaggttattggtattaccgccagtgaagctaaagatccagaaaaaacgatccctaaagctatcaatgcggtgccatttcgtatcttactattctatgtactgaccatttttattttaatgtgcatcttcccatggcaacaaattggccataacggtagtccatttgtacaaattttttccaatctgggtatcaattcagccgctaacattcttaatcttgtggtgatcaccgccgctatctctgccataaacagtgatattttcggtgctggtcgcatgatgtacggcatggcacaagaagggcaagcacctaaatcctttatgaaactgacgcgtaacggtgtgccttggatgaccgtattagtgatgtcagtggtgctattattaggggttgtgcttaactatcttattccagaaaaaatcttcgtacttattgcctctatcgcgacatttgccactgtatgggtctggttgatgatcttactttctcaagtggctatgcgtcgccaaatgagtgctgaagaggcgaaaaaactaaaattccctgtaccattttggccaatagcacccgccattaccattatttttatggcatttgtgatagcaattttaggctactttgaatcaacccgaatggcattaatcgttgggttagtatgggtggctattttaactgttggttactatattggtatcaaaccaagaataacgcagaaataa

SEQ ID NO: 313170 - DNA, 705 bp, Proteus mirabilis; identical to SEQ ID NO: 307870

SEQ ID NO: 313171 - DNA, 1203 bp, Proteus mirabilis
atgtcagagaatataagtcagcccccattactgagtaagggcatgaaagcagtattattatcacagtttctttctgcatttgcggataatgctttgttatttgccatactcgctcaatttaaatcagcactttatccagaatggagccagcctattttacaaatggtgtttgtgctggcttatattctcttagctccttttgttggacaagttgccgatcgccagcctaaaggtagggtgatgcttactggtaatgcgttaaaatttgccggtgcttttcttatttgtattggaaccgatccattcttaggttatgccttagtggggatcggcgccgccatttattcgcctgctaaatatggtattttaggtgagttaaccgatggcgagcgtttagtcaaagcaaatggcttaatggaagcatcaactattgcggcaattttattaggctctgtgattggtgggcttctttccgattggagcattatcttagcattagctgtctgtgcgacaatgtatgctttggctgtattggttaactttagcattcccaagttatcacctgctcaaataggtcgaggctggaatattaaaaaaatattcaatcaattcttagctgcttgtggctctttatggcgagataaagagagccgtttttctctggtaggaacaagtatgttttggggggccggcgtcacattgcgttttctattagtgcaatgggtgcctatagctttgggaatgactgataatacaacaccaacaatattaaatgcgatggtggcgattggtatcgtgattggcgctggtttagccgctaagtttgtcacattaaaaacggtccgtcgttgtatgcctgccggggttttaattggcttaggtgttgtttacttctcattacaaaccaccattattccagcctattttatcttagttgttattggcatttttggtggcttctttgttgtaccattaaatgctttgctacaagataaaggaaagcatagtgtgggagcggggaatgccattgctgtacaaaatttaggtgagaataccgcaatgttactgatgctaggtttgttctcactagtcaccagtatgggtatttccgttattacaattggtattggctttggtgctatctttgcgctagcaattggtggattatggttgtgggattgcacaagaaagagagctgaataa

SEQ ID NO: 313172 - DNA, 255 bp, Proteus mirabilis; identical to SEQ ID NO: 298089

SEQ ID NO: 313173 - DNA, 1422 bp, Proteus mirabilis
atggcacagatttatgaacgcaatctgggggcggtttcacagattgtggatgagaattttgtggcgttgtggcagcaggggcaggctgaccgtctggctcaggaagtgaaaaaacgggttgagcaggatacgtcggtcagtaatgacacgcagttttatgtcagttatgttaatgcctatattgaagcgaaaaccagaagtgctctggttaatgaaaccatcaaagagaaaaccggttctcagattacgaccaactatcagggtgtggccctgtccccggtactgagtgccggccacagtgataaagcgatgctgtggtcggatgcggtcacggacagcgagcagaagaaacaattatcccgtttacacctgaataccgcggccctgaagggcgttgccggttatcaggaagagctggccaaaatcgccctgatcacctctgcggacgggaaaaagaatctgtatcaggcttatcagaaaaatgcccggcagcaaattgagcaggggctcaccggggtgacagaggccgggaagcagatcctgtcagagctgtatctggataacattgatgaaggcacctttaatcagatggtcagcggtattttcacccgctatgagaatcagctgaactacctgatccagctggataaggtcaacagtttatcgccggacagcccggattatgccaaagagttacagcaactgctggtactggaaagccgtccccgggataacaccgtcgggctgaataccaacccggaggcgctgaaacaaaaagtggatcagtaccttcaggacaatgcgctcagtcacacacaggccatgtcgtcacaggccacacagctgaaacagcagttatcggcggaaaaagccgtcaccgatcaggcactgaagcaggcagaaacgcaactctcccggctggaaaaggatctctccgcgctggatacaaagttgtctgatttgcgtccgacgcaatccgagctggaaaacatccgggatctggagaaggtgaaagccgaactggcgcagaaacaggcggaatatcaggcggcggataaagccctgaatgaggcgcagagtacgctgagtcagggtaaacaggctgttgcggtcggggataagagtctggcgctgggcgaaaaatccgtggcactgagtgtggatgcccgggcgctggcgaaaaacagtgtggcactgggggacggcagcctggctgaccgggataacagcgtgtccgtcggccgtgaaggtcaggaacgttttctgacgcatgtggcggccggcattgcaaaaacggatgcggtcaacaaagggcaactggatgaggagcgggatgcgcgtattgccggcgataagcagacgctgaaacaggccatggactacaccgatgtgagcattcagtacagtgaggcgagaagataa

SEQ ID NO: 313174 - DNA, 258 bp, Proteus mirabilis
gtgagattagaaatcactggtgaagtagatgcgcagtcaggttggctaattgattttgctgatgtgaaagccgcatttaaaccgactcttgataggctcgaccactattatcttaatgacattgaagggttagaaaatccaaccagcgaagtactggcaaaatggatttggcaacaagttaaaccatcactccccctgttatccgccgtgatggttaaagagacatgtaccgcaggatgtatttatcgtggtgagtaa

SEQ ID NO: 313175 - DNA, 672 bp, Proteus mirabilis
atgcaataccccattaatgaagtgtttcaaaccttgcaaggtgaaggtgtttttactggcgttcctgcgctttttgttcgattacagggatgccctgtaggatgtagttggtgtgataccaaacatacttgggaaaaagaagagagcaagaaagtccctcttggagatattcccattaaaacacaagaaagtgatacttggggtatagccactgtcgaagatattttatcacttttccggcaacaacgttatagcgcaaagcatgtggtgataacgggaggtgaaccttgcctttatgacttacggccgttgacggaaggcttagaaaaagcaggttttgattgccaaatagaaaccagtggcacgcatgacatcctctgtagtgaagcaacatgggtaacactttcgccgaaagttggtatgcgaggtggattgagtgttttatctagtgcgattaatcgtgccaatgaaattaaacaccctgttgctcgtgaaaaagatatcgaagcactggatgatttactgcgattaagaactcaacaacctatggcgatcgttgccttacaaccaatcagttgtaaagagagtgcaacagcgttatgtattaaaacctgtattgagcgtaattggcgtttttcaatgcaaacacataaatatttaaatatcgcctag

SEQ ID NO: 313176 - DNA, 264 bp, Proteus mirabilis
atgttaaagggtaaaacgttaaaagaatatgtgtttaaagatcatggctcgttagtttcgctctctaaatttagtacggtagggagtttgatgggcaacttaatgaaaggcgatatgatgatagaagggcgtattgcacgtatcgtttatatttctttataccgtatgcatcaaatcgcgttacatggttatcttaaaacgggtttgatgatgttagttggatcaatcaatcgtgtgattagaccaaaactaaaacttcattag

SEQ ID NO: 313177 - DNA, 687 bp, Proteus mirabilis
atgcctattcgttatctaggtattgatatcggtcaggtggaaacgctaaccctttctgcggataaaaaagcggtgagtgtatcagcggtactctaccctgaatatgtgaaaacttttgcacgttcaggaagccgatttgcggtagtcacccctgagttaaccgcttcaggcctcgataatttagattctcttattcagccttatatcaaggcagagccaggcaatggtggcgtataccgcatatttgaattacaaacggcaaatattaccgactctcggtatctagacggccttaaccttgtattgaatgcgactgaagcaggatctgtgcaaattggcacacctatctattatcgtggtttagaagtaggtgcggtaaccggactagaattaggtaatatgtctgacagagtattgatccacattagaattagtcagaaatatcaatatctggtacgtaataacacagagttttggctttcatcaggttataacttctcatttggtttaactggtggagtattccgcagcggtacatttaagcagtttatacgtggtggcattacatttgctacaccgccatcaaccccactccaggctaaagcaaaacaagagcagaatttcattctcaatgctaaagagccaaaagagtggaatgaatggggtactgcgatacctaagccataa

SEQ ID NO: 313178 - DNA, 732 bp, Proteus mirabilis
atgaaaagctataccttaccttttgtatcttctgtagaaagagcagaagaaataaaaaataagattaatgaaatttataaaaaaagtggcgccaagcctctggttttctactctattattagtcctgacgtaaaacgaataataaatagtagtgaaggattctgtcaggatattgtgcagtcattagttctccccttagaaaaagaaattggcgttcaagcgctacctcaattaaataaaacgcacggtttaacagaaaaaaatctcagcaaatatgatgctcgaattgctgctattgaatacactttatctcatgatgatgggatctctttacgcaatctcgaccaagcgcaagtgatcttaatcggtgtctcacgctgcggtaaaacccctaccagtttatatttagcgatgcaatttggcattcaagcggctaattacccttttactgctgatgatatggattttttaaaattgcctcctgaattaaaagagtatcaacataaattgtttggcttaaccattgccccagaacgccttgctgctatccgtagcgaacgtcgtgaaaacagtcgttatgcatctattcgtcaatgtcgtattgaattagcggaagttgaagcgctatttaggaaaaataacattccttacctaaatacgacaaactactctgttgaagaaatttccactaaggtaattgattctatgggattagccagaagaatgttctag

SEQ ID NO: 313179 - DNA, 363 bp, Proteus mirabilis
atgagtaatctgacagctgaacaatttaaattgatctctaatgtaatgtatgaaccgttaagttatatccattcagactacgatgtattagcatcgccagaagaaaataccctatggcaaaaaatagctaatcgtcatttaattgggcaatatcaacttatactgcatattgattgtgagattgatactaccgtagaaaaaatatttactcattggcacactcttcctcgttgtgctttatttttaggttatttttattctcgtcatacgctattagcacaaaattattatcatttagaacctgcattaaaagcctttttagctctctatcctatgttaaatctgtctcttatacacatctga

SEQ ID NO: 313180 - DNA, 174 bp, Proteus mirabilis; identical to SEQ ID NO: 305843

SEQ ID NO: 313181 - DNA, 1242 bp, Proteus mirabilis
atgaaattgaagaaaaaaagaaacaaaccattaagaatcaatgatataaccattattgatgatagcaaacttaaaaaagccattactgcggcagcgttaggtaatgcaatggagtggtttgattttggtgtatatggcttcttggcttatgtattaggtcaagtgtttttccctggtgcatcacctggcgtacaaatgatcgcagcacttgcgacattctcagtcccattccttgttagaccattaggtggggttgtatttggtatgttgggggataagtttggacgacaaaaagtcttatctgtcaccatcataattatggcactaagtacttttgctatcggtcttattcctgggtatgacaccattggaatatgggcacccgtcttactgttattagcaaaactagcccaaggtttctcaattggtggtgagtactcaggtgcggcgattttcgttgccgaatattcaccagaccgtaaacggggctttatgggaagctggttagatttcggctctattgccggcttcgttatgggggcgggtgttgtagtccttatctcaactattatgggtgaagctgcattccatgagtggggatggcgtattccattcttcttggcattacctttaggtctgattggcttatatttacgtcatgccttagaagaaaccccggccttccaacaacatgttgatgaaatgaacagcgatgatcgtaaatctatcgaaaatccgccacgtgtttcattacgagaaatcgcttccaagtattggaaaagtttaacggtatgtgtgggcttagtgattgcgactaacgtcacctactacatgttgctaacctatatgccaagttatttatcccataacttaaattattccgccgatcatggggtcttgatcatcatcgcgattatgatagggatgctatttgttcagcctgtgattggattactgagtgataaaattggtcgtaaaccttttgttatcgggggtagcgttggactgtttatattggcatatccggcctttatgatgattaacagtgatgaaatcggcttaattttcttaggattattaattcttgcggttttattaaactgttttactggggtgatggcctctattttaccggctattttcccaacccatattcgttatagtgccttagctattgcatttaatatttcggtattaattgctggtgccacaccaactgcagcggcttggttacagaaataa

SEQ ID NO: 313182 - DNA, 462 bp, Proteus mirabilis
atgaagtattggaaattttacattgtcgttgtgatggtggggattgttgttggtggttgtgcgctgattaatgcacaaactaaaagaattaacatactgatagaaaagaacaaagaacttacagccacactcaaagagcaaaaggctatcaatactgattatcaagtacgtatagagcgactcaatcagcttgatataaggcacacacaggagcttgttaatgcaaagaatgaaattaatcgcttgcgtaatcttagcgagcgtaatcctgaacgggtgtacatcaaagccgagtgtcccaaaagcgctaccacttccaccgccagcatggatgatgcaaccaccgcccgacctactgacaccgctatccgaaattattggttactcagagagcgaatttcacaatcagagcaaatgatattaggactacaagattacattagagcggagtgtgttcaatga

SEQ ID NO: 313183 - DNA, 168 bp, Proteus mirabilis
atgctttactctaatgatgatgcccagccttatggattatcgacagccaatattgctaaggcattaagagtcgctccggagcaacaagaagggttgcaatttgtgcaaataaaacctgaagacgaaaaacaaccggcactttatcagctgtggtctcaacaatcttaa

SEQ ID NO: 313184 - DNA, 819 bp, Proteus mirabilis
ttgttagattaccaagattatccaattttagcagctaaacaaggtgctatgggtcgtcgtacactgggtattggtgtgatcaactttgcttattatctggctaaacacggtgttcgctactcagatggtagtgcaaacaacttaacacaccgtgcctttgaagctattcaatactatttattaaaagcatcaaatgaattagcaaaagagcaaggggcatgcccatggtttaatgaaaccacctatgcagaaggtatcttacctattgatacttataaaaaatcattagatgtactgactaatgaacctctgcattatgactgggaaagcttacgcaaagagatcaaacaatacggtttacgtaactcaacgctctctgcattgatgccatcagaaacatcatcacaaatatcaaatgcaaccaatggtatcgaaccacctcgtggttatatcagtattaaagcttctaaagatggcatcttacgtcaagtggttccagagtatgagcgcctaaaaggggcttatgaattactgtggcaaatgccaagtatcgaaggttatttgcagttagtcggtattatgcaaaagtttgtcgaccaagcgatttctgccaacactaactacgatcctactcgtttccctagtggtaaggttcctatgaaccagctgctaaaagatttgctgctcgcctataaatatggtgtaaaaacactctattatcacaatacccgtgatggtgcagaagatgtacaaggtgatctggaagaagtcgttgaaacggcagattcagattgtgaaggcggcgcgtgtaaaatttaa

SEQ ID NO: 313185 - DNA, 387 bp, Proteus mirabilis
atgtcttacgaaattaataccgaaaaagcccctgcagcaatcggcccttatgtacaaggtgttgatttaggtaatttagtgatcacatcaggcttggagagggcttggctgaattgtaaatctgagataaaagacaatgcggcagagcaagcacgtcaatctttagaaaacgtcaaagcaattattgaaaaagcaggtctaaccgttgctaatatcattaaaacgactgttttcgtaaaagatttaaatgatttcggtactattaatgcagcttatgaagctttctttaaagagcataatgcagcattcccagcacgctcttgtgttgaagttgctcgtttaccgaaagatgccaaagtagaaatcgaagttatcgcgatccgctaa

SEQ ID NO: 313186 - DNA, 381 bp, Proteus mirabilis
atggttcttatacttagctttttattgataacacagtcattacgagaatattgctattcaagtatttttatcattatcatcagtgggttattagtttggttatttgggcgtaacgctattcatgtcggtgcaagtgggtggatctttggattatggtcactgctaattgcccatgcttttactcgccataaaattatcgatatcgtcatcgccttatttgtgctgttttattacggctctatggcttatggattaatccccgggcaattaggggtttctacagaatcacatatcgcgggcgttatctctgggttgctttatgcttggtgtgcaagaaaaatcattcgtcggaaaagccgtgtagtagaaataataaaatga

SEQ ID NO: 313187 - DNA, 186 bp, Proteus mirabilis
atggatcttctctggctaaaaagaagaatttatattctcggtggtttaactatccttcttttcttattacaaattatagggagcctcttccctgtccatcttcttcaatatggtattattccaagaagcagcgaaggtttattcggtatctttatttcaccttttattcatggttcttatacttag

SEQ ID NO: 313188 - DNA, 321 bp, Proteus mirabilis
atgaaactaaaaagaatggtgttgtttatgttttccccttgttttttagctgtgagcgctgctaatgctgggaattgggaaaatacaattaaagaaagctcatttatttctgattctgaacttgagctgactaccattaatatgtggaaatacctaaaaacagaaaaccgttttgataaacaagagcaacgttatagaaaacaagttgctaatgcttgggggcaaaacttccaagctgatttcagatctggctatttaggtggcattcttggattcgatgtttcttattatggcggtaataaacaacaccacctagagtaa

SEQ ID NO: 313189 - DNA, 309 bp, Proteus mirabilis
atgaaaactatatttataaaagacttctcacgctttccaggaccaagatacaaatacttaggagagtttagtggtgaggaatttagagatgatatattaatcccagcaataaaaaataataatggcgatatagaaataaacttagatggagtcctcggttacgggtcatcatttttagaggaaactttcggaggattagttcgccatggcgttgataaagatttaatattgaagataagggatagaataatttcaagtgatgaatcaataaaacaagaagtcattagttatatagatgactccttgtaa

SEQ ID NO: 313190 - DNA, 915 bp, Proteus mirabilis
atggtcatttttgttgcagatatagagaaaaaggccagagaaatcggtatatcaacagatagaaaagtccacatttgctttagaaacactacggcaattacagcagctgcgggactttggttgttagctagaatagagtcgatacgagttatgtttcctcatgtcaaatatattgtaactaggccattaccagttaaagtagcttcttctcacgaaaaaaaacatgtcgttgacagtgttttgaatcgaataggcttttatgaagcggttgggctaaaaagcagaaaactgcaagaaatagctaacgtaaaatgctgggaggttctacgtggtgaagaggttatgagtagtgctgttggccagcttcttgaaaatgttacacaaaaattggaagttgattatagtggtttgtatcgccctctaatcgaggctatggctaattcagtagagcatgcatatagaagcgatttatataaaacaacaaagctatcaaacactaataaatggtggtgttttgcagcccttttagaaaacagattaactgttttaatctgcgacctaggtgtaggaataccaaacacactaaagaaaacacaaccatcaaatattatgcttaaattaattcaatacataggcaataatctgtcttcagacagcgattatattagagcatcattgcaagtaaaaaaaactcgaactaaactagcttataggggaaaaggtggcactgatttacagtcaataatagaagccgtcgaaggatcgagattaagtataatgtcaaacaaaggtaactaccggttcacaaataaagggaataaaaagaaacctgagctttgttgggatggtagtcaatcgatatcaggaacgatagtcgaatggagtataatattacccatatcaggagcccagtaa

SEQ ID NO: 313191 - DNA, 450 bp, Proteus mirabilis
atgatgaaaaagataaatatcctattcgttctgagtatgttggtgttgggttcatttgcatatgcaaatgaacaacgctacgcaagtattacacatacaagctcaaattttattaacagaggttattgtggttactcgtttactctcgataacggcggtaaccatatggttttagaccatgctgaatttggtgcgcttgagataaccttgagaatgaaggatgggcaaggaaaggtattaggggatacgatactggaagttgaaccttttggcgattctagcgcaacgcgtgccacgtttgcaggattggaaattccgtgtgaagatgttgctgaatttgaagtggttaaagcggtggaagatcagaatggacgcaaagtcgaattaccgctatcgatctttcaggccaataatccagagttggcgaagatgtcgatttcagggaagtag

SEQ ID NO: 313192 - DNA, 567 bp, Proteus mirabilis; identical to SEQ ID NO: 288296

SEQ ID NO: 313193 - DNA, 207 bp, Proteus mirabilis
atgacgttattaaccccactaacatcgtatcccacacattgccctcactgttcttctgagcaagacatcattgcatggggtacgggttggatgtgccgcgattgcaattttgaatggataacgccgattaaaaatcaaaacactatctccagtgagattaaggagagactgcaatttcactgtaaagaaacattcagccattcatga

SEQ ID NO: 313194 - DNA, 837 bp, Proteus mirabilis
atgagtttattagcgtctcgttttggctctgctaacagtattcgtcgtgagcgtccactaaccatcgaagagttattccgtactgtaccgagtgtattttctgaagaaaagcacgattctcgcagtgaacgttatacttacattcccaccattaccttgttagacagtctacaaaaagaaggcttttatccgttttttgcctgccaaactcgggtacgcgatgttagccgtcgagagcacacaaaacatatgttacgcctcagacggcatgaccaaattacgggtatacaagtacctgaaatcatcttacttaatagccatgatggctcaagcagctatcagatgttgccgggactctttagagccgtgtgctctaacggtttggtgtgcggtgatgtattgggtgaagtgcgtgtaccccataaagggaatgtggtgggtaaagtgattgaaggggcgtatgaggtactcaatacgtttgagcaggtcgctgaaaaacgcgaaagtatgcagtcattattgttaccgccgcctgcccagcacgcctttgctgaagcggctttgacctaccgctttggtgaagagttccagcccgtcacgcgagagcaaattctacagcctcgacgctttgaagataaaaaagaagacctttggacggtgtaccaacgtttacaagagaacttgattaaagggggattatcaggccgcactgctaaaggaaaacgtactcgcactcgttcagttaatggaattgatggcgatatcaaacttaataaagccctgtgggtgatggcggataccttatttaaccaactcgcccctcgccagcccaactaa

SEQ ID NO: 313195 - DNA, 426 bp, Proteus mirabilis
atgaataacacaactgaatccactattgcaatgacactcgtccccgatgagcgacgccttgatttttggctcaatcacttcggaagcgtgaaaggctggaccacctttgaagtggtgatttttactaccatgggccagttttgtgaggactactacggcgggtattgggaatattgcactttatccaatggtagcgcctttatttatcccgatttaaatcaagaggagcttacgctattcaacccacataacggcaatgaagccatcgtgagcccagaagcggcagggattgtagtgtgtctgatcctgtacagcatttggtcattccaaacagaaagcgaagtgatgtgcgaccgcttttatcagttgcgtgactacgcgttacaacattctgaatctgctgtcattttccacttaattgattaa

SEQ ID NO: 313196 - DNA, 2304 bp, Proteus mirabilis
atgaactttttgttaattaagcatgagcctcattttcagggaatgggggccgtttcattttcatctcatgcgatttttttattactcactacacttgcttcgtttaatagcgttgcttcacaaagcacagaaaaaacatcacaaactcaacaatctgaaactgtggtgcttgatcctatttatgtttccggaaaattaaattcgagtgttgaagcaggaagcacggctttgacattaaaagatatcaatagaattcagccaaataatatcgctgaattggtagataaattaccagggatttcttcatctggctcaccaagacctggcgggcaaactttaaatatttggggaatgggcaatccggaagatgtgaaaatcactcttgatggtacaccgaagacgtttgaaaaatatcgtcaaggttccatatttatcgatcctgaattaattaaacgccttgatgtcgataaagggccacataatatcacccaaggaaatggaggatttggtggctccgtacggattgaaacgaaagatccggatgacttactgttacctgatcagcatattggtatgtttttaaaatatggacatcatactaatgataggcaaaatcgttatagtggtgcgatatatggcaagctaatggatggaacggctgacggtctattttattttaatcgtcgtaaaagtgatgatttacgtcgtcctgatggcactaaatttggttattcacaatcagatcaagattcgtttttaattaaaaccaatgtctatttaacagacgcacaaacattaactttatcagcatcaagatctgtcagtgatggctggacgccttgggctgcgaagcgagatgaactggcaaaaccgagccaatatgatgttgataaatatggttttgatggagcgatgaaacgtaagttagtttatcgtgaccaaaaagatgacactgtgagtgtgaaatggaatattcagccaattgattctgacctgattaatttcacattgacttatggttattcaaataccaaacagaatgataaacgccctgataatgcgagttcttatctaagtagtagtatgggtaaccaaagttgggttaactataaaaatcatcaaattgaagtgaaaaatgaaagttccgtgatgcaaggagctaccgaacatgtgattttagtaggagcgcgttggcaccgtaatgatcgtaatgtgttaatgtttacgcgggataaagcgaaaaatccaaattataattatggctattatgcaccaccttatatgccagaagggacgcaaacaaccacgagtttttatcttcaagattcaattagttatcgaacactaaccctcacgcctggtgtgcgttatgatatagtgaaaaatcaaggagtagggagtcgagcgaaggtttatcaagatcctaatccctattacggtcatgattatagtgatgtaacttatcgtggcattacacctcatttgggtattttatggaaagcgagccccaatattagattttttggtgatataactcatacatggcgtgcgccgttaattgatgaacaatatgaagtgcaagccagtatctctagtttgacaggcacgagtcgccatttagataaagagaccgttaccgcaacacggattggcgccattgttgattttgaaaatgttttccaacaagaagatcagctgcaacttcgaagcacattttttgatactcgtgggaaagatgagatattccgtcgtcgcggtgtctattgtgaaagcggaaaagtaaccggaaacaatggaagttgtcctccttcccttggaaattatcgcaatttacctggctaccatattcaaggtatggaaatagaggcattttatgacagtactaatctctttggtcgcttagcgtattcgacaatgaaaggtaaacgcgatcaatctcctcgtgatccgtggtttggacaaaaaacatggattgcagaaattcaaccggatgcattacatgccacccttggaatgaaaatcccacaaataaatatggttgcagggtggacaggggactttattggcgctcaacgtcgttcaccgatggatgctgatccggctgctacttattggtcattaccaaaaagtaaaggctatgccattcatggactattcgctaattggaaacctgcttttatcgataataccgagatacgttttactgtcgccaatttatttaaccgtgattattacccttatttaggtgagtcggtatctggtactgggcgagattatcgctttactgtggttaaaagtttttag

SEQ ID NO: 313197 - DNA, 267 bp, Proteus mirabilis
atgtctataaaaaaacaagaaaaaaggcttgctaatcaagaggggatgccattaacgcgtcgtcattttgtacaagccagtgcagcattagtgagtatgccttttttcgcacaaaatgcacaggccaatcttgataaaagcctacctattgccaacattgatgagaaacctgctactgtcgtcgcaacatgtagcacctttgactgtggtggtaaatgtgataggggattgttacccgtattaccacaagaccagatgctgatttag

SEQ ID NO: 313198 - DNA, 585 bp, Proteus mirabilis
  misc_feature (572)..(581): n is a, c, g, or t
atggatatgaaaataacttctcgcctacttattatgatgtttgtgcaatatttcatgcaaggagcatggaatatgaccatgggactcgtattaagtagttatggtatggcaagtattatcggcaatgcttatgccttattaggtgtcgcgacaattatctcccccttatttattggtatggtcgcagatcgtttctttgcttcacaaaaagtcatggggatacttcatttaattaatgccgtcgttattctctgtgttccccaatttattgaagcacaaaacagtggcatgacattatttttaatttttattattggcttattgttttatccaaccactgcgctatctaatagcattagtttctcccatattaatggggttaaatatttcccaattattcgcgtatttggtacgtttggttttatggcaattggttttatattgggtgaaatgggcttctctggtagcacaatgacttggtatatcgcttctgcagttggtgtattactcggtttctattgttttacattacctaatacgccacctaaagcgaaaggccagcctttctcacnnnnnnnnnnttag

SEQ ID NO: 313199 - DNA, 1209 bp, Proteus mirabilis
atggcactaacagatgtgaaggtaagagcggcaaagcctgccgataaaggatacaaactcactgacggtgaaggaatgcacctttacgtgcattctaatggttctaaatactggcggttacaatatcgatttgacggaaaacaaaaaacattagcacttggcgtctaccctgaaatttctttagcggatgcaagacagcgtagagatgaagcaaaacgtcaaatagctaacaacattgatccttcggaacagaaaaagcttgagaagatagaacgtaaatcagcggttaataatacatttcaagctataacccttgaatggcacgagtataaaaagccaaactggtcgaaaggttatgctgaagatctgatggagtcatttgagaatgacatttttcctgatctaggtaaaaggccaattgctgaaattaagccactagaagtactcagtacgctgcgcaaacttgaaaaaagaggagtgttagacaagttacgtaagatccgccaagcatgtaaccaagtcttcagatatgcgattgtaacgggcaaagcggaatacaaccctgcctctgaactcgctagcgcattaacacctcccaaagcgcaacactatccacatttgcttgcaaacgaattacctgaatttcttaatgcattaaatcattattcaggtagcccaatcactcggctagcaactaaaattctgatgttaacaggcgtgagaactattgagctacgtttagctgaatggggtgagtttgatttcgaacgctgtatttgggagatccccaaagaaagaatgaaaatgcgccgcccacatcttgttccattatcgactcaagtcatcacggcattacgtgaagttcaagccattacaggacgctataagttggtattccccggtagaaatgatattaccaagccaatgagcgaagcgagtgttaatcaggtccttaaacgtattggttatcatggaaaagcaactggacatggttttaggcacacaatgagcactatcttgcatgagaagggattcaatacggcatggattgagcttcaacttgctcacgttgataagaatacgatccgtggtacgtataaccatgctcagtaccttgaaaacagaagagagatgatccagtggtatgcggactatattgatgagttggagtgtggggtagggaatgtggtgagtgtgaattttaagtga

SEQ ID NO: 313200 - DNA, 402 bp, Proteus mirabilis
atgagttttttatatgcaaattatctttcaaaacaaaaacatactgaaaataaatcaaaaaacaatagtagagttacaccacatatagtaggtgataaatactattgggggaaaaaatatgcttggagagaattcggactatttatatctaaagatgtctttcatgagtatatggacagcataggacatcctaaagtttcatgttcaactattgctgatggttaccctcaaggtcaagattctattgcataccaagaggacggtatagcagaagcaatgaaaaaactggtagattccgcagaaatagtaaaaaacggtccctattttaagtcccctttgtataaggacggtaaaaatagatttcaaataaaagaaactcaagctataactgacaaaaaatag

SEQ ID NO: 313201 - DNA, 624 bp, Proteus mirabilis
atgacccaatttaattaccaaaaagcacatttcattatcagtgcacctgatatccgccatttaccaccagatacaggaattgaaattgcctttgcgggtcgttctaatgcgggtaaatccagtgcattaaatgcactaacgcaacaaaatggattggcaagaaccagtaaaacacccggtcgtactcaacttatcaatctgtttcaaattgaggaaggacgacgtttagtcgatttacctggctacggatatgctcaagtccccgaagagatgaaacgcaaatggcaacgctctttaggtgaatacctgcaaaaaagagagtgcttaaaaggagttgttattttaatggatatccgtcatccattaaaagatctcgatatgcagatgattgattgggcggtggattcagagcttccgactctcgtcttactcactaaagcggataaattagcatcaggggcacgtaaaaagcagttaatggcggtacagaatgcactgtcagaaaaatcaggtgatatacgtgttgagtgtttttcttctttgaaaaaaataggcattgataaattacgtaataccttaaatgagtggtttactgatactaacgaaccagagatagaagcttaa

SEQ ID NO: 313202 - DNA, 366 bp, Proteus mirabilis
atgctgaatgagtatcaggctttatggcaaaccatacgggatgtccgcgatggaagaagtttaccggtagtattacctaatacaatgcgaaatattcttgagtactatttcagtttttcttgcaaacaggaaaaactggataaagcgctaaataagctagcagttgaatattcagcaggggaatatgactcattttatcgagcaattaaccgtcattcccattctgatggcagaaatatcatggctacaggagtgattaatgtagaaatgtatttccgtttatttcagaaaatttttgaagaaacgaaggattctgatcattacaacacgatgatggggattactgttgagcaaacagaaggttga

SEQ ID NO: 313203 - DNA, 189 bp, Proteus mirabilis
gtgatttctgagaacaatgcgtggtgtgtgaatttaattgatactattcaaggtaattcagcagaatatgagctctatgtatttgtgaagtattcttatcatatttcacttcatcctcaaaaatggggaattcaaatttatcataaaggtgttattacacacgcttcaagtcaaagaccgcaggtgtaa

SEQ ID NO: 313204 - DNA, 210 bp, Proteus mirabilis
gtggatgtcggttttccttgtgcggtattaatcacaacaattgggcatattggtatgatggattcgatgggaggaaaaacgattagagtaactctttgtgggcgaggtaatcgtattatccctcattccatgatagtttcaggacagatgtcaacaacctcactaggtaagcagtatttttatattgatgtgagggagtatggtgattaa

SEQ ID NO: 313205 - DNA, 243 bp, Proteus mirabilis
ttggctgcagagttggcaggtaaaggaattcgagtcaatgcggtggcaccgggtatgattgagtctgacatggtcaaaaaagtgtcacgccaagtcgtacgtcatattaaatcggttattccattacaacgattgggagcaagtgctgaagttgccaataccattgtatttttaagctccgaggcatccagctatattgttgggcaaacattaatcgttgatggtgggatggtgatgcgatga

SEQ ID NO: 313206 - DNA, 294 bp, Proteus mirabilis
  misc_feature (16)..(25): n is a, c, g, or t
atggagtcctttagcnnnnnnnnnnctttagcacaaggtggtgaaggcgtgtttgaccaacctattattcagaaactggcagaaaaataccaaaaaacaccggcacaaattgtgttacgttggcatttagatagtggcttggttgttattcctaaatcagttaccccttctcgtattgaagaaaacttccatatttttgatttcaaattagaaaaagaagaagttgctgaaataaaacaactagataaaggaaagcgattgggtcctgatcctgatacttttgttgatatctag

SEQ ID NO: 313207 - DNA, 306 bp, Proteus mirabilis
atgaggacatttgctataaaccagcataatgatctggtgattgatgctaaaggtgatctgcaaatttgtgataacgatgaagcagtaaaaaacctttgtcagcattttattaaagcggttcgtggtgagatgttgcataaaaaacaagttgatattcctttatttgaaatggcttttcgacaacgtctggctgaaatcgaggaagttgtggctatcagccattttaatgcctttttagataatggcgtactgaaatatcaggcggatatacgcacgatatatggaggatttacattacatggctga

SEQ ID NO: 313208 - DNA, 291 bp, Proteus mirabilis
  misc_feature (232)..(241): n is a, c, g, or t
atgaacagaaaactctctctatggttagcaattgcgttaatgatgtttccacaaattgcagaaaccatttatagcccagcacttactgatatttcaaatggttttagagtcagtgccaatgaagcagggcaaacactttcgctctacttttttgcttttgcactcggtgtcattatatggggtcgtttatgtgatgtcattggccggcgcccaacaatgttagcagggttannnnnnnnnngggttatttatttatgccattgcttgtattggtgtctttatgaccgataa

SEQ ID NO: 313209 - DNA, 345 bp, Proteus mirabilis
gtgttaactaatttattagaaaatgcagtcaaatataccgcatcacaaactaaattaggcataaaagctacggttgaagaggatcaaattcatgttgaagtttgggatgaaggcgcaggtattcccactgaacaattgcagcttatttttaataaattttcacgtgcagtaaaagagtccgccattccgggggttgggctgggtcttgctatttgcagtgctattatccacttacatgaaggtaaaatttgggctgaaaataataaaaaaggtggagccagttttcactttgttttacctttaaaatcactacctaatattgatgagattgaaataaaacagtga

SEQ ID NO: 313210 - DNA, 456 bp, Proteus mirabilis
  misc_feature (219)..(228): n is a, c, g, or t
atggttacttttcataccaattacggcgatatcgtgattaaaacatttgcagataaagcacctgcaaccgtagaaaattttttagattactgtaaagaagggttctacgataacactatcttccaccgtgttattaatggttttatgatccaaggtggtggttttgaacctggtatgaagcaaaaagaaactaaagccccggtaagaaacgaagcaaannnnnnnnnngatccacattctgcaacagcacaattctttatcaacgtagcagataacgacttcttaaacttccgtgcagaaaatgccaatggttggggatattgtgtatttgctgaagttgttgaaggcatggatgttgtagacaaaatcaaagccgtttctactggtcgcagtggtttccaccaagatgttcctcgtgaagatattatcattaacagtgttactgttagcgaataa

SEQ ID NO: 313211 - DNA, 387 bp, Proteus mirabilis
gtggacaaagttaagaatggcaatatcattttgcataccgatcgtaccttagatgaagtgttaggtgatgatatgggtgtcactaaagtgcgcttaaaagatacgaaaagtgataaaaccgaagagctagaggtcatgggcgtctttattgctattggtcatagccctaacacggcaatttttgaagatcaattagccttagataacggttacattaaagttcaatccggtacgcaaggcaatgctacccaaacatctattgaaggtgtttttgccgcaggtgatgtaatggatcatatttatcgtcaagccattacctcagctggtacaggttgtatggctgctttagatgcagaacgttacttagacgcactaaaatctaactaa

SEQ ID NO: 313212 - DNA, 195 bp, Proteus mirabilis
  misc_feature (129)..(138): n is a, c, g, or t
atggttattaaggctcaaagccccgcaggttttgcggaagagtacattgttgaaagtatttggaacaaccgttttccaccaggttctattctgcccgcagaacgtgagctttccgaattaattggtgtnnnnnnnnnngtcttaatattcttgaaactgtcgcgcgtcttgatcatgatcgcgtgccacaattaa

SEQ ID NO: 313213 - DNA, 162 bp, Proteus mirabilis; identical to SEQ ID NO: 303541

SEQ ID NO: 313214 - DNA, 210 bp, Proteus mirabilis
  misc_feature (195)..(204): n is a, c, g, or t
atgaatcaaataaaaaaatcaagtaaactcgaccatgtttgttatgacattcgaggaccggttttgcaagaagcaaaacgtctggaagaagaaggtaataaagtattaaaactcaatattggtaacccagcacctttcggttttgaagcgccagatgaaatcttagtagatgttattcgtaacctacctagctcnnnnnnnnnnacctag

SEQ ID NO: 313215 - DNA, 450 bp, Proteus mirabilis
  misc_feature (430)..(439): n is a, c, g, or t
atgcgctctctgtttgccagcacaggccgaggtctggaagaattattaaaaactgaacttgaacaccttggtgcccagtcttgccagattacgcaaggtggtgtctatttccgtgctgatgataaaaccatgtatcagtctttgctatggagccgtttagcttctcgcatcatgcttccgctaaatgaatttaatgtctacagtgatctagatttataccttggtgtgcaagcaattgattggagcgaagtatttacagttaatcatacttttgccattcactttaatggcactaatgatgtgatccgtaatagccaatatggtgcattaaaagcaaaagatgctatcgtcgattcattccaacgtaaaatagggcaacgaccggatgttgctaaacaatcaccggatattcgtttaactatacatctannnnnnnnnncatctacataa

SEQ ID NO: 313216 - DNA, 165 bp, Proteus mirabilis
atgatgggtgataaccgtgatggtagttcagatagtcgtttctggggctttgtgcctgagcaaaacttagtcggtaaagcgacaacgatttggatgagcttcgagaaacaagaaaatgaatggcctacaggtgttcgtttcagccgtattggtggcattaagtaa

SEQ ID NO: 313217 - DNA, 552 bp, Proteus mirabilis
  misc_feature (534)..(543): n is a, c, g, or t
gtgactaaacctctttatgagagctacctgcaagcaaaaaatgaaaaaaaagcatcttatgcgcgtgatttagcaacttaccttaatgtaagtgaagctgagcttactcacgcgcgtgttgggcacgatgctaaacgcttacatggtgatgttcgtgatattttaaccgctctcgcaaccgtaggcgaagtgaaagccattactcgtaatgaaattgcggttcatgaacatcttggggaatataccaatgctcgttttaacgatcatgcaggattgatcttaaaccctcgagccctcgatttacgctttttcttctctcattgggcaagtatctttgcattaaccgaagagacggctcgtggcattcgtcatagtattcaattctttgatcttcatggtgattctctccataaagtgtataccactgataatactcatatggacgcatggaataccttaatcgatacttatttatcaccagaaaatcccgtattagagattacccccgctaaatcttttcctgatgcaccggtnnnnnnnnnncggcattag

SEQ ID NO: 313218 - DNA, 969 bp, Proteus mirabilis
  misc_feature (922)..(931): n is a, c, g, or t
atggatattaatggtatgtctatgctgaaaagaaatttcaaatactccacattagctacagcaatttgtctgttatacgcgccgactacttttgctcatattgaaaaagtagagacagatacattgactgttattgggcaacaagacaatcaaataacggattttcaatctgtcgtcgatacccgttcagcacaagctcaaaccgcatctaccacgggacaattgttaaaacaaatcccggggatcaccgtatcagggacggggatcaccaatggtggcaatattatgatgcgtggttacgatcaaagaggtgtcaaaatctttgtggatggtattcatcaacctattgataatactatgaacaagcttggtggcctttttattgaaccttcacttatttcgcgcgttaaagtcaaacatggtggctcttcggttaaacatggaagtggcgcgctaggtggcgttgtttcgttctcaactctccatccaaatgagttattagacgccaataaaaaccttggtgctaaattatttagctcattctcttctgcggataaacatttttcttatggtggtgtgatcgcaggtagacatcagttagtggaagggttattggcttatagccaaagagagcgtggcccgatacgtattgctgatgactcaatattaaataaccacgaacgtatcaaaaattattttgcaaaagcctatgtttatcctacagaggaacaaaccgttattttttctgcccgtcaatataataatgcaggagagcaaagagaagttttaaatcgaatgggagggtttggaaaaagagacagtaataatatgtatcgagccaccaaacaaaatgatatctcactcacctatcatttaaatccaaataattatgattggctcgatctgagcactcaactttatnnnnnnnnnnttattattctcagtttaaaattgcgcatacgtttctga

SEQ ID NO: 313219 - DNA, 900 bp, Proteus mirabilis
atgaatgaatggtcattattgattttcacctttatgatgaatgccactattggcttaacactcataacaggcctttttgcacgccgtcttgcacattatctcagtgctgaaagctattatcgctttatgttactaaccttattggtgatttgtggattagccggtttaggctctattgcctccattactcacttaggcgtgccgttaaatgctccgaatgccattagaaatgtcttttcagcttggttaagtcgcgaagttgctgtcactgccatttttgtaggatgtttagggatcacctttttatggctatggcgtaccggtaaattttcgatgctactatttggtgcaagccttctgattggtctgtttgacatttattgcatggcatccatttatcgccatacttccattttaacatggatggataacaacacttatgtgatgttttttggcgcgatgctcacattaggggcaacaatattctttttgctgctaaagatattgcagcgtataggcaataaattagggatagaaataccatcagcccctttccctacccgttggaaatggcaattgtgggggatcatggcatttagtttaattggccgattactctatcaacctttttatgaacactatttaactcgtacgctctatagccaaacatcggtaacctttccgttatcacctattgaagtctattactccattggcccattacgtatgaccagttggatcttagcaactttggctgtattggtatgtggctatagtttagtaaaatatttgatgggccaaactcagcaaaaatcaacggagtccatttttgtctatggcggtatcatggcaattattgcagaatttgctttgcgttatgtgttttattcaattcactaa

SEQ ID NO: 313220 - DNA, 255 bp, Proteus mirabilis
atgggattagcattggggggattgttgccttgtattgcggcagtaatacgtcatcacgttccagaaggaatgataggcagtatccttggctattcggtcgcagcccagtttgcaggtcagttcatcggcccgttaataggtggcgttattggtggtcatataggtatgcgcgcagtttttctggcaactagtgttgtcttattgttgggagccgcttggaattttaaattacatcgtaattcagttatacgctga

SEQ ID NO: 313221 - DNA, 540 bp, Proteus mirabilis
  misc_feature (484)..(493): n is a, c, g, or t
atgaaaaagatccttgcgttagttactgcctctcttctgtcagttagcagtttttctgcattaagtaatacctcagttacataccagcctaatcaaattgttgaacagcaaaatgataaagttgttatcaagcacttattaggtgaaaccgcagtatctaaaaatccgtctaaggttgtactatttgattttggtctatatgactctttagttgcattaggtttagcggataaagtggttggtttaccattaggaaatgcacctgaatatattaaagggcgtattgcgaatgatgtagctaatgttgggggaatgaaagcccctgattttgagaaactcgctgagcttaaacctgatttaattattattaccggtcgtcaaggcgcttcttatgagaaactcacaaacattgcccccacgattaatttaggtacaaatagtgcgaattatcttgattcagtggaagcgaatattcaattaatannnnnnnnnncaacaagctactcaaacacaattagcaacattgaataccgtgattga

SEQ ID NO: 313222 - DNA, 606 bp, Proteus mirabilis
atgtcagaacaaacaattatttgggatcttgacctgatccataagtataactattcaggtccgcgctacacatcatacccaacggcattggaatttaatcagcaatatagtgatgcggatttcgaacaagcaacaaagcgttatcccgaacgacctctgtcactgtatattcacattcctttctgccataagttatgttatttctgcggctgtaataaaattatcacgcgccataaacataaagctgatgaatatcttgatgttttagaaaaagaaattattaatcgcgctcgctattttaaaaatagaaaagtgacccaaatgcattgggggggcggtactcccacttttcttgataaacagcaaattagtcgcttagtcgctttattaagacaacattttcattttgtggaaaatgctgagctctctattgaaattgatccccgtgagattgagttagatgtgattgatcatttacacaatgagggatttaaccgcctaagtatgggggtgcaagattttaataaagaggtacaacaaaaagttaatcgtgaacaagatgaagcatttatcttttcctcaaaagcagttatcaagagcgcgtga

SEQ ID NO: 313223 - DNA, 495 bp, Proteus mirabilis
  misc_feature (444)..(453): n is a, c, g, or t
atgtcgcaacagcaacaaggtgcggagcaggcacctgatttaaataacgaactgcaaactcgccgcgaaaaattatcagctttacgtgataatggtaacgcattcccaaatgatttccgcagagatgccatgtctgacgaattacatcaaaaatatgatgcaatgagtgcagaagagttagacgctgctaatgtggaagttgctattgcaggtcgtatgatgactcgccgtattatggggaaagcatctttcgctacattgcaagacatgggcggccgtatccagctttatgtctctcgtgatgatctgcctgaaggcgtttataacgagcagtttaaaaaatgggatctcggtgatattttaggtggccgtggccgtgtatttaaaaccaaaacaggcgaactgagtattcattgtactgagttacgtttactgactaaagcnnnnnnnnnnctaaagcactacgtccgttacctgataaattccacggtctag

SEQ ID NO: 313224 - DNA, 345 bp, Proteus mirabilis
atggatactgttatttcgctcaagcctgataatgtcacattccatgctcaagcgattaaacaggtcgaaaccaaagggcgagaaataattgagagtagccttggggggatgttgcaagatagcattaatgaattaggtcaaaaacaattactagctgctgcgagtggtgataggaaaaaagccttaagtggattattaggtaatcttgatggttttcagcaaatcatcgaaaaagagtggaagcaacaagaagcttcatttaatcaatttgggcagcaggcatgtaataaaatcacccaaatggaaaaccaacgtgtcgaattgataaattcactaaacaaatag

SEQ ID NO: 313225 - DNA, 2175 bp, Proteus mirabilis
gtgttcaatttgtttaatggcgcccgccgatttatctataatagccactttttatattatattcgcataataatcgcacttacgggaacgactttatttccatgggctttaggacaagaaccaaaatatactatacctcttacattaggtgttgtcgcagccgcattaactgacttagatgataggcttgtgggccgcttaagaaaccttgtgatcaccttatgttgtttcttattagcatcaacatctatcggattactctacccttaccctattttattcttttgtggtcttgctatctccacttgggggtttattttattaggcgccttgggtcagcgttatgctaccatcgcctttggtgcgctattaatcgctatttataccatgttaggtatgccgattttcccagaatggcatgaacaacctatttggctccttttaggcgcaatttggtataatttgcttaccttaattggtcacctacttttccctattcgtcccgttcaagatagccttacgcgttattatcagcagctttccgcttatctagaagccaaggccgcattatttgatcccgatattgaaggtgatcaacagcaattactgtataacttggcattggctaataatcagttaattgaggcaatgagccaaactaaactaacattactaagccgtttaaaaggtgataggggccagcgtagcagtcgtttcacattgcattattactttgtggctcaagatattcatgaacgggccagctcttctcatattcaatatcaattactgagtgatagattacgccacagtgatgtccttttccgctttcagcgcttactgtcaatgcaagcaagagcctgcgaacaagtcgctcaatctattctttggcataaaaagtaccaacataacccccattttgaacgtgcaatcactcatttagaaaatgcacttaataatgtaaaaaacagtacttctgatccacaaattattgcgccactctataatttattacaaaacttacagggcatagatgctttattaaaaagtattagtacagaacaatatcaaatctctcatgaccaaaaagaagaaactcagttatctgatgaagggcttactgggtggcgagatatcgtgctaagaataaaaggtcacttaacaccaaaatcagcgctatttagacatgcggtacgaatgtcacttgtcttatgtataggttatgtgatcatccagttttttgatttgcatcgagggtactggattttattaaccagtttgtttgtctgtcagcctaactataatgcgacacgtagacgattaacattacgggtcagtggcactattattggtattttaattggtttccctattctctattttgtgccttccattgaaggccaattagtgcttattgttgtgacaggtacgctcttttttgctttccgaaccgtacaatacgctcatgccactttgtttattaccctactcgttttattaagttttaatttattaggtgaaggctatgatgtcgcactaccgcggatcattgatacgttaattggatgtgccattgcctggtttgcagtcagttttatttggccggattggaagttccgtcagttgccattgctcatccaaaaaaccatgaccaataactgctactatcttgatgcgatcctcattcagtattatcaaggaagagataatagcgttaattatcgtattgcacgtcgtaatgcacatagcagtgatggtgagttagcatctttaatttctaatatgtcatcagagcctaaaagctttcaaacctctcaagaagaagcatttaaattactttgtttaaatcatactttactgagctatatttcagcgttaggtgttcatcgttgcaaaattgaagatgaagcggtactcaccctgcttaatgatactgtctgttatattgattcagcgttaagacgtaaaaaaccacaagataatgattttatacaatctcacgatcaacttatcgcacgtgttaatgcacaaccaagttcagataacgcccgtattcaattagtgttaacgcaaatacgcttgttactggatttattgccacaaattgtcaattgcattgagctaattgagcaaacagaatggcaaaacgataaagataaattagctacagcttga

SEQ ID NO: 313226 - DNA, 750 bp, Proteus mirabilis
atgaagatgtctattcctgaagttgagttaccaaacgcagagctgattagtcagcgtcgtcaggaaaaatttgctcagcaaatcgctcaacagttagaaacaagtaaccttgaccaatatcgtgcattgttaccaaaattagcgccacaaggtgaagaagcgttagatatggaaacattggcggcggtattactgaaaatggctcaaggtgagcgtgcacttattctgccacctgatccagtacgtcgtcctcgtcgtgaatttaacgatcgtgacgatcgccgtaacgatcgcgaacgttctccacgtcgtgagcgccgtgatgcgggggaaatggatctctatcgtattgaagtgggtcgtgatgatggggttgaggttcgtcatattgttggtgctattgccaacgaaggcgatatcagtagccgttatattggtaatatcaaattatatggctctcactcaaccattgagttaccaaaagggatgccaggcgatttattaagccacttcactcgtactcgcattatgaataaaccattgaatatgcagttagtgggtgatgcacaaccttaccgtgagcgccgtaatagcagccgtcgtgatggtcagccacaaggtggtcgtcgctttagtaaaggcgatcaaccaccacgccgtagtaatggtaatggcgagcgtggtaacttccgtggtcgcggtaataacgaaaacgcaccacgtcgccgtagtagtactcataatcaataa

SEQ ID NO: 313227 - DNA, 651 bp, Proteus mirabilis
atggaccttcctacaaaccaaaagattactgaagaagatcggcatctactccgctcttatattccttttctcgataatttggggcaatttctcggtgattattgtgaaatagtgctacatagttttgaggatttacgccattccgttatccacatagttaatggacatgttactggtcgtggattaggtgcccccgtaacaaatattgctttagaaaaactctcaaaatttaatcgaacagatcaaatgtgggaggtttatttcaatacaaaaagtgttcggccatttaaatcctcatctactttaattgtaaataatgcaggtacacctattggtatgatttgtatgaactttgctctcgatatgccattaaatgcattaatagatagttttactgatacaaataatttaaaacatgaaaatttttcacaagatgtgaataatcttgtacagaatcatctagaaccaattaaaaagagagtttacggaaataaaaacattccaagtaaatacaagaacttagagataattaaagaactaaatgagagtggactttttgaattttcagcaacacataaaatagtatccgccgaattaggcataagctcagcaacaatttataagcatttaagaaatttaagtaagaaataa

SEQ ID NO: 313228 - DNA, 963 bp, Proteus mirabilis
atgaaactaggtattgaaacagagtcctatcacctattttttcagcagggtgtaatggatgtttttgattttataaataaagcaactgaattagggctggatggggtcgaattaaatatcattcctgatgaaggattacacccagaatttggtgtgttaacaagtgatagccctgaatatttagcaaaagtacgtcaggcaattgaagataaaaatctttattgtgaattagatacacgttttacaacaccaaaggcattaacaaaagcaattgatatcgctcgaggaattggtgctgatgtgatacgtacttatatgtttcgtcgaggacaatacaatccgaaacaataccctaaaattattcaagatattaagtctattgttccattattaaaaaaatatcgtatacgtcttgcaatagaaaatcatgaagatgaaacggctgatgaaatcttaaatattgtaaaagatattgattctatttgggttggtgcacattgtgatattggtaatggcatgatggcgtgggaagatcctatagtaacagtgagcaaattagcaccttatacatatagcactcattttaaagatcatattgttacacatgatgatgaaacactggtaattacaggaatgcctcttggtgaagggagtattgatatcgatgaatgttttcgtttattagttgaacattcgcctgtaacacgtattaacttagaaaactgttttccctatacatctcattttgctagagataaaggaacggggggagtatttgaattaagtggaagctttgaagttaaatcaccaccttttgatacgcaattaattaaccccttggaatattattatccagctaaaatttctcctgttgcattaaaaacattaatggacgcacaagagcgttgtgtacaagtttctgttaataaattaaaagaactaagaaaaaaatattgttattaa

SEQ ID NO: 313229 - DNA, 378 bp, Proteus mirabilis
atgattattaatactacatcagcaccagaagctattggtccttattcacaagcaattaaagttgaaaatcatatttatatttcaggttgttgcccattcaatactcatgatggttctgttatgggaaatgatattgaaacacaaacattaaaagctatgaataatttaaaagctattatagaagctgccggtgcatcaatggatgatattgttaaaacgacttgttttattaaagatataaaagattttcctatttttaataatatttattcttctttttttacatcaggaaaatacccagctcgttcatgtgtggaagtttcacgtctacctaaagatgttttaattgaaatagaagctatcgcttataaaaaatag

SEQ ID NO: 313230 - DNA, 267 bp, Proteus mirabilis
atgccacgtattactggcttagaaatggtctcaatgcttgatcctgaacatcgcccttatattgtctttttaaccgcatttgaagaatatgctattcaagcattcgaagagcacgcttttgattatttgctcaaaccattagagcaagagcgtttagccaaaacattaagtcgtttacgccaaggcaataaacaaaatattgatttattatcaccaccagaagaacgcttaaagtgcattccttgtactaggtatagccgtatttag

SEQ ID NO: 313231 - DNA, 387 bp, Proteus mirabilis
  misc_feature (299)..(308): n is a, c, g, or t
atgtcagaagtagccactattgatcagagtaacaacttagcagtattcaacccagataagttaagtagcctaattgagttttcaaaaataatggctaaagggaaaattacggtacccgaacatttgcgcgataatgattcagattgtttagccattaccatgcaagcaatgcaatgggatatgaacccatttgttgtggctcagaaaacctataccgttaatggcgttcttgggtatgaagcacaattggtaaatgccttagtatcaagctcaacagctattcaaggacgttttcattnnnnnnnnnnctggttgggagaaactaaccaaaagcaaagaaatcacaaaacaacgaaacggcaaagagtattcatttcgtgttcgtga

SEQ ID NO: 313232 - DNA, 303 bp, Proteus mirabilis
  misc_feature (17)..(26): n is a, c, g, or t
atgatatgctggtgggnnnnnnnnnnttatttagccgagccagaaaaatcgattgaacatttttttaatgaaacaccaccattatcgtcattaactacgatagtgagtcaacattatttggaatacgccacacggggaatattttctacctatcttattcaactaggtaaaaaaataaaaaataaagagattatttttaaagatatgttggaaatactctctatcggtcatcattccggtgcagatactttactgggattatggattggttatcaaattaaacaacaacagcgtatagattaa

SEQ ID NO: 313233 - DNA, 327 bp, Proteus mirabilis
atgtggcaagccccttatattgtgcatagactacctactcgtattccaaataaggtgagtaaagaagtgaatcatccaacacaagttgcacctgattaccttagccgtgcattttcagcattgcgtgatcgagtgggcgttgctagtcatttgcctttagatgaaagaccaacctttcatgaaataagagcattggcggcctttatgtttaaacaacgtggttttgatccacaagctcgaatggctcacagtgatgcagagtcaaccaaaatttatacagaaaaccatgtacaatgggttgaagtgccacattgtgagatagcataa

SEQ ID NO: 313234 - DNA, 132 bp, Proteus mirabilis
atgatttatattcacagacaaaaagtgcaacataaagaggcatctcatattgcgatcctcataggcaaagcacttaaggatattatcgataatagccgtgacaatgtggcaagccccttatattgtgcatag

SEQ ID NO: 313235 - DNA, 375 bp, Proteus mirabilis
atgattaaattaaataatgttccatccgaatttcgtcccttagaaagctacaaaatgttaatcggcggcgaatgggtatccagtacatcgcaacaaacgaccaaaacctatagtcccgcaaccggtgagttattaagtgaatatccatcaggtacagctgaagacgttgatcttgctgtaaaagcggctcgtaaagcttttgatcattggcgtaaaacctctcctgctcaacgccaagcgctattattaaaaattgctgaccgtttagaacaagagcaagaacgttttgcttggataacggtaaaccactcaatgaatcgaaaaacatcgatttacccgcctctattgaccattttcgatattttgcaggcgtga

SEQ ID NO: 313236 - DNA, 450 bp, Proteus mirabilis
atggaaaaagttgcattagcacaatctccccatgtagccgctattggtagtgaagctggcggatcgctttataatttaacaccacttgctagtaatttagctaatcaacaaattaatgttactcgttttattgtgattgcccgtaaacctattgatgtatcagaacaagtacctgcaaaaaccacctttttaatggcaacggggcaacaagcaggggcattagttgatgctttaattaccttaaaacaatacagcattattatgactaaattagagtctcgccctataaatggtacaccttgggaagagatgttttatattgatgtacaagctaatttacgggatatcaatatgcaaaaagcattacatgacttatcaaaaacatctcgttcactcaaagtattaggatgctatccttcagaaaatattgtacccgttgaaatacaatag

SEQ ID NO: 313237 - DNA, 318 bp, Proteus mirabilis
  misc_feature (255)..(264): n is a, c, g, or t
atggccatatctgcctcatttaattttcaaggattgtctcccgatagtatttgggatgcgctaattaatattgggttttatcctgattcagggctgacggaattaaacagctacgaaaatcgtgtttttcagtttatggatgagcacaaacaacgttatgtggtgaaattttatcgccctcaacgttggagctattcacaaataaaagaagaacatgaatttgttttagcgctaaaagaggcacaggtttctgtnnnnnnnnnnggtttctgtcgcagcgcctatcgaggtaaaaggcgaaacagttcatctttctaa

SEQ ID NO: 313238 - DNA, 402 bp, Proteus mirabilis; identical to SEQ ID NO: 310562

SEQ ID NO: 313239 - DNA, 2442 bp, Proteus mirabilis
atggctaaattaaatattttttattatataattatggcatcctttatttcatcaacatcttctatcgcctatgcaatagaatttaatgttgatatgttggataccgaagatacccaaaatattgatttcagtcagttttctcgtcgtgattttattatgccaggatcttatcacttaacactgaaagttaataatgaacgtataggtaatgctcaagatataaatattatattacctaacactacctcttataacttatttgatgtcgcttgtattcctaaagactttgttaaaaatttaggtataaaagaagaatacattagccttattaaatatcgtgataatgataaatgtatagatgcttcatctcttgagggtactttcgcagaaattgatttatcgacattaacattatcaattactattccgcaaagttatttagaatattcagatcctagttggatccctccttatcggtgggaagagggagtgaatggttttattcttgattatagtttgactggttcattaactcgtcgaaattcaggttcaaaagaatcttatctttctgcaaacgggacgacaggtgtcaatattggtgtatggagattacgcgctgattatcaagcaaactatcgaagatcaacaggtaattataatcaccaatatagtgatactagattaagtcgtatatttgcctatagatctttaaaaaagatagcctcagtcctaacgcttggtgaaaattatttctattcatctatttttgattcttggcaattaacaggttatgcacctgaaatcattggtatagccaaaacaaatgccaccgttattgtcaaaagccatgaacggatagtacttgaaacaacagtccccccagggccttttcgtattcaaacgttagatagttccattcgaggaacattaaaagtcaccatacgagaagaaaacggtgaagagcaacaatttgatataacaacagctgcattgccttatttaactagacctggacagtatcgttataagctagctataggtaagcctcgggttaatggacgggaattacagggagatttaactgcatcaggtgaaatgtcatatggcctaaataatatttggtctatctatggtggtttaattctttctaaaaactatcaaacactatcaacaggttttggtcgtgacctattcactttaggcagcatttcttttgatgttactcagtcaagagcccaaatgttaaataaagtattaacaggccgtagttaccgacttagttattcaaagtcctttgatgaagcaaggacagatataacttttgctggctatcgcttttcagatgaaacatatcgcacactacaacaaactttagatgaacgccgtactggtatagagacgcaatcacataaggaaagttatcaggttaacatcaataaatattttgatagcttttcccttggtgctaactaccaatacaacacatattggaacagtaacaccgaagaacagcataatatttatctcagcactgcatttaactggaagaaattaggcttaaaaaacattaatttaacagcatcggcaacccgttccatacgtactggttatcaagatgattcgttgaatttacaactctctgtaccattaactcaaagtagtagcattagcttctctgaagggtattctcgcgataagaatggccaacatagcacaacacataatatagggtatagcaaatatagcgatcagcgtagttataacttaaatgtgggatatcaaaacaatcaaaatcaagggagtcaaacaagctttagtggttatttaaatcaaaacttagcttatgcctctgtttctggtaacgcgagttatatgcctagtgaatatcatagtatcgggggagcaattaatggtggcattacagtgataaaagaaggtgttgcaatgcatcaagccgcatacggtggaacccgattagttatagatactcctaatgccgcaaatattccattaaatggtggggtttatcagacaaatatatttggattagcggtaatacctaatgtcagtaattatagaaaaacgatggcatcaattaatactagtaaactaccttcaaatattgaagcattagaaacagtggtagatgcaactttgactagaggtgctattggttatcgttcgttaaatgttattcaaggcgaaaaaatattttcacgcataaaactggcagataatacatatcctccatttggagccagtattcgtaatcaaaagaatattgaactaggtattgtgggtgaacaaggtatgtcgtggattgtaggtgttcatccacaaggatcattaaatctttattggggtaataaacagcaatgcacgataacaataccagatattattaattcacaagcaagctactcaacactaatttgtcgttag

SEQ ID NO: 313240 - DNA, 276 bp, Proteus mirabilis
atggcggcaacattaaataccaccatcatggcttatgccggtgttgatattcgtcaggatatgctgaccatcaccccttcactccctcaacaatggcaaaagctaagctttaaattattgcatcgctctactttatatcaaattaatctcactcataaagaaattagtattttaagtgataagcccagtaccattttaattaaccatcaaacacataagctaaccgccaatacgttattagtattaaatttaaatggagacacgcaaaatgactaa

SEQ ID NO: 313241 - DNA, 399 bp, Proteus mirabilis
atgacacccttctttcctgaaagtgtacaacagtggttagagcaatataaccaaactgaaaacggtcaattgccaccatcgaatacaaatactgcgatcctagagcaagaagtcttgcaatgttatgaacaacaaggtcttgaagcagccctgaagcttattgaattaaaccttgctagcagatcagagcctagagatagattttatggacaattattgtctgcacaactatttgaattgtcaggtatggattatatggccacacagttataccaacaacttaatacctctgcctcacattattcacttgcagattgggaacccaacttaatacgacaactcatgcaaaaaatagacaaaaagacagaaataacaatgactatggatagggatcaataa

SEQ ID NO: 313242 - DNA, 948 bp, Proteus mirabilis
gtgacattactggataaccaaagtgaattaccgcaagccattaatggtgaagtgttcttgcatttagttgaaagtttagcgcaacagccgctatttattaccttgaaaaaaggcgtagtggcagataaaccgctttatatccttaatattacacaaggtcatgcagggcaagaagttaacagtgctaactatcgtttccatcttgatgttggcgctaatgctcagatgcaagtgattgaacactatattagtagtgatggtgaaaaccgtcattttaccggggcgagattaaccgccactattggtgataatgcctcgttcaaccatattaaacttggttttgaaaatggcattagccaacattttgcccataacgatttaagcattggacgagatgctcgtgttaatagttatgcattcttgttggggaataaactgagtcgtcatcatactagcgctgcactgacgggtgagaacagtgagctatcaatgaatagtgtggtattacccaaagcgaacgaaattgccgatactcgtacttggctcgtgcatggtgagaaaaattgcctaagccgtcaattacataaaagtattgcaatggatgcagggaaagccgtatttaatggcatgatcacagtcacacctcaagcgctgaaaacagatggtcaaatgaccaataacaacttgttattaggtgataaagcacaaattgatactaagccacaacttgagatctatgctgatgatgtgaaatgtagtcatggtgcaacggttgggcgtattgatgatgagcaactattttatctacgttcacgaggtattgcgttaagtgaagctcgcaaaatgatcattcatgcatttgctgccgaattaacagaatcattagaaaatagtgtgatcaaagctcatgttctagagagaataaatcaacgcttatcagaggtataa

SEQ ID NO: 313243 - DNA, 702 bp, Proteus mirabilis; identical to SEQ ID NO: 308051

SEQ ID NO: 313244 - DNA, 501 bp, Proteus mirabilis
gtgctattcacacaagttcgtttcgcttggcacactactgaagtaggtttatctcttgcatttcttggtgtattacatattttttttcaagcggttctcgcaggaaaactggcgcaaaaatggggagaacgcaacacggttatcattagcatgtcaattgatgcatttggttgcttattattagcctggataagccatgtttgggttatgcttcccgctttaatctgtttagctgcgggaggaatgggacaacctgctttacaaggatatttatcaaaatctgttgatcatcatgttcaaggacagttacaaggaacgttagtcagtctaacgaatataactgggattgttggcccgttactcttctcttttatttatagttacagcgttgaatattgggatggcttattgtggtttattggtgcaatgctttacagtgggttacttgtagccagttattttaaacagaaatcaccaatattaaaaaaatttccctcataa

SEQ ID NO: 313245 - DNA, 468 bp, Proteus mirabilis
ttgtttggattacaaaaaaaagaggacaaacgaagtaatggcgtcactaatacggattatttaggttgggaaattgaacccggtattcgctactttatcaccccgaatctaaatacaacagtggcttattttgatggtggaaaacaagcaataagacatgaagagtatgatacaaaagaaacaaatcacaaccagcaattacgtatgtatgtaaactggacgacacctatcggtgttattatttcgccctcaatgcgtaagtctatttttggaaaaatagaagacagaacaaataaaggtgaatatatcgataaagatatgactcgttataccttacaaatggcttaccaaatatctcctcaatggcgagttatgacagaatattataatgagcgtgttgagaataaaaataacggcagcaagtcaactcaagattattttaaagtatcggtaagagcaactttctaa

SEQ ID NO: 313246 - DNA, 426 bp, Proteus mirabilis
gtgattaaattattatcagcagcacaaaatcatcgtcctatttttgttgttatggctgtttttaccggagctattttatcaacactctttgtacgtatgttttctatctcattagcggatttaagaggcgtgtttggtttagatgttgcccaaggatcttggtatagctcaattgatcagtatgactcttgtaccttggtttatggtggtttatggcgcagaaaaaatattaatcagtgcgagttttatccttttttgttgtggattagcggttcccataataggacaacagattggttttggcggactttttattgctcattttatgattggattttgtatcggagtctatttgccgatgacgatttcattagccttaaaaagtttaaatcccagtgtttggctaatcgttatggcggcttatag

SEQ ID NO: 313247 - DNA, 1722 bp, Proteus mirabilis
  misc_feature (623)..(632): n is a, c, g, or t
atgaacgtattgaaaatctttttctgcacattactccctttactcttcacttcaccgggaaaggccgaaaataatcttaatcagaaaatgattgaggaattaactcaatgccgtttggaatcatctcagctaattcgtttagattgttatgacaaaattgcgctttcttcaacatcttcctccaatgcactgcctgatgttactcaaatgggtaaaacatggcgccaagcaacagagcatgaaatgaaacgaacgggaaacagtgcaggttttctcgtctcagtaccagaaaccggtgattatcccgtattaatgaccattccagcgattggctttcaaccgcctcgccccatcttaatgctgagctgtattgataacattactcggatgcaaattatcctgccaacaaaacaagatgctggcagtgtgatggtttcaacggataaaacacaatttactgcagaatggtttttacgtgaaaacggttatgtattggaatcaagccgcggtataccgggcatagatgaaattaaacgcttgttaaatgctgaaagattgacgttgaaattatctaataacgaaaaactcaccttcaatatttcaggtatttcacaacaaataannnnnnnnnnctttaagagcggcttgccactggtagaaatcatgatgaacaatacttcttatgcatggaaacaacagctactgacagcgcttgatgaacagcaagtcagtagtgctgtcaatgataatgatgccgactgggaatatattgacagtgaaatgataaagttcggctcacttagtcatggtcaattagatattaaagagatccagcgtcgctgtttacacctatttgaaacgcagactaaagattttcggatcttagtccatttattacgtactttacaacatgctggagacccaaaagaattagtattggcagcacagatcctaactgattttaatcgtcaatattggcaaagttgctacccaaccaatatgaaattgaaatcacgtttagccaatcaagttttgaaacgttttgaaacagcgagtgagagtttttgtcatgcagccaacagcgcgatgcgtgatgatattctaggctcgttcgcctttctagcgcaattttggcatgaacaaagcccagcacttgcagaacaaattgatgatctaagcagagattataatcgtattgaaaataacgatgcgccgattattgttgcttcacctgccgagaaagaagaaaaagtacagactccgccggttagcgagtctatagaaacaccgacaaaaaatagcttaacaccaactattaacgttaaccatcaagatgaaagacaatggaaacaaacattacttcaagtagctgatgttatctgccaacaagcccctgaaagttcagtaggatatcgtatacggcgttatgcaatttggcacgctattacggtcttacctcaagctaatgctcaaggtaaaacgcctttagcccccgtatcaattgaccgtgtaatggattacaaagctcaactgactcaagcgtccattacgctattaaacaatattgaacagagtctctcactctctccttactggttagaaggccatatgttagctgcccaagtagcagctaaattaggttatggggaagtagaaagtggcattattgaagagttacgtatttttttagcgcgtcttcctgaacttgttaacttgatgtga

SEQ ID NO: 313248 - DNA, 558 bp, Proteus mirabilis
atggaattggctactcctcgattacgtttacgagaatggcgtgaaagtgataaagcgccattttttttacatattaacgcctcagcatcggtgatgcgttatttcccttcaccacttacccgctcagaaagcgatgcaatggttgatacattgcgtgataaatttattcagcaaaatggttggggattttgggccgttgaattaaaagagactcaagagcttattggctttgttggattaaatattcctaatgcccctttgccttttaatccgtgtgttgaaataggttggcgtattgcacaatctcattggcgcaaagggtacacttatgaggcggctttaacagtattaaaatatgcttttgaacagttgaaactggaagaagtcgtggcatttaccgcagtgactaatttaccctcagaaggggtgatgaaaaaactcggtatgaagaagtctgaatattttatgcatccatctctagataaaacacaccctttagcacaacatgtattataccgattaaaaaaagcagactttattttcccgataaacgtttag

SEQ ID NO: 313249 - DNA, 222 bp, Proteus mirabilis
  misc_feature (180)..(189): n is a, c, g, or t
atgtacgcactcagggtagagcaagcaaaagagcaactacagattgcacaagcgacattaagcaataaacaacgtattattattgcggaaacatccaattcagaagtggcacaagagcaaataaaacgtgcgcaggtcaatttatcattagccacacaatcattaaatcgattagaaccnnnnnnnnnncagcacaacaagtcgatgatgctcggacgttaa

SEQ ID NO: 313250 - DNA, 510 bp, Proteus mirabilis
atgtttaaaaaatccataattactcacgcacctattcactggttatcagatgaagagcgtgaagaagtcgcagaaaataccttaagttggctgctggaattaggttcaatgacacgacgttttgagcaacattgccatcaagtgacggtaatgccatatcaagaaggttttattgaatatatcgagcctgctgatgaacaaaagtgtttaccttatagccgacgctattggttaagagaaatcgtcctttgtggagataatgtaccttggttattagggcgaacattagtgccggaagagacattaacgggtgaagatcgccaattagtgaatttgcgtacggtgccattaggacgttatctgttccaggaaacaaccttaagtcgtgattttattcatattgggcaacaaaatggacattggttacgtcgttcccgtttccagctttcagataaacctttattattaactgaggtgtttttgcctgcatcacctgtatataagcagtag

SEQ ID NO: 313251 - DNA, 261 bp, Proteus mirabilis
atggccgagacggatgttccgttggtggagctggaagccgtaaggatgcacctagtagacctcattcaccaaggcctgaccgatagtgaaaagtcttttttgctatcttttaaaaatcgagagcctgattggtctctaattggtttagatggagtcagtgagcttcctgccattaaatggaaacaaatcaatttggcaaacatgccgaatgacaaacatacacaagccctagcaaagttgaaagatgttctcggtgtttga

SEQ ID NO: 313252 - DNA, 534 bp, Proteus mirabilis
atgttaggtgattttgcccctattggttcaactatttttgcctttttctattcccccatggtgatcaccggcttacatcacacaacgttagcgatagatttacaaatgactcaaagttatggcggtacacctatttggccgattatcgctctgtctaatattgctcaagcatccgccgttgtaggcattattatcgttagccgcaaattaaatgaacaagaaattactattccggcagctatctctgcttatttaggtgtgacagagccagccatgtatggcgtcaacttaaaatatggctttcctatgctgtgcgccatgattggcgctgcgctagcgggtttgatttgtggattaaataatgtgctatctaatggtattggtgtcggcggattacccggtattttatctatccaacctacttattggttagtttatttattggcaatgatagtggctattgtcgtccctattggattaaccattctggtctatcgctataaagaaaaagcaggcaccttgcaagtcgattaa

SEQ ID NO: 313253 - DNA, 660 bp, Proteus mirabilis
  misc_feature (642)..(651): n is a, c, g, or t
atggatgttgatatctactataaattattaattgataagctttcattaaaagctaaatctaaagatgatataaaatctgacgcgaaaaagaatatgggattctggcaaaagctgattgccaatttagccgaaatttttgttccattattacctatcttaatttgcggcggtttattgttaggattaagaaatgttattggcgaaatgcctatatcagataataaacccctcacttatttttatccttggttaacgccaatatatgattttctctggttaccttgtgaagccatcttccattttctacctgtgagtatttgctggtcgagtgtaaaaaagatgggtggtacacctgcactaggtatcgtactaggtataaccttagtttctccacaactaatgaatgcttacaatttaggttcacaaattcctgaggtttggaattttggtttatttactattgagaaagtaggttatcaagcccaagtgatcccttcgattttagcgggactatttctgggatggtttgagactaaattacgtcgttttatccctgattacctaaaattagttattgtgccgattgtaactcttattgtcgccgtttttgttgcccatgttattttaggccctatcggtagnnnnnnnnnngaagcatag

SEQ ID NO: 313254 - DNA, 309 bp, Proteus mirabilis
  misc_feature (281)..(290): n is a, c, g, or t
atgaatattttattagttgaagacgatctgcaattgggaaaggcgctctgtcgtggtttagaaattgctggttttcagccctgctgggtaagattgcttgcggatgcacgtgttcaattaaaccaaaaagcctttgatttaatgttgcttgatctaggtcttcctgatggtgatggtcaagatgaacttatcgcactaagaaaaagtggtgaaaaaatacccattattattttgacggctcgtactcaaatagataacttagtacaaacattagattcagnnnnnnnnnntttgctatgcctgaattaa

SEQ ID NO: 313255 - DNA, 354 bp, Proteus mirabilis
atgcctgaattaatttctcgtgtaaaggccgtaagtcgccgtatggccggtttctcttcacagatttggtctatcggtgatttacagcttaatccctcgaatcatcaagtcactttaaatggtgaactattgttattatcaggtaaagagtaccagctattatatgagctgatgcgcaatacagataatgtagtacgtaaatctgatttagaacaacgcttatttggcttagatgacaaaattgaaagtaactcacttgaagttcatatgcacaacttacgccgtaaaataggcaaagagcgtattattacggttcgcggtatcggttatctcttaaaaaaagaagtgaactaa

SEQ ID NO: 313256 - DNA, 732 bp, Proteus mirabilis
atgcgtattcctcgcatttatcatccagagccactcagtgcaggtacacaaacttcattagcagaagaagctgcaaatcacgttggacgagtattaagaatgtcaaaaggccaaaaactggcactttttgatggctccaatcaagtatttgatgctgatattatcgaaagcagcaaaaaatcagtgattgtgcagattaatgaaggacaaatggatgatagagaatccccacttgatctccatttaggccaagtactttcacgtggtgaaaaaatggagtttactatccaaaagtccgttgaattaggtgttaacactattactccgctgatctctgaacgttgtggtgttaaactagatcctagtcgtttagaaaaaaaacatcagcaatggcaaaaaattattatctcagcctgtgaacaatgtggcagaaataaaattccacagcttatgccggtgatgtcattagaggcgtggtgtgcccaaacggatgatagcttaaaacttaatttacaccctagagcaagccaaagtattaataccttgccacttccagttaaaaaagtacgactattaattggccctgaggggggattatcccctgaagaaattgccatgacagcaaaataccattttactgatattttattaggtcctcgtgtattaagaactgaaacaacagcactcaccgcaatcaccgctttgcaggttcggttcggcgatctgggataa

SEQ ID NO: 313257 - DNA, 327 bp, Proteus mirabilis
  misc_feature (290)..(299): n is a, c, g, or t
atgttagatcaagagatgatccgtacttttattcaagtagcagattgccaaagctttactaaagcggcggagatgttacacaaaacatctgcggccatcagctatcggatcaaaaccctagaagagaatattggtacacagttgtttaatcgtacgacaagaaccgtcacattaacgccggcaggagaatatttattagaaaaatgtcgccagtggattgtttggcttgaatcaatgcctatcgagctacagcagatgaatgcgggagttgagcaccaagttaatattgnnnnnnnnnngatcgtaccgccgtggccagtatgttag

SEQ ID NO: 313258 - DNA, 273 bp, Proteus mirabilis
atgtttaaagttcagactggtagctcaggtattgcgagttttgattctaactaccttggtacaacaggctctgtagatagaagtaacttaggtatcgtcttaagagataagtcaggtacgattatcccacctaaccaatatttctcggttggcaaactcaataatttcaacggaaattgggaagtaagtgcagcccccatcgccaaagcgggcagtaaaattactgaaggtgagttttcagctcatgcgacactcattgcggagtttatgtaa

SEQ ID NO: 313259 - DNA, 366 bp, Proteus mirabilis
atgatgatggtcgatgtattgtccggtattttattaggattaccctttggtaaacatgttagctctatgtatcatgatttgacacaaggtcgtgaattaggtcagctccacattgtgattaatccagccttcttcactgatgctgatttatttaaaaaacacatttctcaagtaatggctgagttaaagaatattaagcctgcagtcggttttgaacgggtattatatcctggggaaaatagtcagcttgcagcgcagagaagcgaaaaagaggggatagaaatcgttgacgaaatttatcattacttaaattctgatgtattatttaatcaatcttatgataataaaaacccatttgccagctaa

SEQ ID NO: 313260 - DNA, 864 bp, Proteus mirabilis
gtgcaaaatgctggcttattgattgactgtaaactcgtggcacaaggtaaaaaaagtgatattttatcagactcagtaattgcgcaattatctcacagtgaaacacttgaaaatctgatcttacccgcctcagactccgttgatgcagttcctaccttaccaccaacgctttcccctattatacttaaggatggcgtggtcagttataatgataaacctgtgctccatcacttaacctgggaagttaaaccacaacaacattggcaaatattaggtcctaatggcgcaggaaaatcgaccttattaagcttaatcacaggagatcatcctcaaggctatagcaatgatttaacactatttggtcgtaaaagaggcagtggtgaaaccatttgggagatcaaacgccatattggttatgttagtaatgccttacatcaaagctatcgcgtctcttcaagtgtgaaaaatgtgattatttctggttttcatgactctattggtatttatcaagccgttaccgataaacagcaaaaattagcggatgaatggctaacactaattggtttaactgcactcgctaaccatccttttcactcactttcatggggacaacagcgtctagtattaattgtaagagcattggttaaacacccaacattattgatcctcgatgaaccactacaaggattagatacaaccaatagactattagtacagcgctttattgatatcatgataagccatagcaatactcaactactgtttgtcagtcatcatcaagaagatgcacctcactgtattacccatcgactgatttttattaaagaaggagatatctatcgttaccaacaacaaccctgttaa

SEQ ID NO: 313261 - DNA, 822 bp, Proteus mirabilis
atgaaacggatcacgatagtcggattaggttggttaggattaccacttgccaatgccttgcgtgaagcggggtatcaagtaaaaggaacaaaaaccacagaagatggtgtagaagcagcacgaatgagtggtgttgattgttgtctaatgaatttaacaccggctattgagtgtgatagagatgattttgattacttaatggaaactgatgtactgattattacattaccccctagtgcggcggggggaggatatgattatgttgaagggatacaaacattagtggatagcgccatgtctcggcatgtgacaagagtgatttatattagttctacttcagtatatggcaatcaaagtggtgttattacagaagaagttgatattaggccagaaacgcaatccgctaagatgatagcggaagttgaaaattggttacatcgcttaccactcacgaccgtcgatattttacgtttggcggggttagttgggcctggtcgtcatgcaggacgctttttatccggtaaaaaacaggtcaaaggtgcacatcagagtgtcaatttagtgcatttagacgatgttatttttgcgatagagcaactgcttgctcaaaatgaaggaggccgtttatataatttatgcgcgcctattcatcctaaaaagaaagatttttacagccgtgttgctgcacagttagatcttactccccctgaatttgctctagaagataaaccgccagcacgagagatcgacggtcaggagatttgccgagatctcggatttcattatcactatcctgatcccgacaaaatgccaatgagttaa

SEQ ID NO: 313262 - DNA, 750 bp, Proteus mirabilis
atgctagccattattcgaggcattattgtcattctgtacaccattattgtggtgacttttgggatgatctattgcatgttttctcccagaaatccgaaacacgtaatgacttatggacgtttattcggcaaattatcacatgtctttgggatcaaattagttgagcgttttcctaaagaagctaaaagttatggacccagtatttatattggtaaccatcaaaataactttgatatggtgacaatgtcgaatgcggtacaacctaataccgtgacggtgggtaaaaaaagcttggtgtttattcctttctttggacagctttattggatcactggcaatattttgattgatagaggtaatcgctctaaagcccatagcaccatcactcaggttgcagagcaaatcaaagcgaaaaaaatctctgtatggatgtttcctgaaggaactcgtagccgaggacgtggtttattaccttttaaaacaggggcttttcatgcggcgatgcaagcgggggtgcctattgtgcctgtttgtgtctctaccacacaaggtaagataaaattaaatcgctggaataatggctacgttattgttgaaatgttgcctcccattgatgtatcaaaatataacaaagatcaggtcagagaattagctgaagattgtcgtcagatcatgaaggctaaaattgaagagcttgataaagaagtggaagaaatgaataaacgcgattttgcaggtaagttaaattaa

SEQ ID NO: 313263 - DNA, 549 bp, Proteus mirabilis
atgtcgtggactcaatctgaaacaggttcagcgatcacttggaaatacccaagtgttatcttaaaaggagataattcaacggctgaatttttctcagtggcactgaccaatggtaaccaacaagctgacacgggaaccaagatgatccacatcggtaaaaataccaaatcaactattatttctaagggtatttctgcgggtaaaagtcaaaatagttatcgcggtttggtgaaagtgttacctggtgcgcagaatgcacgtaactacacacaatgtgactcaatgttaattggcacagagtgtggtgctcacaccttcccttatgttgaagtcatgaataactcagcacaattagagcatgaagcgacaacgtcacgtattggtgaagatcagttattttactgccgtcaacgtggattaagtgaagacgatgcaatctcaatgattgtcaatggattttgtaaggacgtgttctcagaattaccgctggaatttgctgtagaagcacaaaaattattagcaatcagcttagaacatagcgttggttaa

SEQ ID NO: 313264 - DNA, 429 bp, Proteus mirabilis
atgttaccgatagaaggctttgaaggacgtaatattaacttattactgtttttgatgatcgtggtacagacttctgatgttttacaatatgtgtttggtaaactatttggcaaacatcctatcgtaccgaaattaagtcctaataaaaccatcgaaggtttctttggcggcattatttcagcaagccttatagggatgatgttatggtgggcaacacctttcacatggtgggctgcttttttactctctttagtcatcacactcgcaggctttgctggcggtttatgtatgtcagccataaaaagagacagtggcgtaaaagatttcggtactatgattgaaggccacggcggtatgatggatagaatggattccctgtgctttgccgcccctattttcttccacgttattcgctatttctacgtgtaa

SEQ ID NO: 313265 - DNA, 129 bp, Proteus mirabilis
atgttattaagtgttcctaaagaatatgggcagtatcgtttaaaaatcactgtattaggagattggcctcagttgcaaaaagaaggactggagtactttattaaaataaatactcaacctaataaataa

SEQ ID NO: 313266 - DNA, 606 bp, Proteus mirabilis
atgttagccacttttttattaacacaacgcggcactccctttatttatcaagggcaagaaataggtatgacaaattgtcctatgacgcttgaagaacataatgatctacatgtagccaaattatatgaatggggtaaaaatttgggttatagcgatgaacagatgatggcatattttaatgatcgtagtcgggataattcaagaactccttttcagtggaataataagaataatgcgggctttacggtaggaaaaccgtggctaaagataaacccgaattataaaaaaattaatgcagagcaacaacgtcaagataaaacttctctttttgcttattaccaacaactaattacattaagacgtcactcagaaatcagcgatattttaatttatgggatattcacaccacttactgctcctgataatgtgattgccttcaagcgaactcatcaagaaaaatccgttaatatttactgtaattttagtcaggaagaaaaagtattgtcggtaagtatcgaacacctttatctgcataacagtccaatagtgacaaataaacaaggtgatcttgttctccagccctatcaggctgtcattttttcttag

SEQ ID NO: 313267 - DNA, 291 bp, Proteus mirabilis
  misc_feature (25)..(34): n is a, c, g, or t
ttgatcaagtctatctgttacaggnnnnnnnnnntgttaaacaacaataaagccgttgaacttatttcgggttatcgttcactcgcgactaataaccatctacgtcaacacaccagcggtgttgcgaaaaaaagctatcatacccgtggtcaagcaatggatttccgtttagtaggtactgatttatctaaagtacgccaagttgcactaagaatgaaagcgggaggagtgggttattatccacgaagtaattttgttcatatcgatacaggacccgtgcgctcatggtaa

SEQ ID NO: 313268 - DNA, 315 bp, Proteus mirabilis
  misc_feature (290)..(299): n is a, c, g, or t
atggatattgttgattcacatcgtcgtaagtggttaggccttggtatggctgctgttggtttaggtttacttccctcacatgcatttgcatcattagcaactccccgaccgaaaattcttcgctttaataatttaaatactggtgaaactattaaagccgagttttttgatggtaaacgttataataaacaagagcttgctagactaaatcatctttttagagatcaccgtcaaaataaagttaaaactatcgatccagccttatttgatcaagtctatctgttacaggnnnnnnnnnntgttaaacaacaataa

SEQ ID NO: 313269 - DNA, 222 bp, Proteus mirabilis
ttgaaaaaaataaatgaaaattactctcctaaatctcacattgttgagctactaaataaagagcctgagaaaaaatttaaacatatatatccaaaatttgaggataaaaaacttggagaaatagcaaatgagattgaccgtgatagtcatcatggcattgaatttcaaaaatatattacagagttaacttattcccatattttagagctcaataaacaatga

SEQ ID NO: 313270 - DNA, 540 bp, Proteus mirabilis
atgctaacagggcggaaaaagaaatttgcacaagccctgaaaaaagggatgacgcaacgagaagccgcgattgaagcgggatacagcgagaaaactgctcaggtaaaagggagtcagttagccaaagatttaaatcaaaaagttaactctaaggttaattttgacgttaacactgaagttaattatcatttaaatcatgaggttagcaataaagttaaccctacaattaatcgaaaaattaactctagagttaactccaatgttaattctgacattaacgctgttatcacggataaagagaggtcgtcacaggtacacgactatcctgatcctctggccgtgattgccgaaatcatgatgaaaaataaagacatcgaccctaaattatcgcttgatgccgccgcaaaattggcaccttatctgtgcagtaagaaaggggactgtggcaaaaaagacgaaaagaggaaagcagcgaaaaaagccggtaatcgtttttcaccaatgcctcccccaaaattaatcatcaacaacaagggttaa

SEQ ID NO: 313271 - DNA, 126 bp, Proteus mirabilis
atggctgggaaaaataccattgataccccaacaactaatgaacctactgcaactaataccgccccttctaaacccgctgttgccaaaatcaccgcgaccatcatcgacataaataaagtgtggtga

SEQ ID NO: 313272 - DNA, 978 bp, Proteus mirabilis
atgagctggttatctcctgaagttacagagattttactcactattttaaaagccgtggtgatcttgctggtggttgtcacttgtggtgcttttatgagtatgggggagcgtcgtctactggggttattccaaaaccgttatgggcctaaccgtgtaggttatgcaggttcagcacagttaattgcggatatgatcaaaatgttctttaaagaggactggatcccaaaatttgctgatcgctttatctttaccattgcaccagtgattgccttttcttccttattattgtcatttgctattgtgccagttagctcaacctgggttgtggctgatttaaacatcggtattttatttttcttgatggtagcgggtttagcggtgtatgccgttttatttgctggctggtcaagtaacaataaatattcgttattaggtgcaatgcgtgcttcagcacaaacagttagttatgaggttttcttaggactttctattttaggtgttgtggcacaagcgggttcgtttaacttaacggatattgtcaattcgcaagcccatatgtggaacattatcccacaattctttggctttattacctttgcgattgctggcgttgccgtttgtcaccgtcatccttttgaccaacctgaagcagagcaagagttggcggatggttatcacattgaatattccggtatgaaattcggtctgttctttgtcggtgaatatatcggtatcgttgccgtttctggcttaatagtgacgttattcttcggtggttggcaaggtcctttcttaccgtcattcgtttggtttgcactgaaaacaggattcttcatgatgatgtttattctgatccgtgcatcattaccgcgtccgcgttatgaccaagtgatggcttttggttggaagatctgcttaccgttaactttaatcaatctgttggtcactgctgcagtgatcctctacaacgctcaataa

SEQ ID NO: 313273 - DNA, 900 bp, Proteus mirabilis
atggcaatcgaccttggtcatctggtgacagaaagtcgcaatcatcacagtgaacatattgatacactttcaacacttgaaatgctaaaagtcattaataatgaagataaaaaagtgccttttgcggttgaagccacattaccccatattgcacggctggtggataaggtcgtaacagcattttctcaaggtggtcgattaatttattgcggtgcaggtacttctggtcgtttgggaattttagatgccagtgaatgtcctccaacctatggaaccccccatgatatggtgattggcttaattgccgggggacacaaagccattttacaagcggttgaaaatgcagaagataatgtccaattgggggcagaggatttacaccagcttaattttaatgctaaggatgtgctagttgggattgcagccagtggtcgaacgccttatgtgattggcgcattagaatatgcacgctcactaggtgcggtgaccggggcaattagttgtaatcctgatagtcccatagcgcaacgtgccgatattgctattacgccgattgtggggcctgaagtggtaactggctcatcacgtatgaaagcaggcacggcacaaaaactggtattaaatatgataaccacaggtgccatgataaagatgggtaaagtatttggtaatttaatggtagatgttgaagccactaatgccaaattaattgaacgccaaattcgtattgtgatgcaagcaacagagtgtgatcgagctactgctgaacaagcactagcacaatgccaacgtcattgtaaaacagcgattttgatgattttagccggcgtaaatgcacaacaagcaacacagttgttggcgcaaaataaagggtttattagacaagctctagctaaatga

SEQ ID NO: 313274 - DNA, 177 bp, Proteus mirabilis
atgaaaggtagtaagcgcgatacaagtgatacgatagatgtagaaagagtggctcacactgctttctcacacatacttaccgttacaccgaaaacacaaagcgaaattattgaagcattacatgtcctgaaagcccgcgttaaaacgactattgctgcacggcgtattacactataa

SEQ ID NO: 313275 - DNA, 300 bp, Proteus mirabilis; identical to SEQ ID NO: 309887

SEQ ID NO: 313276 - DNA, 1320 bp, Proteus mirabilis
gtgattatttggattattgggttatctattttacccctagcgctaacttggttatgtaagaaaccagaaaaaaatataactcagcagcaaaagaaaaaaatctggatcaaaaatacggtcaaaatgctcgtaattgctcttgcggtatttgcctatctaaaaaccttagattcgaaacaaaaagcctatgaaatcaagaataacttagatttgccaagctacagtggtggtttaagttacgcctatttaccgaccaactggattattcctttatttcaatatgcgataacacagtacgacgaccactttaatagccagaatatctttgatcccgcggataactttacctatataccgtcaaaagccaatgaagatgtctatgtggtctttattattggcgagacagcaaggtgggatcatatggggctattcggttatgaaagacaaaccaatcccttattaagccaagaaaaaaatctgattgctctgaaaggtatctcttgcgatacagcaacaaaactttcgctaaaatgtatgtttgtgcgtgaaaatggtacagaaaataacgatcaacgaacgttaaaagagaataatattttctcagtattacatcagctaggaatgacatcagaactcttttcaatgcaaagtgagctttggttttacaataagcttgatttagataactatgccatgaaagagatgatgaccgccaaaaatagtaattttggcaaagaattagatgatactttgcttattaacgaagtcgcagattccgttgctcactattctaaaggtaaccacttagtgattttacacactaaaggttcacactttatgtactcgcaacgttacccaaacgcatttaaaaaataccaacctgaatgcttaaacgttgacgatgagtgcaccaaagagcagctcgtcaatgcttatgataactctattctttatactgattactttattgatggtgtacttaataccttgcgtgataaaaaagccattgtgttttatacctcagatcacggcgagtcaatttcagaaaaaggtggcttacacggcacaccaaaagaaattgcaccaccagaacaatttaaagtgcctttcttagtgtggatgtcagatagctatttagctgagcctgaaaataaacagttatttgataatctcaaacgaaatcaagataataaccggactttctatcatcataatatttttgactcgatattaggctgtctaggttactcatcacccgatggggggattaataatcaaaataatctctgttttggtgacatagctagcgaagcacattaa

SEQ ID NO: 313277 - DNA, 1248 bp, Proteus mirabilis
atgtgtataagagacagattaggtattgagcccttaagcttttatgctgcacaacagaaatttggatacgacaatgcattttcaggagcatgtgaagaagctttaaaatattctgaaaaagtagatgttgagcctatctatgattatatacttattgatgaagcacaagattttccggcagccttctttaaactagtatataaattctcaagtgagaaaaaaagagtagtttgggcatatgatgaattgcaaaatctgggcgattttacaatgctccctccggaaaaattatttggtgttactgaactagggactccagaagttacgcttgttaatgaaccaaataagcctcaacaagatataatgcttccaatatgttacagaaacccaccatggactctttccttagcattagcgctagggttaggaatttatcgtaaggacggcttagtcaaaatgttccatgaaccgtcattctggaaaaacattggctatgaagttgttggtggtaggctagaattatctaatcttgtaaacttgcaacgtagtggcgacagaacccctgattatttcaatcgattattaacaccaaacgactccattaaatatcaatcatttgatgactcacaagctcaagccgagtgggttgcacaggatatattaacgaatttaatggaaaatgagctggaacctaccgatattttggttgtgttcccagaggcttatacgttaggcagctcatcagcataccttatgaatgaactaagaaaatatggtgttaattgtcatattgctggaaaaaacacaagtagagatgtaatttttctagatgattcaattgcaataactcatattcatcgtgcgaagggcaacgaagctccgatggtatatgcaatgaattccaattattgtaattccggacttgaactaggaaaaaaaaggaattcattatttaccgctatcacaaggactaagtcttggctaagaataacaggtgttggtaatggtatgcgggagttagtacaagaaattgataaagtgtttgaaaaaaacttccagctagaatttaaatatccttctattgaagaattagagaaactcgataatgcttatcaagataaaacagatagtgaaaaacaagagatatacgaaggatttggacaactgaaaaagcttaaagctatgtttgaatccggcgagctttcgatagaggatattccttccgacttgagagactttttcgagtga

SEQ ID NO: 313278 - DNA, 474 bp, Proteus mirabilis; identical to SEQ ID NO: 305641

SEQ ID NO: 313279 - DNA, 1275 bp, Proteus mirabilis; identical to SEQ ID NO: 295125

SEQ ID NO: 313280 - DNA, 1194 bp, Proteus mirabilis
atgaaacatacattgttaaaaacgactgcaattgctatggcattaagtgtgggagttgtgcaagcgactgaatataaagcgagtaccgcagaacatccaatcaaaatagttaatttagatgctcttgaaaatcaagtaaaagaaaatatggataaaggcgctttcggttatattcgtggtggtgctgaagacgaaaataacttgcgttctaatacaaatgcatttaataaaaaatatattatgcctcgtgcattacaagggattgaattttccgatctgaatttaaaaacagaatttttaggtattaaattagatacgcctattattcaggcaccgatggcagcccaagggcttgctcatcaacaaggcgaagttgccacagcaaaaggtatggcgaaagcgggctctattttctcattaagtacttatggtaataaaaccattaaagaagtcgcgcaagcacaaccgggttatccgttcttttttcagctatatatgagtaaaaacgacgcgtttaatcagtatattttatcgcaagcaaaacagtatggcgcgaaaggtattattttaacggttgattctcctgtggggggatatcgtgaagatgatattaaaaatagttttcaattcccattaggttttgccaatttggaagcattcgccaaaatcagtgatgataaatcaaaaacaggtaaaggttcgggtattagtgagatctatgctcaagctaaacaagcatttactcctgcggatattcaatatgtgaaaaagatgtcaggtttaccagtcattgtgaaaggtattgaatcacctgaagatgccgatactgcaattaaagcgggtgctgatgcgatttgggtgtctaatcatggtggtcgtcagttagatagtgcacctgcaaccattgatgtattgccagccattgccaaagtcgtgaataaacgtgttcctatcgttttcgatagtggagttcgtcgtggctcacatgtctttaaagcgctagcgagtggtgcagatgttgttgctgtggggcgtccaattctttatggattaaatttaggcggtgctgaaggtgttaattcagttattgagcaattaaataaagagttaagaattaatatgatgttaggtggtgcaagaaacgtcaaagaaattcaagcaacgcacttgtatacagatgctgactttaaataa

SEQ ID NO: 313281 - DNA, 345 bp, Proteus mirabilis
atgaatattgggctatcagattttctagctattgctgcactaattgtttctatattcagtatgttatatactaaaaaacaaagtgaacttgcaaaagcgagtcatattaataactatcgttctcaactatctcaataccactcgaattatagaaaaactcttactaaaatacaaaaaaaacatagtagcgaccttaaggaattaagtacgttagcaggaagaacattggttaatataattaataatttcgaccagtatgatattaatcactatacaattatgcctttaagacatttacttcatgaaagttctgaaatggttttcgcacattccaaggtcagctag

SEQ ID NO: 313282 - DNA, 465 bp, Proteus mirabilis
  misc_feature (426)..(435): n is a, c, g, or t
atgctattaaaaaaaatatttttagtgtcttttttattccctactctctcttacgctaataccttaccaacatcaaatatagataattcactaactcccaaccatgataatcttgcccgtttttcactcggtgacaatagtcaagcatccggcagcggtgccactgctataggtatcaatagccaagccaccaatactcgttcggttgctattggttatggtgcattagccaatgaggaaaatacggtttcatttggtaatagtgaagagaaacaaacagcacgactcaccaatgtcagtgaaggtaaaaataatactgatgcagtcaatctggcacaaacaaaagcactacttagtaaaaataaaaggttaactgatagccaaataaatgtttttagaaatcaaactaataataacttaaacacnnnnnnnnnncttaaacaccatcaaaaaaaccattcatga

SEQ ID NO: 313283 - DNA, 747 bp, Proteus mirabilis; identical to SEQ ID NO: 298907

SEQ ID NO: 313284 - DNA, 468 bp, Proteus mirabilis
ttgtttggattacaaaaaaaagaggacaaacgaagtaatggcgtcactaatacggattatttaggttgggaaattgaacccggtattcgctactttatcaccccgaatctcaatacaacagtggcttattttgatggtggaaaacaagcaataagacatgaagagtatgatacaaaagaaacaaatcacaaccagcaattacgtatgtatgtaaactggacgacacctatcggtgttattatttctccctcaatgcgtaagtctatttttggaaaaatagaagacagaacaaataaaggtgaatatatcgataaagatatgactcgttataccttacaaatggcttaccaaatatctcctcaatggcgtgttatgacagaatattataatgagcgtgttgagaataaaaataacggcagcaagtcaactcaagattattttaaagtatcagtaagagcaactttctaa

SEQ ID NO: 313285 - DNA, 624 bp, Proteus mirabilis
atgttaaataaaaaaatagcatcggtgatgctatcaacaattattgctgcttcttttgctacggctgctaatgcagatactcgtgttgcacaagcaaccgcgacttggcaagcaactgcaattaaagatacaaccagtatgttagttgtcactccattaaaaagtctgacttttaattatgctgaaggccaaaaatcatttaaccaacaaaatggtgcatttgatattgctattcaaggccaatctggcgcaactgattttaaattatcatcaaaactgattgctaatacgttagcaagaacaactgatgattcaacattaacagttggtgttaaatggaatggggaagacctttctaaaacaactgatgtcgtgttaattgatacatcaaaagggttaacctcaggtttagataatttagctgctgatggtatttacaatggctctgagcgcgctacagatcgtggtgaattcacttttgtgattgccagtgcacaagcagcaggagcaacagccgattttaaatcactggctgatggtgtctgggatggtgatgtaaaagtgcaatttactgccacttgggatggtgacttttctaccgttaaacctaatccagaaccttaa

SEQ ID NO: 313286 - DNA, 195 bp, Proteus mirabilis
atggctcatactcgttggcatacacattccgattcattagcgaagccgcgtatgcaaagcttcctgacccagaaaacgggtcgcatactgtatcctcggcctctgttagtatatcaattacactttttgcgtggtttattgcttttcttccttgaaatggaaacaattgatctgcatgaggtggtttatgattaa

SEQ ID NO: 313287 - DNA, 129 bp, Proteus mirabilis
atgggtgccagaacagcaacagattggcgtgaaggccacggtccttttgtacgtttacatattggtcttgagtctactgatgacttaattgcagatctcacccaagcatttagtgcattaaatcaataa

SEQ ID NO: 313288 - DNA, 213 bp, Proteus mirabilis
atgtgcaaagccgccaatgttgaattgattggttatgaaaacgttggttcaggtctcgtgactgcgatggtgaaaggcgacgtaggggcagtgaaagctgcggtagattcaggtgtggaatcagcgcaacgggtgggtgaagtcgtcacatcacttgtgattgctcgtcctcacaatgacatcaacaaaattgttatcaaacacaaggcatag

SEQ ID NO: 313289 - DNA, 150 bp, Proteus mirabilis; identical to SEQ ID NO: 299404

SEQ ID NO: 313290 - DNA, 294 bp, Proteus mirabilis
atgattgatggttggcgggtaataaagttagagcctgaaaaacaactgactttactcttcggtatgaaagcccccggtttagggcgcctctcttttactattcacgatagtggtaacctacgctcattagatgtccgtgcttggtggcatcctgctggttttagtggtttactctattggtttgccatgatgccagcccatttatttatttttaaaggtatggctcaaaccatctcaacttgcgcctatagattggataaaaattcacctaaaaagcccgagcaatcgtcctaa

SEQ ID NO: 313291 - DNA, 510 bp, Proteus mirabilis
atgtcaaaaatgacatcaaagtcttataagttaccaaaagaacttattgatcaaattattgatttaagtgaaagattaaatgtccctcagaataaaattatcgaagatgcgattgctaattataggttacatttaattactaattattcaaaacaagatgttaaatctccttttgaaattgatatggagacaaagcccaataatccttatttggatataaatcaggttaaaaatatgaaagttaatgattttattattcttaagctaaaaataaatggggagcataactctgcttcattctattgttctttaaaaatagtggatattaatgaactcggtggtattgcagaattcaaaggtattcgtccaagcgaagcttataaaacctttaccacatttcaagaatttcaaggttcaaaaatagcattccgtcacagtgatgtatttgattatctttcagcacaagatgttgaattacgaggagaagaaacactatattaccactcttaa

SEQ ID NO: 313292 - DNA, 231 bp, Proteus mirabilis
atgaataaacgaaagcaattacttaatcgtattaattgggatgctcaagatgttggaatgataagacttagaaatgaggatataggaaataaacttcaagttcgatgcactgcattatggaaagaattattaaatactgacaatccaaatactgaattaattaatcgattaactgcattccacaatgatgttgaattattagccaagcaaacagggttatataatgaataa

SEQ ID NO: 313293 - DNA, 753 bp, Proteus mirabilis
gtgagtaaaaagaaaattgttatttctttagccataatcgctggattgagtacaccgacagccttcgcgggagaatggtcaatagggggttctgtattatcacaagtaacaccttataagggtgctaaatctaaagactatttattacctgtacctttggttaattatcaatctgaaaatttctattttgcgacattagccgcaggatattatttatggaattcaccgaaagatcagctgtctgtcgatgttcactattacccacaagcatttaaaccaagtgactctgatgatgagcagatgaaaaaacttaatcgtcgccgtgataccgtcatgggtggatttacctataaacatcatgagtcatggggaagtttacgagggattatttctggtgatcttttaggtaaaagtaatggcattattgctgatgctgcttacctttatccttttgaactaggcaattggtcacttcaaccgggaattggtgctgtttgggaaaataaaaagcagaatcgttacgcatatgggattagtcagggagaatctcagcgtagtggtttagcagaatatcgaccaaatgatagctggagaccttatgttgaaatctcagctaactataagtttgctgaaaactgggatttcttcgcgatgggtcgagtggatcgcttacccagcgaagttaaagatagcccgatggtaaataaatcggtaacggctattttatggacaggtgtcacttatactttctaa

SEQ ID NO: 313294 - DNA, 2301 bp, Proteus mirabilis
atgagtaacggcattacattgcgtgtgaaaggaaaggttcaaggtgttggctttcgcccttttgtttggcaattagcacatcattttggtttattagggcaggtgagtaatgatagcttaggagtattgatccacttaacgttatcaccgcaaaatcaacactttattaatgcattaacagctcaatgtcctcctcttgcacgcattgaacgtattgaacaaacaccttatcaatgggagcaactccccacggactttactattgtaaaaagtggtggtggggaaatggatacacaagttgtacctgatgcagcgacttgtcaggcttgtattgatgagttgtttgatccacaaaatcgtcgttatcactatccttttataaactgtacccattgcggcccccgttttactattataaaaaaaatgccttacgacaggccttttacctctatgtctgcatttccattttgtccgacttgccaacatgaatatgaagatcccgcagataggcgttttcatgcacaacctaatgcctgtcctgtctgtggacctcatatttggttggcagatcatcaagggcaacaacttgcaataaaagagcgggcattaacgcaagcttgtcaggcgctattagcggggaaaattgttgctgtaaaaggcattggtggctttcatttagtctgtgacgcacgcaatagtgcaagtgttgcgcgtttaagagcgcgtaaacatcgtccagccaaaccacttgcggtgatgttaaccgggattgagcagctccaaaaaccggacgataatgccgagttttactcaaaagtgatagaaacattaaccagtaccgcagcacctatcgtacttattcctaaagaaatcgcccctatttcattaagtgaactgattgcacctggattaacagaagtgggtgttatgttaccagctaatcctttgcaacatcttctcgcacatgaaacacaaattccattagtcatgacctctggtaatgccacggggcacactcctgcattaaccaatgaagaggcgttaactcagcttggtgatattgcagaattatttctaatgcataatagggagattatacaaagagcggacgattcattagtgcgtattgaagatgatcagtgtgtgatgatccgccgttcacggggttatgtaccagatgctatcgcattgccaaccacttttgatgcacaacctgcaattttggctttaggaggggatctgaaaaatgtgttttgtctcttaaaagagcaccaagctattatggggccgcatttaggtgatttagatgatttaagtgtgaggcaacaattactgaaatcgctcacgctgtttcaacagatctatcgttttacgcccaaagcgattgccattgatgctcatcctaattatatcagccatcaaataggtaaacagctagctgaacagcaacatattcctgttatagaagttccccatcaccatgcacatattgtctcttgtttagcagagcatggacatacacagcaacaaggcgcagtaattggtatagcccttgatggtttagggtatggacaagatggctctttatggggaggcgagtgtttgctggtggattataaaaaatcccaacgtattggcgggctacctgcggttgctatgccgggaggaaatttagcttcaatacagccttggcgaaattggttcgcacatttagctacttttacaaaagattggcaaggtagtgttatcacccaagcaattccgctcactgagttacagattttgagtaaggcagtggctcgtggtttaaattcaccgctagcatcatcttgtggacgattatttgacgcagttgcttgctctttgggattatcacctaaacaaataagctgggaaggcgaagcggcatgctacttacaaagcgcagcgttacagtgtcacgtagatcggtatgctgatatcatcaagcaatatggacatttaatgcctgtaaaagataagcatgttgatttgtccattttctggtcacaatgggaaagcatcacattgaataccagtgagaaggcttggttatttcactatttattagccgaaagtttgggtgatattgctctgcaagctgcgcaagaacatcagattgatactattgttttaacaggaggggtattcaataatatcttacttaagtatctgtttaagcaaaaattaaacaataaaaaggtattaacccctatgatattgccatctggtgatggtggaattgcattaggacaagcacttattgccagtcattttatgtaa

SEQ ID NO: 313295 - DNA, 828 bp, Proteus mirabilis
atgacttattcacgtgaagtattactcaaaaaatttaatgacatgatcgcacgtaaagagcctattattggtggcggtgcgggaacaggtctttccgcaaaatgcgaagaagctggcggtatcgatctgattgttatctataattcaggtcgttatcgtatggcgggtcgtggctctctggcaggattattagcctatggcaatgccaatgaaattgttatggatatggcaaaagaagtattgcctgttgtaaaacagacacctgtgcttgccggggttaatggtacagatccattctgcaattttgataagtttttagatgacgttaaagccatcggttttgctggcgtacaaaacttcccaaccgttggtttaattgatggtaacttccgcgctaatctagaagaaacaggtatgggttatgctcttgaagtagagatgatccgcaaagcacatgaaaaaggcttactcacaacaccttatgtttttagtcgtgaagatgccattgcaatgacacaagccggtgcagatattattgttcctcatatgggtttaaccactggtggcaatattggtgcagaaacagccgttactttagatgattgtgtcgcccttattaacgattgggcaaaagcagcaaaatccgtacgttctgacgtgattgtactttgtcatggtggccctatagcaacaccaaaagatgcgcaatatatccttgataactgtcctgattgccatggtttttatggcgcaagttcaatggaacgtttaccaacagaagtcgctttaactgcaacaacaaaagagtttaaaaatattaaacgctaa

SEQ ID NO: 313296 - DNA, 408 bp, Proteus mirabilis
  misc_feature (388)..(397): n is a, c, g, or t
atggaaaatattcaatcaaaaaaagaaaaaatcatgcagttagtgatggtttatacaccttggatcactgtgatatgtgttgttgcgtttattggtatagcgactgcagattgggatcgctggtggagtgatgctcgttatcaaacaacagataacgcttacataaaagcggactcaacgatattgaaatcacgaatgactgggtttatttctcagattaataaagaggattaccaagtagtaaaacgtggtgaggtcattgctgaaattaataagaaagaacaaatattaaatcggcaagcgtcattagcagagtatcaaaaagcccaattagctttagataatctcactgaagaaattaaagaatatcaattaaatattgagaaannnnnnnnnnaaattagctaa

SEQ ID NO: 313297 - DNA, 1536 bp, Proteus mirabilis
atgcaatctactcactcaaaatcaagccgaaccttttttggccatccataccctttaagctctctgttcttcacagaaatgtgggagagattttctttctacggtattcgcccattattaatcctatttatggctgcaaccgtttatgaaggtggtatggatattcctcgagagcaggcatctgctattgtgggaatttttgctggtggtgtttatttaacatcattgccaggaggttggctggctgataattggttgggacaacgtcttgcggtttggtatggctctatctttattgcattagggcacctttctatcgcactttcagcgttttggtctcagaacctattttttatcggcttattgcttatcgtattaggtacaggcctatttaaaacctgtgtcactgttatggtgggaaccctgtataaaaaagatgatacacgccgcgatggtggtttctccttgttttacatggggatcaatatgggctcgtttatagcaccactgatcaccggcttcttagttcgtgattatggctggcattggggctttggtattggtggtattggtatgctagttgcactactgatcttccgcttttatgccgtaccgacaatgcgtcgctttgataaagaagttggcttagattcaagttgggatcgccctactgttgtgcgtcgtaatgtcggacaatgggtattagcacttgctgtgatattaattgccattgttggtttaattatttcaggcactattccatttgatccggttattgttgccaattttatggtttatgtgatctccggcagtgttatcgcctattttatctatttattcctatttgcaggattaagtagtagtgaccgttctcgcctgtttgtttgcttcctattattagtttcagcggcactgttctggtctgcattcgaacaaaaaccaacctcatttaacttatttgctaacgactatactgatctaaattttatgggctttgagatccctgcggtttggttccagtccgtcaatgcgctatttattattattcttgcccctgtatttagctggttatggccaatgctagcacgcaacaatatgaatttaagtagcatgagcaaatttgtgattggtattttattcgctgcaggtggctttaccgtcatgatgtacgcctctgaaagcgtgcttgcaacaggtagcggtgtttcaccattatggttaatttccagtattttattgctgaccctaggtgaattatgtttaagccctataggacttgcgacgatgaccattttagcgccagcaagaatgcgtggacaggttatgggtttatggttctgtgcgagtgcattaggtaacttagccgcaggtttaatgggtggaaatattcgtcctgataaacttgatgttatgcctgatttcttctctcacgtctctatagcattggttatttgtgctgttgttcttgcagcattaattattcctgtgcgtaaactgttacaaagtgcagatgataaagagaatgcgcaagcataa

SEQ ID NO: 313298 - DNA, 156 bp, Proteus mirabilis
atgtctgagattgtgtatttaaataaccaatttgtacctaaagaacaagctaatatctctgtttttgatcgaggtttcttatttgctgatgccgtttatgaagttaccgccgttattaacggacaattgaagcattatcaatgcctttttcattaa

SEQ ID NO: 313299 - DNA, 639 bp, Proteus mirabilis
atgtcatctacctattttcactctagcctattagcagctacactgttttcagttacgttaacagcacctgcttttgcttctgaaaatacgcaaaacacacctcagactattacgacaaaaaaacctctgccagcagagaacactttctcagaaaaaaatgaggaaagctattggggaaaatttaaacgtaatcttacccaaacttgggataatgaccaatataactactatttaccggtatggacttggcataaccgttttacttacgataaagaaaaaaccaatcgttataacgaaacgccttggggatttggtatgggtaaatatcgttatgataatgagggtgattggcatggcttatatgctatggcctttatggattccaataatcgtgtacaacctattatgggctatggttttgaaaaaatgtggtatcccggtggagatagagagggttttcgcatgggggcgggctttaccttaagtgtgactgctcgtcatgagtataactatattccgatgccattacctctaccgctagtgtcagtcggttatggacacttatcattacaggcgacttatgtaccaggaacctataataacggtaatgttttatttgcttggttacgttggcagtga

SEQ ID NO: 313300 - DNA, 177 bp, Proteus mirabilis
atggcttttaaatataaaataacaataatcatatttttgctatcttttattttttttatagtgtatgagttttttattcccgttaaagttatgggagtacataaagatacgtataccacctctattctggctgtctcttatacacatctgacgctgccgacgactccttacgtgtag

SEQ ID NO: 313301 - DNA, 375 bp, Proteus mirabilis
  misc_feature (12)..(21): n is a, c, g, or t
atgtcatgcgcnnnnnnnnnngagcctgctaatcgaccattaagccagcgtgaaaagaatagcctaaaacaggcgaaagagattttaatcgctgaaatggaaactccgccaaagcttgaaatattagcgactcgtgtgggcttaaatacacgaaaacttacccaaggctttcgtcaattatttggcaattctgtttatggttggttacaagaatatcgcttacaaactgcatataatatgttgctaaatgaaggggaatctatctcaagtattgcctattatgttgggtatacacctgctcatttttctgtcgcatttcgtaaacgttttggtatattaccaggcgatgtacgcaaaggacatttcacgccttaa

SEQ ID NO: 313302 - DNA, 570 bp, Proteus mirabilis
  misc_feature (539)..(548): n is a, c, g, or t
atgtctcaacattcttcattctattcatatattggttatcaacctaagcatcagcaggttgaagaataccgtttccaagaccaaattttattacgtcaaggtgtattagaaactaccgaagatctacacattgaagagacttatcaagccggttttaatttagtggctgttcatagtggaagggtgattagtgaaagtgtcaatgggcagaaaatagagatagcgacaccgagtatttttattgcaaatagtgttgagcgctattctttattaaatcaatttaaatctggtgatcctcttagatacacgttgttgcaattatcatctgagtggcttgaacaacaacatattttattgcctccaatactgcaacaaaatcaatcactcatgttgcatcatctgactatggataacacttttttagcgttaaccatgcagttattccaaaatccagttcacgactccttaaaaccactttattactttggcaaagcatgcgaatttgcttcattaagtttgcaatatttatgtcatgcgcnnnnnnnnnngagcctgctaatcgaccattaa

SEQ ID NO: 313303 - DNA, 168 bp, Proteus mirabilis
atgaaccgtaaaaacctgtttactcgcacagctctcgctgccattgtaggaacactttcctcttatgcaagcgctgccggttttcagttaaatgaatattcaacttcagcactaggtcgtgctttttcaggagaaggcgttattgcagatgatgccctgccgcattga

SEQ ID NO: 313304 - DNA, 294 bp, Proteus mirabilis
atgtctaaacgagacatgagagaattacagctcaccgttgatcgaataaaattaaatcagcctaaatattcaaatgatggaaaaatatttgagaataatcaccaggtaggtaattcaaatagtcagagattggatacaggcagcgggccatataaagaatggacggttaagacacctgatgtcgggactaatggagctagacgtattgttgttgatactaaatcaggtaaagcatattacacgcatgaccactatgattcattcatagaaatagatttaaaaggttggaaataa

SEQ ID NO: 313305 - DNA, 1200 bp, Proteus mirabilis
atgaccattttgggaacggctctgaccactaatgccacaaaagtgatgttattaggtgcaggcgaattaggtaaagaggtgatcattgaatgccaacgtcttggcattgagactattgcggttgatcgctatgccaatgcgccggcaatgcatgttgctcatcgccattatgtcgtcaatatgcttgatagcgaggcattaaaacagattataactcaagaaaaacccgattttttggtgcctgaaattgaagctattgctacttcattattagtcgaattagaaaataatggtcaaaaagttgtaccttgtgcccgtgcagtaaaactcactatggatagggaaggaatacgccgtctcgctgcagaaacattacacttactgacttctccttatcaatttgttgatgatgaagcggcttttagaaaagcggcggttgagattggttttccttgcattgtaaaaccggtgatgagctcatctggaaaaggacaaagtgttattcgttcagagcaagatctcactagtgcatggacttattctcaagaagggggaagagcagggcaagggcgagtgattgttgaaaagatgatcccgtttgattttgagataacattactcacgattcgtgctgttgatggtattcatttttgcgagcctattggtcatcggcaagaaaaaggcgattatcgtgcgtcatggcaaccacaaaaaatgagtgatattgcccttgccaaagcacaatatatcgctagtaaagtagtggagaatttgggcggttatgggttatttggtgtggaactatttatccaaggtgatgaggtgttttttaatgaagtatcaccgcgtcctcatgatacagggcttgttaccttaatttcacaagatttatcagaatttgcgctccatgtgcgtgcttttttaggctatcccatcggtggtattcgccaattaggtgcttgtgcttccgcggtgattttacctgagttgtctagtactaatattgtctatacggggttagaaaaagcgcttaaggcaaatcgacaaattcgtttatttgctaaacctgaaatctcaggacatcgtcgtttaggcgtggtgcttgctcatgccgattccataaaacatgctattgaagaggcgaatttaggtgcacaagcgattttagccgatgatggtgataaccatttatcgcagtga

SEQ ID NO: 313306 - DNA, 144 bp, Proteus mirabilis
atgccaaaaatagtttcttatataagtacaaaatttaatagcgtaaaaaatgctttaggaataaaagataccacgggaaatcctaatttcagtagtgttaagaatactagtgctatatggtatctgtctcttatacacatctga

SEQ ID NO: 313307 - DNA, 804 bp, Proteus mirabilis
atgttggcactttctgtcagacagccacttaatatttattattggctcattgcgatatcattagtttatatcagtttattgagttgggtgcttaattcatggtctatgacagaaagtgcgcatcatattgatcagcaacagcaaaatacattatcggtctatcaggtgatgttttcgccacctaaacaatctactaccatgattgaaccgagaataaagatcgagtcacaacaaccacctattgcactaccaagaagtgagaacggtgaatttattgaagcgcccaaacaaccttcaaaaaagcgtcaacaacaaccgaccccaataacacctaaagcgataaaacaggtaaaaaaacagccagtagtagacaaaacagtacctataaaaccacgtgatttaacaaatcacaacatagttcaaagtacatcacaaccatcagcagaaaacttaacacagcataccgcgagttcattggcagggagtagtcgtgcattaagtgaacatggtattgggcagggagagtctgaaaatcactatatcagtttattgcgccgagaaattgagcgtcataagcgctatcctgcgcaagctcgtcgtatgcaagatgaagggctggttgttgtgcgtttctcattaaccaatgaaggctatatttcatccgttgtacttgaacagacctcaggggtggcatctcttgataatgctgcacttgccgcggtaaaacgggtaaaaccaattggcccgaaacctaataacttatctgatcctttaactatctcgttaaaatttcaattaaattga

SEQ ID NO: 313308 - DNA, 354 bp, Proteus mirabilis
atggtatattatcctatctccgtattaatgctagcagggataaaagatatacttcttatttccacaatagaagacttgccatcatataaacgattgttaggaaatggttctagatttggaataaatcttcaatatgctattcaaccaaaccctgaaggtttagcacaggcgtttattataggtgaagaattcattgctggtgataattgtgctttagttttaggtgataatattttctttggtcaaagctttggacgtaaactggaacaggtagcttctagaaaaagtggtgctactgttttcggttatcaggtaaaccatctcctcgtggtgaacttgaaatcacctcaataa

SEQ ID NO: 313309 - DNA, 438 bp, Proteus mirabilis; identical to SEQ ID NO: 295368

SEQ ID NO: 313310 - DNA, 561 bp, Proteus mirabilis
atgtttccggccacatttttagccagctatggggtaacctggttgggatcacaacctcaatattatgagcaggttgaattaggcattaatatcctgatgattgtggcgattatcttttcaatgttcctttttttacaacgaatattcaaaaaatccacatcatcacatccgttatcatcattggcacctagctcatcaattcctctgagttctctttttgttcccggtatgagtgccggatttgtcttaggggcgacgggggttggtgggggattggttgtcttacccgtgcttatgcgttttgcacaaatgaatattaaggaagcgatcggtagttctatatttattactacaattttgtcaggtggctctgctattgcttatagtgctggtgactataccgatgtgcatacggccatcattctttgtttaggatcacttatttcgattcctttagcgcgctatttactggtgtatttatctgagcgtttttttcaatatttaacactgttatttattctgatcagcatcattatgatgagttggaaactaatatattga

SEQ ID NO: 313311 - DNA, 204 bp, Proteus mirabilis
gtggcaaccagtattgcattctcaggactggtggagtcaacgtcagtaatgatgttcttactttgcttatcctatgctgcattagcttttgctgcttcagcaatatggtctttacccggtgatgttgcacctagaaatatgacgtctgtattaggtggaatgcaaagtgcagtttcaaactgcggtggtatattgggccaatag

SEQ ID NO: 313312 - DNA, 162 bp, Proteus mirabilis
gtgacaggttatattattggtgcaacaggctcttttatgtgggcattaatagtatcgggtattgcatgtgcagtaggggcacttatttatttagtgatgttgcgtgatattaagcctattacagcaaatgaaatagaggtacaaaataatcagataaattaa

SEQ ID NO: 313313 - DNA, 996 bp, Proteus mirabilis
atgagcaatttatgctcagaaatcttacaagtaaatagtgccagtgaatacaatcctgatttaagttatcgacaaattggtcatgatattagctgtaatctcggatcaatgaatatcgccatggcgatggactcaccagattttgcgcataccgtaaatgttgccatcagagcactgacgagtgtggcacaaatgactaaaatagaatcagtaccttctattgaaaaaggcaaccaagcatctcatgccattggcttagggcaaatgaacttacatggttatttagcccgtgaagggatttattatggttcagaagaagggcttgattttaccaatatctatttctataccgtaacatactatgcccttttagcctctaaccaattagcgatagagactaaacagcgctttaaagggtttgaacagtcaaaatatgccactggggagtattttgataaatatttatcaaaacagtggttacctaaaacccaaaaagtccgccagctatttagccaatccaatattcatattccaacccaagaagattggcaaaaacttaagctcttgattatgactcacggtatttataatcaaaacttacaagcaataccgccaacaggatcaatctcttatatcaatcactctacatcgagtattcaccccattgtggcaccgattgaaataagaaaagaaggtaaaatcggtcgggtttattaccccgccccttttatgaccaatgaaaaccgtcatttttatcaagatgcttatgaaattggcgcagaaaaaattatcgatacctatgcacaagcatcacaacatatcgaccaaggattgtcgctaacattattcttttctgatgaagcaaccacaagggatgttaataaagcacaaatttatgcatggcgtaaaggtataaagaccttgtattacattcgtattagacaaacagcattagccggcacagaaataaaaggctgtgtttcatgcgccctttaa

SEQ ID NO: 313314 - DNA, 534 bp, Proteus mirabilis
  misc_feature (518)..(527): n is a, c, g, or t
ttgcaattgtcgaaacgtggcggaggtgttgctttcttactgactaatttacgagaagcaggagcccccataaaacgcattgaaaaccaatcgtctggcgtagtaccggtaatgaaaatgcttgaagatgccttctcatatgccaatcaattaggcgcaagacaaggtgctggagcggtttatctccatgctcatcatcctgatatctatcattttctagatacaaaacgagaaaatgctgatgaaaaaatacgtattaagacgctttcattaggtgtcgttattcccgacattacctttgaattagctaaacgcaacgaagatatgtatctattttcaccttatgatgtagaacgagtatatggcgttcctatgtcagaaatcagtattagcgaaaaatatactgaaatggtcaacaatgcagagatacgtaagaaaaaaattaaagcacgggcattttttcaaactttagctgaaattcaatttgaatcaggttatccctatattatgtttgaagnnnnnnnnnntgtttga

SEQ ID NO: 313315 - DNA, 675 bp, Proteus mirabilis
  misc_feature (632)..(641): n is a, c, g, or t
atgatttccctaaaagatgtatccaaatggtatggtcagtttcaagtactgacagattgttccactgaagtgaaaaagggggaagttgttgttgtctgtggaccttcaggatcaggtaaatcgacgcttatcaaaaccgttaatggtttagagcctatacaacaaggtgaaatcctagtaaatgatataaaagtcaatgataaacgaactgatttagctaagttacgagccaaagttggtatggtgtttcaacactttgaattatttcctcacctttccattattgaaaatcttacactagcgcaagtgaaagtccttaatagagagaaaggtgcagcaaaagagaaagggctaaaattattagagcgcgtaggcttagccaaccacgctaataaataccctgctcaactttctggtggtcaacaacaacgcgttgctattgctcgtgctttatgtatggatcctattgcgatgctatttgatgaacccacctccgcacttgatcctgaaatgattaatgaagttcttgatgttatggttgagctggcgaatgaaggcatgaccatgatggtggttacacacgaaatgggctttgctaaaaaagttgctgaccgtattatttttatggatgnnnnnnnnnnggctaaagatttcctagctaaaatcttacattaa

SEQ ID NO: 313316 - DNA, 2502 bp, Proteus mirabilis; identical to SEQ ID NO: 279643

SEQ ID NO: 313317 - DNA, 1218 bp, Proteus mirabilis
  misc_feature (1182)..(1191): n is a, c, g, or t
ttgcgacattatcttaaagatgatgaagacaaacgtaaattacatcaactagcggggcgtgtggcggatctctttgaccaatatctggtttatcgtcccgattggttgtcggcatgggaaaatgatcaactaattgatggcttgagtgacaatcaatattggcaaaaaacactgtggttggcactgcaacgctatacagaagatcttgcgcaacctaaatggcatcgtgctaatctttatcaacaatttatttctactttgaatgatgcgccagtaggggcgcttgcgcactgttttccatcgcgtatttttatttgtggtatttcagcattgccacaagtctatttgcaagcactgcaagcaatcggcagacataccgaaatctatttattgtttactaatccttgccgctattactggggagatattcaagatccaaaattcctcgctcgtctaaatagtagaaagcctcgacattatcagcaacttcatgaactaccttggtttaaagatgaacaaaatgcatcgacactatttaatgaagaaggggagcaaaatgtcggcaatccactattagcgtcttggggaaagttaggtaaagataatctctattttctttctgagcttgaatatagcgatgtgttagatgcttttgttgatataccaagagataatttattacatcaacttcaggccgatatactcgatttagaggatttttcacaaataggtcagacgcttgaggattaccaaagtagtgaaaaaaaacggatcatcgccaatgatgatcgttctttgacctttcatgctagccatagcccacaacgggaagttgaggtattacaagaccaattattgcatctcctcgagcaagatgctgatttattaccgcgagatattattgttatggtggcggatattgatagctatacgccctatattcaagccgtatttggtaatgcgcccgcagagcgttatattccttttgccatttcagaccgaaaagctcgccaagtacatcctgtcttacaagcttttatcactttattagaattacctcaaagccgttttaccgcagagcaagtgcttgcattacttgaagtacccgccttagctgcacattttgccatttttgaaaatgagttgaagctactacggcgctgggttgaagagtcaggtatnnnnnnnnnngtcaggtatacgttggggattagatga

SEQ ID NO: 313318 - DNA, 153 bp, Proteus mirabilis
atgtcattaacaaaaattgttatagtcggtggtggagctggtggattagaactagcgactaaattgggtgataagttagggcgcaaaaaaaaagcagaaatgatagtcacttatggaaacctctgttacatgaagttgccacaggctcgttag

SEQ ID NO: 313319 - DNA, 1128 bp, Proteus mirabilis
  misc_feature (6)..(15): n is a, c, g, or t
ttgtcnnnnnnnnnngctattgtcaataattcatggattgaaatttcacgaagcgcactcgactttaatgtaaaaaaagtccaatcattattaggtaagcaatcttctctttgtgcagtgttaaaaggagatgcttatgggcatgatttatcgttagttgccccaattatgatagaaaataatgtgcaatgtattggtgtaacaaataaccaagaattaaaagaagtacgtgatttaggatttaaaggccgtttaatgcgagtgcgtaatgcaacagaacaagaaatggcacaggcaaccaactataacgtagaagagttaattggtgatcttgatatggcaaaaagattagatgctattgccaagcaacaaaataaagtcattcctattcatttagcattaaattcaggtggcatgtctcgtaatggtttagaggtcgataataaatctgggcttgaaaaagcaaaacaaatttctcaattagctaacctaaaagtggttggtattatgtctcattatcccgaagaagatgctaataaagtaagggaagatctggctcgttttaagcaacaatctcagcaagtgttagaggtgatgggattagagcgtaacaatgtcacattacatatggcaaatacctttgcgacaattaccgtgcctgagtcatggctggatatggtacgtgtgggaggtattttttatggtgataccattgcgagtacagactataaacgtgtgatgacctttaaatccaacattgcttcaatcaattattatcctaaaggtaatacggttggctatgatcgtacttacacattaaaacgtgactcagtactagctaatattcctgtaggttatgcagatggttatcgtcgcgtttttagtaatgcggggcatgcgttaattgctgggcaacgcgtacctgttttaggaaaaacatcaatgaataccgttatggttgatattaccagtcttaacaatatcaaaccaggtgatgaagttgtattttttggcaaacaaggtaatagcgaaattaccgcagaagaaattgaagatatcagtggtgcattgtttaccgaaatgtcaattttatggggagcaaccaatcaacgggtattagttgattaa

SEQ ID NO: 313320 - DNA, 1308 bp, Proteus mirabilis
  misc_feature (1292)..(1301): n is a, c, g, or t
atgagaacgcaaagtcattctcatatcattgaattgactcatgtatcccaacattatggtgataccaaagcacttgatgatgtgacattgactattcctgccggaaaaatggtcggcttaataggcccggatggtgtcggaaaatcgagtttaatttctcttatttcaggagccagagaaattcagcaagggcaagtgatagtacttaatggtgatatgaatgatgttaatcaccggcgagctgtttgccccaaaattgcctatatgccgcaagggttaggtaaaaatctttatcacacactttctgtttttgaaaacgtcgatttctttggtcgcttatttggtcaatcaaaacaagagcgagaagagcgcatcaatgatttacttgaaagtacggggctagcaccttttaaggataggcctgcaggtaaactatctggtggtatgaagcaaaaactggggctttgctgtgcattaattcatgatccacaattgctgatcctcgatgaacccaccacaggggttgacccattatcacgggcgcaattttgggagttaattaatcgtattcgtaaacgtcaaaccaatatgagcgtattggttgcgacggcttatatggaagaggctgaacgctttgattggctggttgcaatggatgcaggtaaggttttagccactggtcatgcggaagaattaaaggcgcaaacggcgacagatgaattagaagctgcttttattgagcttttaccggaagaaaaacgtaaaaaccatcaaaaagtgattattcctccacgggataaaagtgatgacgatattatcgccattgaggccaaagagttaacaatgcgctttggtcagtttgttgctgttgatcatgtcagttttcgtattcctaaaggcgaaatttttggtttcctaggttcgaatggttgtggtaaatccaccaccatgaaaatgcttacaggtttacttgaggcaagtgaagggcgcgcttggttatttgggcaagaggttgatccaaaagatatcgaaactcgtaaacgcgttggttatatgtcgcaagcattctcactgtatagcgaattaacggttcgacaaaatttagagctacatgccaaactcttccatatcccagaacaggatattcctcaacgtatcaaagaaatgagtgagcgttttaatttgaccgatgtggaagatatgatgcctgacggtttacctttaggtattcgacaacgcttatcgttagcggtggcagtgatccacaaaccagaaatgctgatccttgatgnnnnnnnnnntccttga

SEQ ID NO: 313321 - DNA, 228 bp, Proteus mirabilis
atgtgtggtgagcttgccggggatgaacgggcaacaatgttgcttctgggcatgggattagatgagtttagtatgagtgctatatcaattcctcgcatcaaaaaaattattcgtaacgccaattttgatgatgcaaaagcactggcagagcaagcacttgctcagccgactgcaaaggaattaatggacttagtagaaacttttactaaagaaaaaacactgtgctaa

SEQ ID NO: 313322 - DNA, 486 bp, Proteus mirabilis
atgagtgatattgcccttgccaaagcacaacatatcgctagtaaagtagtggagaatttgggcggttatgggttatttggtgtggaactatttatccaaggtgatgaggtgttttttaatgaagtatcaccgcgtcctcatgatacagggcttgttaccttaatttcacaagatttatcagaatttgcgctccatgtgcgtgcttttttaggctatcccatcggtggtattcgccaattaggtgcttgtgcttccgcggtgattttacctgagttgtctagtactaatattgtctatacggggttagaaaaagcgcttaaggcaaatcgacaaattcgtttatttgctaaacctgaaatcgcaggacatcgtcgtttaggcgtggtgcttgctcatgccgattccataaaacatgctattgaagaggcgaatttaggtgcacaagcgattttagccgatgatggtgataaccatttatcgcggtga

SEQ ID NO: 313323 - DNA, 675 bp, Proteus mirabilis
  misc_feature (638)..(647): n is a, c, g, or t
atgacgataaaacagacaattgggataaaaaaaatcgctagtttgagcttattactgctcttttttctactctcttcttctgcggttgccaaagagtggactattggtgtgttagcgttgcgaggcgacgcctcaacacaaagacattggcaaccgcttatcgataccttagatcaacaaatacccacagatagctttctgctgttaccacttaacttgtcagaaatgaagcaagcagtggcagacaagagagtagattttctattgacgaatccagcgcaatttgtccagcttgatagtgcatatccgctacgttggttactctctttacgctcgggttatgagcctgataacacaacaagaaatgtgattggtagccttattttggtgcgcaaagacagcgcaatcacatcgattcatgaattagtcggaaagcgtgttggcgccattgcaccagatgcctttggtggatatctgttaggttacaaagcactgcgtgaagaagggattgatcctgaacaggattttacattacgttttagtggttttccggctgatgcgttactttacttattacgtgatggcgatattaatgcagcgatcatcccagtttgtttattagaaaatatggataacgnnnnnnnnnnaataaagaagattatcgtccattattaa

SEQ ID NO: 313324 - DNA, 2343 bp, Proteus mirabilis
atgccagcagatgttttgtttcccgaggaaacaccttaccagaggcatgaacgatgccagcagatgttttgtttcccggggaaatactttacccgaggtatgaacgatgccagcagagacactgtttccccgggaaacacttgtgaagttttgaacactgtttcccggggaaacactgaaaaagagtctgagagaatgagtgatcgttatgtgatagaggcctggctgcgaccggccgtggaattaaacagtgccctggtgtccggcggggcggcgtttgtgtgtgcggtggccccctgggctgtggcattgtcgccgtccgtgagttatgtcaccgccggcgcgtttgccggtttttccgcactgcgtgcgcatcagggattccgggtcttacgttaccgccggaatctccggcgtctgccccgttatcaggtgacctcggcacaggtgccggtcagccggcagcgtctgtttctgggaaaagggtttcagtggcagcaaaaacacacacaacgcctgctggaaacccggcgtccggaagtggagcggtatgttcagccgccggtacattaccggctggcccggcagtttgaactccgttttgaatcccgtttcccggcggtttgccggcttttgcaaaaagacagccggctgaatccggtccgtccgttgccaccagtgggaggagatccggtgttacacggtgtggagccggatgaagtgaatgtgaccatggatttgcgtgaacgggtcggtcatatgctggtgctggggaccacccgtgtcggcaaaacccgtctggcggaagtgctgatcacccaggatatccgccgtgggaatatcacgattgtttttgatccgaaaggggatgcggatttgctgcgccggatgtgggcggaagcgcaccgggcaggacgcagtgaggagttttatgtgtttcacctgggctggccggatatcagtgcccgttataacgccatcgggcgttttggccgggtatcggaagtggccggacgggttgccggacaattatccggcgaagggaacagtgcggcgttccgggagtttgcctggcggtttgtcaatattattgcccgggcactggttgctctgggggagcgtccggattatgcgaaaattttacgttatgtcaccaatatcggggaactctatcagacgtattcgatgcaggtgatcaaagcacaactgccggatttgtttgcccaaatcgagaatgcgcagaacgcgctgacagtcgaggatgtgccccgtcatctgcaaagtgatccgaaagccgtggcgatctgggcaacagagctggcgttaagcagtgagaaagggaaaaaaatctatgatccgattctggacgggttgcgcagtgcgatccgttatgaccggacctattttgataaaattgtggcctccctgctgccgttactggaaaagttgactaccggaaaaaccgccgctctgttatcgccggattacaccaatatgcaggatccccgtccgatttttgactggcagcaggtgatccggaaaaaagggattgtgtatgtcgggctggatgcattatcggatgcggaagtggcggcggcggtgggaaattccatgtttgcggatttggtctcggtagctgggcatatttataaattcgggactcaggatggtctgccggaggaagggcacgccggaaaattaccgatcagcctgcattgcgatgagtttaatgaactgatgggggatgaatttattccgttactgaacaagagcgggggcgcggggattgaagtgacggcctacacacagacctggtctgatattgaggcccggctggggaatgctgctaaatcggcgcaggtcaccggtaactttaacaccctggtgatgctacgcgtccgtgaactgatgaccgcaaaattactgacagaacagttaccggaagtggatatttacaccaaaaccctggtatccgggatcaccgatatttccaatccgggacaggggagtgattttacctccaatacccaggacagggtcagtatggtggcgaaacccttactgttaccggcggatattattcagttaccgaaaggacaggcgtttgctctgctggaaggcggaaagttgtggaagatccggatgcccctgccggcggcggaggacgatgcgctgatgccaccggatttgcaaaaaatcgcacagtatatggagaaaaattaccgtaccggcgaaacctggtggacagccgcgtcattttcagatgcgcggcctgatacagacggaatgaaggtgacagaaatgacgccggatacggaaggaggcaacgatggcaacagctga

SEQ ID NO: 313325 - DNA, 279 bp, Proteus mirabilis
atgaaaaagaaattactctggttacccattttattcagtatggtgtcaatgccagtgtttgcagataacgctgctattaaagcgcaactggcaaaaatgcagataaaagcagagagcattcaaccgacaccgatagtgggtttaaatgcagtgctttctgataaaggcattttttatattactgatgatgggaaataccttacagcagggccgatttataatattaatggtgaggagcctgttagtatgtttataaggctgctaatgaaaaatatgtga

SEQ ID NO: 313326 - DNA, 255 bp, Proteus mirabilis
atgccaaaaatagtttcttatataagtacaatatttaatagcgtaaaaaatgctttaggaataaaagataccacgggaaatcctaatttcagtagtgttaagaatactagtgctatatggcatacagaaattttatctgaaaaaaaagcacctgttctctatatgcgacaaaatatcaataacgtaaataatatccaaagattagtatctacagaagttcttaacaaattatattggggtattattacctactaa

SEQ ID NO: 313327 - DNA, 1113 bp, Proteus mirabilis
atggcacaagtcattaataccaactatctatccctggtaactcaaaacaacctgaacaaatctcagggaactttaggaagtgcaatcgagcgtctgtcttctggtctacgtatcaacagtgcaaaagacgatgcagcgggtcaagcaattgctaaccgtttcacttcaaacgtaaatggtttaactcaagcttcacgtaatgcgaacgatggtatctctatcgctcaaacaactgaaggtgcattaaacgaaatcaacaataacttacaacgtatccgtgagttaactgttcaagcgaaaaacggtactaactctaattcagatatcacttctatccaaaacgaagtgaaagaacgtttagacgaaatcaaccgtatttctgaacaaactcagtttaacggcgtgaaagtactgagcggtgagaaatcagaaatggttatccaagttggtactaacgataatgaaactatcaaatttaacttagataaagttgataacgatacattaggtgttgctagcgataaactgttcactgaagctaccgtttctaaaggtgagaagaaagcaagtgctgatgatgctgttattgctgatttaggtgttgctggtggtactactctaaaagctggtttaacagttaaaaaatacgaagaagatggcaaagttgttgatggtaaattcgttgcaactgaaggtggtaaaagctacttagtttctgcttcagattttgaagctgatggtactactgctacacaaatcaacttaaaagcaggttcagctgttgctggtaacgaatttactgctgctgcaggtaaagacgttaaaactttaaacgttaaagatgacgctttagcaactttagacaaagctatcaacaccattgatgaaagccgttctaaattaggtgcgattcaaaaccgttttgaatctactatcaacaacctgaacaacactgttaacaacttatctgcttcacgtagccgtatcttagatgctgactatgcaacagaagtttctaacatgagccgtggtcaaatcttgcaacaagcgggtacttcagtacttgctcaagcaaaccaagtaccacaaactgttctgtctctgttacgttaa

SEQ ID NO: 313328 - DNA, 420 bp, Proteus mirabilis
  misc_feature (331)..(340): n is a, c, g, or t
atgaaatcagatattgaaatttcccatcaagcaccgcttttacccatccaagatattgctaaaaaaataaatgtagaccaagacgatattgaattttatggcaaatacaaagccaagtttagccagagtatttggtcaaaaatcacctcaaaaaaacagggtaaattggtgcttgtcacttccattaatcccacaccagcaggtgaaggtaaaaccaccgttacggtaggattaggacaagcccttaatcaattaggcaaaagtgccattattgcattacgcgaaccctccttaggcccttgttttggtctaaaaggaggagcggctggcnnnnnnnnnnggtctaaaaggaggaccggctggcggtggatattcacaagttgtaccgatggaagatctcaatcttcattttaccggtga

SEQ ID NO: 313329 - DNA, 1317 bp, Proteus mirabilis
atggaagatctcaatcttcattttaccggtgattttcatgctatcacctctgcaaataatttattagcagcgatgttagataactcgctttatcaaggtaatccccttaacattaatcctaaaaagattatttttaagcgctgtatggatatgaatgatcgcgcactacgtcatttagtgattggattaggtggcgacaaagatggagtggttagagaagatagctttgttatcaccgttgctagcgaaattatgtctatcctttgtttagcaaaagatattaatgatttaaaacagcgcttagcacgtatcatcgttgcatataactatgaaggcgagcctgttagtgctgaagatctcaacgctgtcggcgctatggcaaccttacttaaagatgcccttaatcctaatttagtacaaacgttagaaaatacccccgcgattattcatggtggcccttttgccaacattgcccatggctgtaatagcctaagagcgactaaacttgctcttcaactggctgatatcactgtaacagaagcgggatttggcgctgatttaggtgcggaaaaattctttgatatcaaatgtcgcataggcgacttacaaccagactgcgctgttttagtcgttaccactaaggcattaaaatataatggtggcttaggcaaaacacagtgggatcacgaaaatctcaccgctttagcaacggggatcgaaaatctaggtaagcatattgaaaatctgaaaaaatatggtgttccggttattgttacagtaaatgcttatgtgacagactctgctaaagagcatgaatttatcgcccaatattgccagcaaagaggatgtcgttttgccattagtcaagtatgggagaaaggtggcgtgggtggtattgaattagccaatcaggttattgatacactagaaaatgatgcaccacagtttaaattactctaccctgataatatgcctttaaagcaaaagatagagaccattgctcaagaaatttatggtgcaaaaggggtgacttacaatgctaacgcccaagagatgctaacaaaaatcgaggatatgggctttggccatttccctatttgtatggcaaaaacgcaatattctctatcagatgatcctgcattacttggtcgcccgactgattttaccattaatatccgggaagtgtatgtcagtgctggtgcaggctttgttgttgcattaacgggcacaataaatacgatgccaggattacctaaaaaaccggcagcaatggcgatggacgttgatgatcatggggcaataaaaggactgttctaa

SEQ ID NO: 313330 - DNA, 729 bp, Proteus mirabilis
  misc_feature (668)..(677): n is a, c, g, or t
atgaaaacaaatcttccatccgtattggctaaggttaccgcgggaatgggtttactgctaattatttctagtcctacttttgcggtgaataatcctgtgccgcctcaaattgaggctaaatcttacgtattaatggattataacagtggaaaaatacttgcttcagagaagcctgaagagcgcctagatcctgccagtctaaccaaaataatgagtagttatgtggtaggacaagcgataaaagagggacgtatgtcgcccgatgatattgttattgttgggcgcaatgcttgggcgacaggtaatcctgttttaaagggctcatccttgatgtttttaaaaccaggcgatcgagttaaagtgatcgacttaaatcgaggtatggtgatccaatctggtaatgatgccagtattgcgttggcagagcatgttgccggtagccaagaaacctttgttgatcttatgaatacctatgccgcgaatttaggtttaaaaaacactcactttaaaacagtacacggtctagattctgaagggcagtacaccacagcacaagatatggcgttattaacagctgccatgatccgcgatgtaccttcagaatatgatattcataaagaaaaagaatttaccttcaacaatattcgccagccaaatcgtaaccgtcnnnnnnnnnnaacaatattcgcccgccaaatcgtaaccgtctattgtggaataaaaatatga

SEQ ID NO: 313331 - DNA, 294 bp, Proteus mirabilis
gtgccgctctatttcgctaaacaccgtccagttattgagcgggatggtaccttgattatggttgacgatgatcgaatcgacctaaaagctggagaggtgatcacacaacaaaaagtacgttttagaacattaggctgctggccattaacgggcgctattccttcacaagcagacacattacccgccattattgaagagatgttaatttccaccagtagcgagcgacaagggcgtttaattgacagtgatcagtctgcttcaatggaacttaaaaaacgtcagggttatttttaa

SEQ ID NO: 313332 - DNA, 291 bp, Proteus mirabilis
atgtataaatcattttatggagggattgaaacgaaaatacttcttgaagatatacaaccagattttgatacgactagtgaaatgtttgaggaaaaaacctttttttatcctcattatttagcgggtatgagtatgagtaaaatgcgtcatgatatttgcataaaaattatgactagaataaatgcatttattaataatgaaacccaaaaatatgcaagcatgagtttatccaaaaatatatggaaagttattgataagggggtattttctttatacggaaatcaatattag

SEQ ID NO: 313333 - DNA, 885 bp, Proteus mirabilis
ttgcaagatcaaagccaaaagcaaaaatatactgaaacaatactgtcattgactctttctattccatttgattggaaagacaaccgtacttcggtagcaataaattatagccaatcacgaaacagtcaatcttcaacgctatctattactggctctagtggagatcaaagtgatttttcttggtcattatatggtggttatgatcaccatcgttatggtaaggaacatttatcgacaaactttggtgctggctttcaacaaaatactcgcttgggaacactgagagcaggttttgatcagggtaaaaattatcgtcaattatccctaggtacgtcaggaaccttagttttgcattctggtgggataactttaggcccttacactagtgatacctttgccttaattcatgctgatggggcgcaaggtgctgttgtacaaaatgggcaaggagccgtcatcgatcattttggttatgccattttgcccactttatcaccataccgtcgcaataatatctcccttgatacccgccatatgaaccgtgataccgaattgtcagggggaagccagcaagttgttccatattcaggtgcagtggctaaagtcaattttgcaacaattacaggtaaggcggtactaatagacgtgaaaaagaaagatggcagtataccaccaatgggcgctgaagtgctcagtgatgaaggggcggtaataggaatggtcggacaaggagggcaagtttatgcccgaattaatcataattcaggaagactacttattcgttggggaaaaagtgttaatcaatattgtcgagttccttaccagattgatttacattcatctaaaaaggtgatttatctaacgacaatttgtgaggataaataa

SEQ ID NO: 313334 - DNA, 183 bp, Proteus mirabilis
atgaaaaagctgactcttcaagagatgacagatgcccaacagatgcgcgttattaccgaaatctccctcgaagtagaaaaagccagcaaaaaagccctttcccagaagaaaaaacagaaattagtctctagtgatgaaacctatagctggtctgcccaaaaccatcgtcgcgggtatcgttag

SEQ ID NO: 313335 - DNA, 3228 bp, Proteus mirabilis
atggctaaaagaacagatattaaaacaatcctgattttaggtgcaggcccgattgtgattggtcaagcgtgtgaatttgactattcaggcgcacaagcgtgtaaggcactgcgcgaagagggatatcgtgttgttttggtaaattcaaatcctgctaccattatgacagatcctgaaatggcagatgccacttatattgagcctattcattggcaagtggtcagaaaaattattgagaaagagcgccctgatgccatattaccgacaatgggcggacaaacggcattaaactgtgccttagaattagagcgtcaaggggtgttagctgaatttggcgtaacaatgataggtgcaacggctgatgctattgataaagcggaagatagacaacgctttgataaagcgatgaaaaaaattggtctggatacggctcgttcaggcatcgctcatactatggacgaagcatttgcagtggctgagcaagtgggtttcccttgtattattcgcccttcatttactatggggggaacagggggggggatcgcctataatcgtgaagaatttgaagaaatttgtactcgaggtttagatttatcaccgaccaatgaactattaattgatgaatcattaattggctggaaagagtatgaaatggaagtggtgcgcgataaaaatgataactgcattatcgtttgctccattgaaaactttgatgcgatggggatccataccggtgattctatcacggttgctccagcgcaaacgctaacagacaaagaatatcaaattatgcgtaatgcctcgatggcagtattacgcgagattggggttgaaaccggtggctccaatgtgcaatttgccgttgatcctaaaacagggcgtttaattgttattgaaatgaatcctcgtgtttctcgctcatcagcattagcgtcaaaagcaacaggtttcccaattgcaaaagtcgcggcaaaacttgcagtaggttataccctcgatgagttgatgaatgatatcactggaggaagaaccccagcctcttttgaaccttctattgattatgtagtgactaaaatccctcgctttaactttgaaaaatttgccggtaccaatgaccgtttaaccacgcaaatgaaatctgttggtgaggtgatggctattgggcgtactcaacaagagtcaatgcaaaaagcattacgcggactagaggttggtgcaactgggtttgatcctaaagtaaacctcgacgatcccgaagcgctcaccaaaattcgtcgtgaattaaaagaagctggatcggatcgcatttggtatatcgcggatgctttccgcgctggaatgtcggttgatggggtgtttaatctcaccaatatcgatcgttggttcttagtgcaaatagaagagattgttcgcctagaagagcaagtggcacaacttggtttagcaggtctaaatgctgatttcttgcgtcaattaaaacgtaaaggttttgctgatgcacgcctagctaatatcttgaatgtgaaagagcaagtcattcgccaactacgggaacaatatcaattacacccagtttataaacgggttgatacttgtgcggcagaatttgctacggataccgcttatatgtactccacttatgaagaagagtgtgagtcggatccaaatcaagacaaacctaaagtgatggtcttaggtggtggtccaaatcgtatcggtcaggggatagagtttgattattgttgtgttcatgccgctctagcattacgggaagatgggtatgaaaccattatggtcaattgtaatccagaaacggtttcaacggattatgatacctccgatagactttattttgagccagtcacccttgaagatgtattagaaatagtacggatcgaaaaaccacaaggcgtgattgtgcaatatggtggtcaaacgccattaaaattagcaagagctttagaagctgaaggggtgcctgttatcggcaccagtcctgatgcaatcgataaggcagaagacagagaacgtttccaaaaagccgtggataagttagggttaaaacaaccagaaaatgccacagtgacgacattagaagaagcggtagagaaggcaaaatctattggttacccgctggtggtacgtccatcttatgtccttggtggacgagcaatggaaattgtttacgatgaaattgatttacgtcgttatttccaaacggcggtcagtgtttctaatgatgcacccgtactgttagaccgattcctagatgatgccattgaagtagatgttgatgcgatttgtgacggtcagcaagtggtgataggcggtattatggagcatatcgaacaagcgggtgttcactctggagactctgcttgctctctacctgcttatactttaagccaagatattcaagatataatgcgcaagcaagtacgtgaacttgcttttgaattaggcgttaaagggttgatgaacgtacagtttgcggtgaaaggtaatgatgtttatcttatcgaagtgaatcctcgcgccgcacgtacagtgccttttgtctctaaagcaaccggtgtgccattagcaaaagttgctgctcgcgtgatgataggacaaagtcttgaacagcaaggcgttaccaaagaggtgatccctccttactactcggttaaagaggtggtacttccctttaataaattctcaggtgtcgaccctattttagggcctgaaatgcgatctaccggtgaagtgatgggggttggtgctacttttgcacaagcttttgctaaagcgatgttaggtagcaattccaccatgaagaaaaaaggaagagcgctactttcggttcgtgaaggtgataaaaaacgtgtcgttgatttagcaactaagctattgaaaaatggttttgagttagatgcaacacatggtactgccattgtcttgggggaagccggtatcaatcctcgcctagtgaataaagtgcatgaagggcgacctcatattcaagatagaattaaaaatggtgagtatgactatattgtcaatacgactgccggtcgccaagctattgaggattcaaaactgatccgccgtagtgcattacaatataaagttcactatgacactacattaaatggcggatttgcgacaacactgtcattgagtgctgatcctactattgatgttatttcagtccaagagatgcatgcaaagataaaaaaatcttaa

SEQ ID NO: 313336 - DNA, 564 bp, Proteus mirabilis
  misc_feature (549)..(558): n is a, c, g, or t
atgaatagtttgattggctcttctgtttatcgtcgccaactcacttgtggcacattaagcgtaacgccaaattgctcattagaacatcttgatgaactttttgatattgcggaaagacgcaaccctaagcgcgcttttttgtttgtcagtaaagtattagggcgccatattcctgtttcaccgaagaaaatgcgtgaaacttatcaacaaatggccaaacaatttcctcaatcactcgaaggccctattctttttattggtatggcagaaactgcggtcggtttaggtgcgggaatttttgatgaagtaagagatcgctatcctcaagccctctaccttacttcaacgcgccatcctattgctgatggtgaattattctgtaaatttaaagaaaatcacagccatgcaactgatcacctactttatttgcctcataacctagaacaacgccaatggatccagcaagcgaaaaccattgtgttaattgatgatgaagcaaccacaggtaatacctttcttaacttgctgtctgcattacgtgaagaaggnnnnnnnnnnaggtaa

SEQ ID NO: 313337 - DNA, 261 bp, Proteus mirabilis
  misc_feature (207)..(216): n is a, c, g, or t
atgaactcattcagcacactaaaaacactattttgtggctctttgctggcactgagtctagtgaatacaacacaagcgggtgtttcactggatagaactcgtattgtattaacgggtaatgaaaactcagccagtgttaatttaaaaaataccagccctgatattccttttttagcgcaatcttgggttgaaaatgaaaatgggcannnnnnnnnngatctcttcacccttagtggcacttccaccgttacaacgccttga

SEQ ID NO: 313338 - DNA, 1791 bp, Proteus mirabilis
atggttgattttagagctagcagaaatacaaggtgggatccctctattgatacaggctttttagatacagcttctctatatcaagataataatcgttatggtgttgatttttcatcgttatttaaattatcgcctcagttttctatttctttttccggtcaatatcaattggaaaaattagacagtcatgagcttgaacttcccatgggttttgatttcgtgaccgaggggcgagcagggcaacgtcatgaagtcaatttagcgttagccacagattggaaaccattaccttggtttgcgatgaatattggcggtaaatatcattactatcatctgacggatacctttttaaataataaacggaagaatagggttaaaaattacgagaaaacagcccctatccgcggttatctgatctcttatcgacgagtattaaccccagaagagtatttactctatcgcgcggttaacaaaattgatgtcgatactttacctgacgagttaaaaaattaccgaaattctgctgagctgagtaaaaaaattagagactttcaacaagcggttttagtttaccctgaaggtggcgctttgctagaggaaatcaaggagcaggttgctaggccatatcttcagagaatacagcatgatatggagcatgaagattttcttcgtaataatcatggaaagatgcaaataaaaaacgctaaagccatcccgatgaaaagagagtttagcctttggttatttgatgaaaatggcgtactacttaagagtaagaatattttacttaatggttttcttgatatggaggaaaaagtccctcatccagtgacgggtgagttagtttatcgctttgaaaaagatgttattaatcctcaggcattttctctatcagaagatattcaagatccctacgcactggagcctagctatcagcatggcgcattttcccctttaatctctgccaccctttatgccaacgatatggtgcgtttttatggccgttatactgagcaattgcgtttgcctaacttatttgaagataccagtggtttttcaggctctaaagctcgctattatggttttaagttaaagccagagcgtgccaaaagcagtgagtttggtgtggttgttgattttacgcattggttgaatatagagcgccacgctgatattaaaattaattactttaaaacgaacattgaaaatgtatttgatagagatgctaattggcaaattagacagttagaaaaacaaatattagaaggtgtagagttacaagcccggtttgataatggatttattttctttgataccgcattagtgtatagccataaaaataaagtctgtgatgaaaatgctttttatgagcttgatgcatcaggattatcgggtattaaaaactgtatgacagggggataccctggcggatttttgcgcacctcaatgcagcctaaatactcagttaacctacatttaggcacgcgctggctaaatgataaattagaattaggtagtcgctggctctattcatcagaagttgaaaataaagatgaaaaatggcttaaagaaaatttacctaatagctattttggcataaataataatccgatgcgttgggcaaaagtatttactattgatgcttatgcaacctatcaatatagccccaatttatcttttgaaataacaggaagtaatttattaaatgaatattacattgatccgctgactcgttctggtatgccggcaccaggaagaagtttgcgattaggtgtaacagcccaattttaa

SEQ ID NO: 313339 - DNA, 252 bp, Proteus mirabilis
atgggaaaagatatattacatagaacatccatgctacaaagtattgaatcctactctcatattgatgcagtgatccgtttaaaacagaactacttaacacctgaaaaagaggtagatagttttcaatatgaaggctgtaatggcgtggcaggagatagccatgatgttataaaacacattttttaccccagacagtcagaaagcctatctgtcaccaacgcaaattttaccctccgttcgctatatttctga

SEQ ID NO: 313340 - DNA, 690 bp, Proteus mirabilis
  misc_feature (667)..(676): n is a, c, g, or t
atgaaatacgcattaggctctgtactttattattggcaaaaagaaacacttgagacattttatcagcaagcaaaacagagcgatgctgatattatctacttaggcgaaacagtctgtagtaagcgccgtgagactaaaccacaagattggattaatctggccaaagaagtggctaaaagtggtaaacaagtgatcctttctaccttagcactactacaagcgccttctgaactaaaagagatagcaaagctggtggataacggtgaatttttagttgaggctcatgattttggtgtgatcaatatgctttatgagcgtcatttaccttttgtagcaggccatggattaaactgctataacgcttatgcactacgtttattacagaaacaaggcatgatacgttggtgtatgccggttgagctgtctcgtgagtggttaaataatcttttaattcaatgtgaagaattagcgattagagataaatttgaagtagaagtattcgcttatggtcatcttcctttggcttattcagcgcgttgttttactgctcgctcggaaaatcgtgctaaagatgattgtgaaacctgctgtcaaaaatacccacaaggccgtcaggtattatcacaagaaaaccaacaagtgtttgttttaaatggtattcaaacgnnnnnnnnnnctgttacaatttag

SEQ ID NO: 313341 - DNA, 267 bp, Proteus mirabilis
  misc_feature (28)..(37): n is a, c, g, or t
atgcgttgttatcgaggggaatggtggnnnnnnnnnnaaattcctgttgttctagtggttgggatccaacctggttgtgtcaatcactcaattctaaccgcgcaatctattattaatgatggtttagaactagttggttgggtggctaatagaattaatcctgggttaccgcactatgcaaaaattgtagaaaggttatctcagcatattccagccccattgattggtgaaatcccgtatttattgactgaagaagtgctcgggtga

SEQ ID NO: 313342 - DNA, 366 bp, Proteus mirabilis
  misc_feature (339)..(348): n is a, c, g, or t
atgttaacacgcttgtttgttacggggacagataccaacataggtaaaactgttgtcacccgagcacttcttcagtcaataaatcgtggcgggacaacagcagtgggctttaagcctatcgcaaccgaattacatgaaacggttgagggtaatcgtaatcgtgatgctcagattattcataattcctcacctattgacgctcgctacgacgaaattaaccctattttgctagaaaattgttatgtaagtgaaaatgcaatagacttccatcaaatttcaagtgaactaaataatttgggccaaaaagctgaatgcgttgttatcgaggggaatggtggnnnnnnnnnnaaattcctgttgttctag

SEQ ID NO: 313343 - DNA, 1476 bp, Proteus mirabilis
  misc_feature (1437)..(1446): n is a, c, g, or t
gtggcaatccattcaagagctgggcaacatactcgtcaaagcgatctgattaatgtagcgcaattaaccgcacaatattattcactaaaaccgcaagcaaatcagaatgctcatcgtgtgaaatttggtacatcgggtcaccgaggcagtgccaaacgtcatagctttaatgaagcacatattctagcaattgctcaagctattgctgaagtccgagctaataatggtgtaacggggccttgctatgtaggtaaagatacccatgcattatctgagcctgcttttatttcggttttagaagtgcttgctgcaaataaagttaacgtgattattcaagagaataatggttataccccaacgcctagcgtttccttctctattttaacttacaatcaagggcaccaagacattgctgatggtatcgtcattacaccatcacataatcctccagaagatggggggataaaatacaatccatcaaatggtgggcctgctgatactgatttaacctctgtgattgaaaaacgcgccaatgaattattggaaaataatttattgggggttaaacgtctttcttatgatgatgcattagcgagtggttatatccacgagcaagatttaattatgccttatgttaaagcgttaggtgacgttgttgatatgaaggcaattaaaaaagcgggtttgaaattaggtgtcgatccactgggtggttcaggaattgaatactggaaacgcataggtgaatattacgaacttgatcttgagttggtaaacgatcaggtggatcaaactttccgctttatgacattagatcatgatggtgtgatccgtatggattgctcatcaccttgggcaatggaaggtttattgcaactgcgtgataaatttgacttagctttcgccaatgaccctgattacgatcgccatggtattgtcactccttcgggcttgatgaatcctaaccactatttagcggcagcgattaattatctttttcgccatcgtcctcagtggtcaaatgaggtaaaagtgggtaaaacactcgtctctagcgcgatgattgaccgagtcgtggctgatttaggtcgtgaacttgttgaagtacctgtcggctttaaatggtttgtgcaaggtctattcagtggcgagtttggttttggtggtgaagagagtgcgggggcatcattcttacgttttaatggtaaaccgtggtcaacagataaagatggtattatcttatgtttactggctgctgaaataaaagcggtaacaggtaaagatccacaacaacattataacgagttagcgcagcgttttggctctccaagctataatcgtatacaagcatctgcaactcatgagcaaaaagcgttgttgtcacgattatcaccagaaatggtcaccgcaaataccttagcaggtgatcctattacnnnnnnnnnngccttcgtcggcagcgtcagatgtgtataa

SEQ ID NO: 313344 - DNA, 201 bp, Proteus mirabilis
atgtcagatagctatttagctgagcctgaaaataaacagttatttgataatctcaaacgaaatcaagataataaccggactttctatcatcataatatttttgactcgatattaggctgtctaggttactcatcacccgatggggggattaataatcaaaataatctctgttttggtgacatagctagcgaagcacattaa

SEQ ID NO: 313345 - DNA, 561 bp, Proteus mirabilis
  misc_feature (515)..(524): n is a, c, g, or t
atgcagttagttatggtttatacaccttggatcactgtgatatgtgttgttgcgtttattggtatagcgactgcagattgggatcgctggtggagtgatgctcgttatcaaacaacagataacgcttacataaaagcggactcaacgatattgaaatcacgaatgactgggtttatttctcagattaataaagaggattaccaagtagtaaaacgtggtgaggtcattgctgaaattaataagaaagaacaaatattaaatcggcaagcggcattagcagagtatcaaaaagcccaattagctttagataatctcactgaagaaattaaagaatatcaattaaatattgagaaattagctaatcgttatcaagcatcagttattgatgttacccaagctaagcgcagtccaatgttgcgtaaagatttaattaatagtggggcaatcacacaacaaaattatttagatgctcaatctgatttgcaacgtttaatgaaattacaaagtgctgcgannnnnnnnnngagtgggatcaggctaaacaagcactggtattactaa

SEQ ID NO: 313346 - DNA, 264 bp, Proteus mirabilis
atgcaaaaatatcagcaagcagcagttcctgataatttattaagctgtcactatgcaacataccaaggcaaagacttagtcggacatattcctatcgatagcttaaaaaatatagacttaatggataaaaagcaaacaggcattgctgttgcaggtatgccagcgggtagcttaggtatgtatgcaggggactataaagaaccttatcaagtcattgcttttgataaagcaggtaatcaatcactatttaaatcatacaattaa

SEQ ID NO: 313347 - DNA, 1116 bp, Proteus mirabilis
atgaatacctatgttcagcgcgatgaaagccgcaatccatcacgtaaaatggattatgatgatacaactgttcgtaaccaaaccgtctttatgtttggtgatcatatgttaagtgtcggcggtcaatatcgctatgaagagctgaaagatgaaggcaataagcttaaaggtaataataagctagatcgctatagttgggcgctgtttgctgaagatgagtggacattgacaaacgacttcgctttaaccgccggtttacggatggataaagatgaaaactttggtactcactggacaccgcgagtttatggtgtttggcatttagctgatgaatggacattaaaaggtggggtatctactggatatcgttcaccggatttacgtcaagcgacagctacttggggacaagggactggcggtggtcgttatgatgcagttatttacggtaatcctgacttaaaaccagaaaaatcggtgacagaggaaattggtattatttgggataatcgtgataacttaacggcaagtttgacgatttataatactgattttaaagataaaataacagaagttcgtcgttgcgatagtcgttcagacaaagcaccgggtatgcgcgattgtacattagctgatggtgttggtaatagtggcgacccttatgattttgtaagtgatagaactaatgttgataaagccaatatgcgcggtgttgaagttactgctaactggattatttcccctgaatggaatttagcagcaaactacacgttcacagatacggaacaaaagagtggtgatttcaaaggtaagcctctgaataagcaaccgcgccatatggcaaacgcgaccttaaattgggaaaccacccctgaaatggaaacttgggcacgcattaatttccgtggtaagacatcagaatatttatcacgtacttcaatgtctaagagcacaccttcatacgcctttgttgatgtaggtactagctatagtctaacgaagcaactaaatctgatcggtggcgtctataatgtttttgatcgtcgcatcgaaagagataattacggttcaaccttagaaggccgtcgttataacatcggattaaactacaacttctag

SEQ ID NO: 313348 - DNA, 627 bp, Proteus mirabilis
atggtagtgttaaagaaaaataaaattgcgcttggcgttgttgctgctcttgcatcaagttttgtgatgacagcttccgcagaagatcctgaaaggttactggtgacaaccgcttcgggatttaaacagactgttgaagatgctccagcttctgtttcagttgtaactcgtgaacaattagaaacaaaatcatatcgtgatgtgactgatgcgctaaaagatgttccgggggtgctagtgacagggggcggtagtagctctgatattagtattcgtggtatggatcctaagtataccatgatcttagtcgatggtaagcgtgttgcatctcgtgaaacgcgtcctaatagtgataactcaggtattgaacaaggttggttaccgcctttacccgcgattgagcgtattgaggtagtaagaggcccaatgtcttctttatatggctctgatgccatgggaggcgttatcaatattattacgcgtaaagcgcaaaaagaatggaactttagtttacgtggtgacacaacgttgactgagcgtaaaaatgaaggaaatacaggacaaggtagtttctatgctgcaggtccattgattgataatgtgttaggtctaaagctgcaagggtaa

SEQ ID NO: 313349 - DNA, 354 bp, Proteus mirabilis
  misc_feature (337)..(346): n is a, c, g, or t
atgaatgaaacacaattaacccatcttcagcaattagaagcagaaagcatttatatactgcgtgaagttgtcgctgaatttgaaaatcccgtcatgctttactcaataggcaaagattcttcggtgatgttgcatctagcacgtaaggctttttatccggcgaaattaccttttcctcttttacatgttgatacgggttggaaatttcgtgagatgtatgagtttcgcgataaaacggccaaagagtatggttttgatctcaaagtttatcgtaatccccaaggggcacaattggggatcaatccctttattcatggtagcgccaagcatacagatnnnnnnnnnntatcatga

SEQ ID NO: 313350 - DNA, 1422 bp, Proteus mirabilis
atggattacctacccttatttgtggaattaaaacagcgcccagtattactggttggcggtgggcatgtcgctgcgcgtaaagccgtactgttattaaaagcgggcgctcggttacgtgttatcgcgccacagttatgtgatgaattgcatcttgcttatcagcaaaatcaaattgagtggattgcagggcaatatcagtcagagtatttacttggcatgatgttggtgatcgtggcaacagacgataaggtattaaatcaacaagtgtatctagatgcgcaagcacgccacatttttgtcaatgtcgtcgactctcaaccccaatgctcttttatctttcctgccattatcgatagaaatccgatattaattgccatttcatcagcgggcaaagcccctgttttagttcgtatgatacgggaaaagctagaggcattattgcctacctcattagggactatggcgactattgcggggaaatggcgcaataaagtgaaacaaaaactgactggttttcaagcacgttgccgtttctgggagcaagcgtttagcggcaaatttgcctcattagtggcaagtggtcaattaatacaagcgcaagcacagctcgaacaacaactgtctcatccagatagcccacaaggtgagcttgctttagtgggggctgggccgggtgatgccgggttattaaccttacgaggtttgcaagttatccagcaggccgaggtggtactttatgacagtttagtcagtgcagacatcttagaactggtacgccgtgatgctgatagaatttgtgtgggtaaaagagccgggcaacacagtacgttgcaagaagaaatcaatcaattgatcgtgaaatatactcagcttggtaaacgagttgttaggcttaaagggggcgatccttttatttttggacgcggaggagaagagcttgaaattgcggtacaacatggcattccttttcaagttgttcccggtgttaccgcagctagtggggccagtgcttatgcgggtattccattaactcatcgtaactatgcgcaaagtgtcacttttatgactgggcattgccaatcaggggggatagagccagattggcaagctttagcgcaagctaatcatacgttagcaatttatatgggaacgacgaaagcagaacttattagccagcgtttaatagagcaaggtcgttcaccactcacccctattgccgtcattagttgcggtacacgccatgatcaacagatcttaacgggaaatttaacacaattagcgcaattagctaaacaagctcccaccccggcattattaatcgttggagaagttgctgcattacatcaccaacttgcgtggtttggtgatagacaaactcaacatacctctgccatccactcatctttggttcattttgcctaa

SEQ ID NO: 313351 - DNA, 1626 bp, Proteus mirabilis
gtgtttactagccgtaaccctgaagcgtatccttacattagtgagttttggaaaaaatatcaggttgaatatgagttaagcgaggatgataaatatacctttaaagataaggactatttttcaggtattggttatgtagataatgaacctaacttacgatataaacctggtagccccacatctattgaacatgtcacacctccaaagcattatgttgaaaataataataacgaaattcccaatagctttttaaaaagccaaagtggtaacgcatcactctcttatatcggagatgacggttacttaggtttttctgtcactgattttcaaacatcgtatggagtgccaggctatgcttatctcacaactaaaacaactcgagaaaggtataaacctgtttcggtttcaaatagtaatcgaagaatagatatacaaggaaaacatgatcatttagcaccatttttaagagacagtgctttttattattcttattctgaatctaaagatgaagagttagtcggccaaattgcttcatcggtatttaatacaaaaagccatcagttagctttagaaactgcacatactccgctatttaatcgacttaatggtgcgtttgggatcaacggtaattatcgtgatctgaaaacgtctggttatgatgcttatttacccagtgtattaaccaaagagtacggaatatattgggttgaatcgctaaatttatctccttttgagctcactgctggatatcgtaaaggttacactcaacataatctcaatattccagcgaattataatcgtggtagagggcaaggttctaatttacaaaaccgtcattttgatacaagtgcaaatacactcgctctatcttttacaccaattgatgaatggacattaaaactacaacaaaatatttcttatcgagcaccagaaattaatgaactttatacacatggccctcattatgcttatttaattgaagaacaaggaaacagtgaatttaataccgaaaaaagcaaaagtattgaattatcatctgttattgagattggcaatttctctaataaacttaatttgtataaaacagactacagtggttttaaatttagacgattaacgggtatcagtcgtggtgctggtcctgttatggaatgggatgacaccgatcttgaaacaaaaggattagaatatgaatttaaatatttatatgaaatgcctcatgatcacaatctaacatttacactatttggtgattttgtcgaaaataaaagcaaaagaaaactgtttattgcaggtcactatttgccaaatttacctaatgaaaagcatggtatcagtatttattaccaacatgatgaattaactgcatttagtagtgcaacttactataaaaaacaaaaagaaagcggtgggttaatgtatggtggagatatggcctttccttcctatacgttagttgatgcggggattggcaaaaaataccaccttgataaggtagatgtttcggttgattttattattaataatctcaccgatactgaagcaagacctgcatcttctcaattgaaatatttagtcccattaccgggtcgaaattatgggataaatgtcaaaattgatttttaa

SEQ ID NO: 313352 - DNA, 261 bp, Proteus mirabilis; identical to SEQ ID NO: 27108

SEQ ID NO: 313353 - DNA, 444 bp, Proteus mirabilis; identical to SEQ ID NO: 284212

SEQ ID NO: 313354 - DNA, 780 bp, Proteus mirabilis; identical to SEQ ID NO: 295924

SEQ ID NO: 313355 - DNA, 543 bp, Proteus mirabilis
atgaaaaagtttttattattaggagcaatgagcgcattacttatttctgctaatgccaatgccatatcgatgaatgtgcaagcgggtaaacattataccgatgtacaagcaggtttaggtgatgctgattctggactttcttttaacggtaactgggcacgtagtgatcacgatggtcaattaggtagtttaggtgcaaaatttgcgttacctcttggcccattctcagcaagcgttggtggtaaagcactttacctctcccccaaaaatggtgatgacggcgcggcattagctggtggtgttggacttaattggcgtgttttaccttcactgagtgtttatggtgaagcttatgcttcgccggaaggattaacctcaggaagtaaatcctattatgaagctgatgttggtgctaaatacacggtatttaaaccacttcatgttaatgcgggttatcgggtgattgaaattgaaaacgcgcataatcacagtaacaataaacttgctgatggtttctatgtaggagctggtttaagtttctaa

SEQ ID NO: 313356 - DNA, 1212 bp, Proteus mirabilis
gtgaaaaatcgcactataggcagtgtatttattgttgcaggaacaacaattggtgcaggaatgttggcaatgccacttgctgctgtgggtattggctttagtaccatggtgttattgctggtgggcttatggctattaatgagttacaccgcgcttttattagtggaagtctatcaatacaacgatccccatacaggccttggctctattgcgaaacgttatctgggtattggaggacaagtcgttacaggtttagctttgctacttcttatgtatgctttaacaacggcttatatcagtggtgcgggtgaactattagcttcgactttatcttcttggattggtcataagataaccatcacacaaggtatcattatctttacagttattggtggtgcggtagtcggtattggtaccacttctgtggatatgattaaccgcttactctttacagcaaaagttattttcttaatttttatgctggtagtcatgttaccccatgtggaaaaagtcaacttaacctctatgcctatcgctcagggactcgttctttctgcgatcccggttatttttacctcttttggtttccacggtagtgtacccagtattgtcagttacatggatggcaatatcaaaaaactacgcctaatatttatcgtaggtagcgcaatccctcttattgcttatattttatggcaattagcaacattaggagctattcccaccaccacctttatggggattttagcccaagaatctggcttaaatggtctactcaccgctatccgtgatgtggttgctacaccgcgagtcaatattgctgtcaaccttttcgcagcccttgcactcgccacctctttcttaggcgtagcattagggttatttgattatctagctgatttatttaaacgcagtaatcgcgcatctggtcgttttcagtctggtttattaacctttgttcccccgctattctgtgcgttatttttccctaactttgtgcaagccttagcctatgccgcaattgctttatctattctcgcactattattaccagcacttctggtatggaaagtaagacagcaaaagcagactacagagcattataaagttaaaggcggtaagccagccttagctattgtatttatctgcgggttagtagtgattggtattcaaatagcgattacctttaatatattgccacaagtgggttaa

SEQ ID NO: 313357 - DNA, 741 bp, Proteus mirabilis
gtggggattgagctggtaggtacagcagcggctgaaacacgtgatcctgagaaatcattacctaaggcgattaacgctattcctattcgtattattactttttatgttttggctttggcgattattatgtcagtaacgccgtggcgttcgattttggcagacaaaagcccgtttgtagaactctttgtcatgattggtattccagccgcagccagtttagttaactttgtggtattaacggcagccgcctcttcagcaaatagtggtatcttctcaaccagtcgtatgctatttggtttatcgaaagagggggaggcaccaaaacagtttagccagctatcaaaacgttcagtacctgccaatggtttactctttacgagtctctgtttatcttgcggtattgtgctaatttattttattccagatgtgatgcgggtatttacgttagtaacaacggtctctgcgttattatttatgtttatttggagtatgatcttatgctgctatttagcatatcgtaagaaacgtcctcaattacatcaacaatctatttataaaatgccattagggatagtgatgtcatggctatgcttagcattttttgtgtttatggtcgtgttattggcatttgaacatgatacccgtcaagcactgatggtaacgcccatttggtttattgctttaggaatagggtatcattttgtgaaaaagcgtaaacaaaaagcacaattaaaaaattaa

SEQ ID NO: 313358 - DNA, 705 bp, Proteus mirabilis
  misc_feature (590)..(599): n is a, c, g, or t
atggaagagcaaacagaagttactcagcccgttagagtgaaaaatgccactctacaacgcgggctaaccaatcgtcatatccaattaatcgctattggtggtgctatcggtactggtttatttatgggttctgggaaaaccatttcgctagctgggccatcgattatttttgtttacatgataatcggctttgtcctgttctttgttatgcgagcaatgggagagctattattatcaaatttagaatataaatcatttagcgattttgccggggatttattagggccttgggctggcttttttgttggatggagttattggttttgctgggttatcaccggtatcgctgatattgttgccattacctcctatattagttattgggcgcccaattttcctgaatggggaacgtcttttatttgtgtgctgacactacttattttgaatttagccacagtaaaattatttggggaaatggaattttggttttcgatgatcaaaattaccgctattgtctctttaattattgttggtatcgtattgattagcataaattttcaatctccagccggccacacggcaactattgnnnnnnnnnnattgaaaatatctggaatgatggcggtatgttccctaaagggatcagcggattttttgctggttttcaaattgctatctttgcctttgtggggattgagctggtag

SEQ ID NO: 313359 - DNA, 240 bp, Proteus mirabilis
  misc_feature (203)..(212): n is a, c, g, or t
atgtcatttactaaatcaatgcttgcactcgctgttatggcggtttcttttactagtcacgcagccaaacaggctgatttaatgattgtcgatggcacagtgttaacaatggacgcacaaaatcaggttatcgaacaaggaacggttgttgtaaaagaaaataaaattatcgccgttggggggcctgagttaacacaagaatnnnnnnnnnncaagaataccaagccaacaaagtgttag

SEQ ID NO: 313360 - DNA, 1185 bp, Proteus mirabilis
gtgttagatgtggatggtgatatcgtgatgccaggattaattaatacccatacacatgcatcaatgacggtttttcgctctttagccgatgacgtgccagaccgattacatcgctatattttccctttagaaaataaaatggtgtctcgcgatatggttcgcgtgggagcaaacctcgccaatgttgaaatggtaaaagggggagtaactacctatgttgatatgtattattttgaagatgaagttgctaaaacggttgataagatgggaaatagagccatcttaggtgaatcagtgattaattttccggtggctgatgcacaaacccctgaagaaggcattcaatatgctgtcaattttattaatgaatataaagatcacccgcgcattattcctgcctttgcacctcatgcaccttataccaataccacagagaacctgcaaaaaattgctaaactctcggtagagcttgatgcccctgtgatgatccatttagcagaaaccgatagagagaaagaagaaattgcaaaacgaaccgatggtaaaagcccagttcaatatatggcagatattggcgctttaaataataaagtcattgccgctcatgcgattatggttgatgagcaagatattgatttattaaaaaaatatgatgtaggtgtggctcataatattagtgctaataccaaatcagccaaaggtgtttcgcccgttgttgccatgctagaaaaaggtgttcgtgttggtttagggactgacggtccaatgtcgagcaatacactcacaacgatgaatgagttaaatttagtaggcaaaattcataaattagagaataaagatcgcgccgcaatgccaccattaaccgtcgttgaaatggcaacaataggctcagccaaggcattacatatggaagataaattaggctctttagaatcgggaaaacttgctgatattattgttgttgatactaaagctcctaatatggtgcctatgtatagcccatatgcagcattagtttatggtgcgaatggaagtaatgttcgtcataccattgtagatggtaaaattttgatggaagatcgccaactgttaaccgtagatgaacaagcgattatcagtgaagctcaaaatttcgcgaataaagtacgccaaaccgttgttgatagtggtgaagtcgttaaatag

SEQ ID NO: 313361 - DNA, 279 bp, Proteus mirabilis
gtgtatgagcttgctggtgatgaagcttggacattagagcaattggctaaggaattgactaaacaaagcgggaagcaagtgatatataacaatttaagtcaggccgattttgtcgctgcgttaaaaacggcaggcttacccgataaattatcaaatatgctggctgattctgatatcggcgcatccaaaggtggattatttgatgatagtcataccctaagtaaattaattggccgacgtacaacaacacttgcggagagtatcaaagcaatattgtaa

SEQ ID NO: 313362 - DNA, 516 bp, Proteus mirabilis
  misc_feature (442)..(451): n is a, c, g, or t
atgattgcaattactggtgcaacaggcctattaggtcaacatgtgattgaaaaccttcttcaaaccgttcctgctaatcaaatagtggcatttgctcgtgatgtaaaaaaaggatcgtctttaagtcagaaaggcgttttagtacgtcaggcggattacaatgataaagcttcattaataacagctttacagggtgtcgataaattacttttaatttcctcaagtgaagttggcaaacgtaccattcaacatcgtaatgtcattgaggcagcaaaatcagcagatgtacaatttattgcttacactagcatattacatgctgatcgctctccattaagcttgcatgtggaacatgtagaaacagaaaaaatgctagctgattctgggatctcttacactttattacgaaatggctggtatacagaaaattatctggcaagtnnnnnnnnnnggcaagtgtccctgcagcacttgagcatggcgtttttctgggggcggctggtgatggcaaaatag

SEQ ID NO: 313363 - DNA, 264 bp, Proteus mirabilis
atgggaggctatgatggtcatcgtggctcgctttactatttgggcgttcatcctgagtttcgcggtagaggaattgccaatgcactaatctctcggctagagaaaaaactcattgcaaaagggtgtccacaaattactttaatgatccccgaagagaacgatgccactatttgtatgtttgaaaagcttctctatgaagatcaaaatcaagaaaatacggcttacactaaacgcctaattatcgatcaggacttcgatctttaa

SEQ ID NO: 313364 - DNA, 258 bp, Proteus mirabilis
atgattttaagaggccaaagtgttcctaattattcggaatattttattaatagtgggacggctaaagatatagcactaaatttagcaatgcaaaataataaaggtattgtaaaaaataatgataaattaatgacggctgttaataaatataaccataatgctgaatttgctttatcggcaagaatggttggctatggaaataatataacggtgggatcatttaagagccatcttgaatttactcttatttataattaa

SEQ ID NO: 313365 - DNA, 225 bp, Proteus mirabilis
gtgaatcgctcttatccagcatcaaagatggtaggaaaaaaaatcgcttattaccgtagagtaaatggcctcacattaagtgaattggctaagaaaataggtataagtcaacagcagcaatcaagatatgaacggggaattaatcgagtgagtctagataggctttatcaatatgcttgctttttcggtattagtttaagtgatctttttcaattagatgattaa

SEQ ID NO: 313366 - DNA, 198 bp, Proteus mirabilis; identical to SEQ ID NO: 14560

SEQ ID NO: 313367 - DNA, 153 bp, Proteus mirabilis; identical to SEQ ID NO: 301682

SEQ ID NO: 313368 - DNA, 240 bp, Proteus mirabilis
atgcagtgtacgctttatgatgccggatttgcttacggtagattattactatggcaggcggatggtctgatgagaccctggccggcatatttgcttcgccgtttaccggatatcggtcagcggattgatgcagcggtctggcagaaaggctgtgaagccggccaggatgagactgtcactgaatggatggcaatggagatggctgatgaatacctcatcggtattgaactgagcaattaa

SEQ ID NO: 313369 - DNA, 198 bp, Proteus mirabilis; identical to SEQ ID NO: 27134

SEQ ID NO: 313370 - DNA, 195 bp, Proteus mirabilis
atgtggcaaacaattttaactgaaattaatgcttcattaattaattttaaaaaaattgataatgcaatggagttaattagatttagtatttatttagaaaaaatcattgcaccttggtatatggtggtcgtttactcaaaggaaatgatggcggtatttgatgaagctttatcctctttttattcatctaaataa

SEQ ID NO: 313371 - DNA, 429 bp, Proteus mirabilis
gtgggaggtgaaaatagtaaaggtaatatatgtcattcaatttattatgatatcattaataaaaagaaatatattaatgatttttttgataatagtgatgactcactaaatgaacagagaattttattagaaaatgaaattgaaatattaaaaaaagagtatcaacacttcgtgaaactcgcctttacggggttagcattcggtattattggtgtgatcattactggagggatctttggttcaaaagctgaaaaaatccgtaaaaaaagaaatgaaacaatagagaaactacataatatcaataaaggaataaaacaacaatcaactatttctgagtgtttacaacgttttcaagtcgatttagacgaaatagaacaatatattgaagatgctgatatgtctgtggagctgtctcttatacacatctga

SEQ ID NO: 313372 - DNA, 237 bp, Proteus mirabilis
atgttgcaagatagcattaatgaattaggtcaaaaacaattactagctgctgcgagtggtgataggaaaaaagccttaagtggattattaggtaatcttgatggttttcaacaaatcatcgaaaaagagtggaagcaacaagaagcttcatttaatcaatttgggcagcaggcatgtaataaaatcacccaaatggaaaaccaacgtgtcgaattgataaattcactaaacaaatag

SEQ ID NO: 313373 - DNA, 168 bp, Proteus mirabilis
atgcgctacttagcacaagcacctgtaaccgatccagaagggaatccaaccatagtacgttttagtcgtaaaactaaacagcaatatgtctcttctgaaaaagaggggaaagcaacaggttggtcagccttttatattgatggcaaatgggttgaaaaaagtaaataa

SEQ ID NO: 313374 - DNA, 141 bp, Proteus mirabilis; identical to SEQ ID NO: 306927

SEQ ID NO: 313375 - DNA, 159 bp, Proteus mirabilis
atgataaatattcatacattaggtcctgcaggaacaaactgtgagaaagccgcttattattggctaaataaaaataatcaacaaggaaatattattcttcaccctacattagaaaccgcagtaaaagaaatggaggtaagccaaaatggatacccataa

SEQ ID NO: 313376 - DNA, 552 bp, Proteus mirabilis
atgcagcttagaactttctcaatattactgttatttagctcttttttaatattgagtggatgtagtaaaccttttgaagccgcgggtaaaatggggaaaatcttattagatccctcaactcctgttgggcaaccgaaagatcagccctctaccgttgcattaaccatccttgcggagccctatattaatcctaatcaggaaggtgaagctgcgccgataaatatccaagttgtttatcttaacgaagattcagtatttggctctgttgatcatgatcagatagatgcaaaagagggtgacttagagaaagttctaaagaaaaattatattgaccatcaagactacaccattttacctggccaatataaacccttccctactatgacgttagacccatctaaccgttacattggcattattgcctattactcagatcctgataaagcagaatggaagaaaatagtcaaagcgcgtggtaaaggacgccactacttcctattagtgcacattagggaaaatgaaatcgaatttagacaagaagaggatgattaa

SEQ ID NO: 313377 - DNA, 1251 bp, Proteus mirabilis; identical to SEQ ID NO: 297083

SEQ ID NO: 313378 - DNA, 1014 bp, Proteus mirabilis
atgtcctcattgtcccctgccagcgaagttattcttcgtcatctagatcatttcgcagacaggcacgtgctcatagcaggtgatcttcaagacacgctagcatcacaaattcaggccaaaagtgttagagcctatacaaatcaatatcaccagtggctaccgctactcaaatccatgggtgataatgcattttttggtttagcggcagatcaatcattcgtaaaatattgcgacactttgatttatttttggcctaagaataagaatgaagcaacttttcagttacgtagcttatgtgcaagtttatctgtcgatactgaaatcttcatcgtcggcgaaaaccgtagtggtgtaaaaagtgctacggaattaatgaatggtatagcaaagctaaaaaaaatagattcagcacgtcgttgtagcctcttttttggttcactaacctatcaaacactctttgatcgaaataactggtggcaaacttatcgttatgacgatttaacggtgatggcattacccggtgtttttagtcaaaccgcattagatgaaggcagccgattattactctctacatttgatgatgcaatggtaggtgacttactggatatggcctgtggttgtggggtgattgccacggtattaggcaagaaaaacccgatgttaaaactcacactctgtgacgtcaatgcagccgctatttcatccagtattgccacgttaaatgttaatgaattagaaggacgggttattgcaagcaatgtctattctgcggtagaagaaacttatgattggatagtctctaatcctcctttccatgatggcttaggtaccagctatcaagctgcagaagacattattcgtctcgcgcctaactttttgaaaaaaggcggtaaactgcgtattgttgccaatgctttcttaccttatcaagatattcttgatcacgtgtttggctctcatgaagtgcttgcatcaacaggtaaattcaaagtttaccaagcaaccaagaaatag

SEQ ID NO: 313379 - DNA, 732 bp, Proteus mirabilis
atgatcaacgtcggaggcgttgggctacgacgatacgctaaaatattcatgagaaaaaatcctgatcaagatggaatacaatctgtacctgttgcttgtgtcaccgatctggacgttatgccaaactgtgctccctatattactaaggtcatccaagacgatagtgattggacaatattaggggacggagagaacagaaagtggcgtgctaagcgggattttacattgacgaaattaaatgaacataaggaaaagattaaatccaaggcccatgggcaaaatgttaagtcatttgtagcagatgagtggacactagaatatgacttagcatttgcaaacaacaacgctttggctgaagagctctatattgctgctcaattggctatatgggatgagggtaataattactctgaaaaaacagctaaggaaaaatttgagaaggcccaatccaaatatacaaccttaaaggaagaagctgacaaacttgcagcagataagggttggaacaagaatgaagttttagccagtaaagtctatgcaatgtatgtcacaggctctaaagcttcaaaatccatcgcggcacagtatttgtgtggaattatcatggacaagataacccttgaaaaaacatatgatttaagaaccaagctcccgggctatattgttgatgcaatagactatgttacatcgaatcttcgtattgtttcagggagtaagattaatgaaagttga

SEQ ID NO: 313380 - DNA, 150 bp, Proteus mirabilis
atgatcctatcaggccaacgattaagatatcgtcctgccactaaccccattaacacccctattacacctgaaaatagccacgcagaaaaaagcaggataaacgaaggccctgcccgttggcgaataacatcaataaccggcatgttatag

SEQ ID NO: 313381 - DNA, 249 bp, Proteus mirabilis; identical to SEQ ID NO: 297123

SEQ ID NO: 313382 - DNA, 363 bp, Proteus mirabilis; identical to SEQ ID NO: 297052

SEQ ID NO: 313383 - DNA, 288 bp, Proteus mirabilis
atgaaaataatactccgcacttttatatttctatattttatttttttattaatattgattaatattctttccatatctgactatgaatggatgattggtgaaggtgatattgataatctttgtcaactgccactcaatggtagatatgctactgagcctatattgatattaacaccttgtattttattactttttttaggaaaaaataaaaaactaagatggggttatgttacaatcactgttatatatatcatatggtcattttatttacgttttaatttttgctga

SEQ ID NO: 313384 - DNA, 372 bp, Proteus mirabilis
  misc_feature (281)..(290): n is a, c, g, or t
atgatactttggctgatctcttttggcttaatttcaggtattactacatggttatttggttttggcggtggttttgttactgtgcccttactctatactctgattcttacgctttgggctggtgatagtttagcgggtgaacatgctatgcaaattgctgtggctacctctgcgctcattatgctgttttccgctattattacgaccctaaaacaccataaggcgaaaaaaatagattggaaattaattatgatcttattttgggggattgcattcggtgnnnnnnnnnnggtgggatcttcggtgccttacttgcctcaaccgtccaaggtgaatggatccgatggatttttattggttatctatttctga

SEQ ID NO: 313385 - DNA, 339 bp, Proteus mirabilis
  misc_feature (325)..(334): n is a, c, g, or t
atgatttatgcatctgattgcatgggttcacctttagctactgagtttacagctaaattattttcgtcttatcgtgaaaaacgaatttctggaaaactaagacgtacagaacgtttagataaagtttccccgcgaacaatgaatctagagctagcttattttagagctatgtttaatgagttaaagcgactaggggagtggaaacatgaaaacccagtcgaatctattagaccttttaaaaccgaagaagctgaaatggcttttttgaatcacgatgaaattaacttattactagaggaatgtgcgaatagctcaaataagcacnnnnnnnnnnaataa

SEQ ID NO: 313386 - DNA, 300 bp, Proteus mirabilis
atgcctgagttagttaatgccattgctaatggcgcagggcgttgtgatgctacttatcttaataaatttctgtatgaagaaaagagagagcaaaagtgccgcagtcggggaaaggaagaagattgttggtatgaaacgtactatcgcataaaaaatgaacttcctaactattgccgtgcttacgttaatcatgaatggactgatttagatagtagcctgcattatcagggaaaaatggaatgggttaagaaagaatctgtggcaggttggaataattcaggtggtcgatgggttgattag

SEQ ID NO: 313387 - DNA, 459 bp, Proteus mirabilis
gtgataacgacacagggaacaataaaggagcaacagggtgtcatcggtctgatggctgcagtaggttttatggtgataagtttatcgttactgacaagttttgcttatcattatcgtcaatgtcaattaatggtgatgcaagagttacaagcaaagcagacctttttattcgctggatctgcgttgtcatggggaatgaccttaacatgggatttatcgccttctcgtctttaccaatggcaatgtcgtacttttactgctgagcctaatatgaaaagctgtttctctttgagaggaaagacaagcgctttactactcggagaggctaaaagtcatagcggagataagatatctcattatcaatggattaatctggttggtaaggaaaaactgcatattgaagcccaaccgaatggttggctagactactgtccactagttaaagaaggctgtatttga

SEQ ID NO: 313388 - DNA, 1461 bp, Proteus mirabilis
atgagcaaagtttttaaactgcattcagaatttaaacccggtggtgatcaacctactgctatcgcttcattatgtgaagggttagaagatggacttgctcaccaaaccttattaggggtaaccggatcaggtaaaaccttcactattgccaatgtgatagctaacctaaatcgtcctactatggtattagcgccaaacaaaacgctagctgcacagctttatagtgaaatgaaagagtttttccctgaaaatgcggtggaatactttgtctcttattatgactactatcaacctgaagcctatgtgccaagctccgatacctttattgaaaaagacgcctctgttaacgaacatatcgaacaaatgcgtctatcggctacaaaggcactcttagagcgtaaagacgttattgtggtctcttcagtttcagctatttatggtttgggtgatccggatagctatttaaaaatgatgctacatttaagcaatggcatgattattgaccaacgtgcgattttacgccgacttgctgatttgcaatatacccgcaatgatcaggcttttcagcgcggtactttccgagtccgtggtgaagtgatcgatatctttcctgctgaatctgatgactacgctttacgtgttgaattatttgatgaagaggttgagcgtttatcgctatttgatcctctcacaggacaaattcattacaatgtgccacgtttcaccgtctatcctaaaacccactatgttacgccgcgcgaacgtattctggatgcgatggaaaaaatcaaacaggagctagctgaaagacgtaaggtgctattagccaatgataaattggttgaagagcagcgagttacccagcgcactcaatttgatttagaaatgatgaatgaattggggtattgctcaggtattgaaaactactctcgctatctttctggtcgtgggcctggtgagccaccaccaacgctatttgattatttgcctgctgatgggttattagtgattgacgaatcacacgttactattccgcaaattggcggcatgtataaaggcgaccgctcacgtaaagagacgttagtggaatatggcttccggttgccttctgcattggataaccgtccattgcgttttgaagagtttgaagcattagcaccacaaaccatttatgtctcagcaacaccgggaaaatatgagctagaaaaatcaggtaatgacattgtagaacaagtggttagacctacaggtttacttgatccggtggttgaagttcgccctgttgccacacaggttgatgatttattatcagaaatacgtatacgagcagctaaaaatgaacgtgtattagtgacaacattaacaaaacgtatggcagaggatttgaccgaatatcttgaagagcatggtgaacgggtacgttatttgcactcagatattgcttacttcgtgaagggttag

SEQ ID NO: 313389 - DNA, 390 bp, Proteus mirabilis
atgatcacctcacctttttttgttttgcgtaatcgccagttttttaaactacgtggttgccctttccagacaaatttcattcctcgcaacacggtaaccgttgatgctttacgtttggtgaatgccgttccatcgggatttttttgcgcacggatacgttgtaaattgcttttgcgtaaatcacgggcaatttcacgggctaattttttacgttcattgggtgacgcttttgccaacatagcggctaatgcttgggttaacgggctgaaatcatcagcgttcatgagccacactctcccaactttcaaacggatcagccggctcttcaatggcaccaacaaccaatttattcgcttgcacattaacgaggacacgctcagtcaactttaa

SEQ ID NO: 313390 - DNA, 180 bp, Proteus mirabilis; identical to SEQ ID NO: 309673

SEQ ID NO: 313391 - DNA, 123 bp, Proteus mirabilis
atgctattccctataggtgatgtcaatgcattaaaagcaggtgccataaaacgttctggcagaatactcgcatgtagttgtgttcctaaaggcaatgtaaaactttcacttaataaaaaataa

SEQ ID NO: 313392 - DNA, 198 bp, Proteus mirabilis
atgcaacattcagtcaaagatgccattgcatttggtgatggtatgaatgataaagagatgctacagatggcgggtaagggctgcattatgcaaaatgcccaccagctactaaaagatctattaccggatatggaagtgattggctcaaatgttgatgatgctgttgcacactatttacgtaagttgtatcaggtttaa

SEQ ID NO: 313393 - DNA, 390 bp, Proteus mirabilis
ttgaaaaatactcaaggtaaagctgtcaccatggttgcggtagaacctaaagattctcctgttattagccaagcattagcaggtgaagaaattaagcctggtccacataaaatccaaggtattggtgcaggttttatccctgaaaacttagagttatcactattagatcgcgtgatccaaattactaacgaagaagcatttgaaacagctcgtgacgttatgaccaaagaaggtattttagcgggtatttcatccggtgcggcaattgcggctgcagtgaaattagctaaagagccagaatttgctaataaggaaatcgtagtgattttaccttcttcaggtgaacgttatctcagcaccccactttttgctgatatctctgacagctaa

SEQ ID NO: 313394 - DNA, 159 bp, Proteus mirabilis
atgcgtaaagtagcaatggttgcactagcatcaatgtttttagtagctccgacggtagtaatggctgaaacatcaaatacaaataatcagcctgcagggcaacaacagtataatgataattaccattgtggatacggttacggtatgcatgatggatga

SEQ ID NO: 313395 - DNA, 714 bp, Proteus mirabilis
  misc_feature (689)..(698): n is a, c, g, or t
atgtctcagagcaatgttgaaattggtgatgaagttcaaggctggctcagtgatcatcactataaagaagggttctataccgatatctcaaccgatacgttagataaagggttgaatgaagcggttgtgcgagctatttcagctaaaagaaatgagccagagtggatgctagagtttcgtcttgatgcttatcgtcattggctagagatggaagagcctcattggctaaaagcagattatccatcgctgaattatcaagattatagttattattcagcgccatcttgcggtgcttgttgtgccaatggcagttgtgctagtggtaacaatgaagctgtctcaacacaagaaacccaagattatttaactaaagaagttgaagacgcatttaatcagttaggcgtgccagtaagagaagggcagtcagtggctgtagatgctatttttgactcagtatcggtttctaccacttatcgtgaagagctagctaaacatggtgttattttctgctccttcggtgaagcgattcaagaatatcccgaattagtacgccaatatttaggtacagttgtttctagccacgataactattttgcggcacttaatgcggcggtcgcttctgatggtacctttgtttatattcctaaaggtgttcgctgccctatggaattagccacctattttcgtannnnnnnnnngggtatttccaagtga

SEQ ID NO: 313396 - DNA, 138 bp, Proteus mirabilis
atgatagataaaatggtagatgaaaaattcttacatgaaaaatatcgtcatatggcgattgttgagcaatcacctatccagttattagataaatttgaaagttatattgccccttcgattaaaacctacgataaataa

SEQ ID NO: 313397 - DNA, 2598 bp, Proteus mirabilis
atgtcaaccatcgattatccagagaaaaaagcgtcccgctcgataaggcaacaggctactatgcagtcgcatatcttaacccgttattacaaattttatcgtcataatggggcttcattcagtgcggctatcgtgaatgagcttttctgggtattaatgtggctctttttgcgtatggaatcccctttttggcagaaaatagcacaaaaacaacaacaactatttcctcatattaatccgcgtcgccctaaattatgcgatccgatccgatacttattacaaagtatttggcttatttgccattacttgatgctcaccttggtgaaaaaaccgattcaatttattgtctatattagacagtattatcaaaatctctttgctcgcttatctcctgttgcgcgagatatgatccatcataagaaaacaaacacgccactatggcaatacgctctattatcgctcgttgctgtttttgccatttttattatcttattaagtattactcaaccttttgatttaaaactacaatttgtttttgttctcgtgatttggctgatagccttagctatccgcgatatccctggccgactgtcttctattaccattattattttatcgctgactattgcttgccgatatatttggtggcgctatcaatacacactctactgggtggataatctgagccttttctttgggatcttactattactggctgaaacctatgcatggattgtgttatttcttagttttatgcaatgtatttggccactccatcgacaacctatttcaatgcctcaagatacaacacaatggcctactgtcgatatttttattcccacatataacgaagcgctacaagttgtaaaaccaacactttatgcctgtttaaacattgattggcctaaagataaattaactatctatttattagatgatggctctcgccctgagtttgcggcttttgctaaagaaattggtattcggtatatcactcgtgaaaaacatgattttgccaaagccggtaatatcaaccatgcattgagcaaagcctgcggagaatatgtggctatttttgactgtgaccatattccgacacgctcattcttacaatttactatgggctggtttctaaaagacgaaaaaatggcattggtacaaacaccacaccactttttctctcctgatccctttgaacgtaatttaggcaatttccgcgaaacaccgaatgaaggcacgcttttttatggattagtgcaagatggtaatgatacttggaatgcagcttttttctgcggctcctgtgctgtattacgtcgttgtgctttagatgaaattggcgggctggcagttgaaactgtgaccgaagacgcacatacctcattacgcttacatcgtcatggttggacttctgcttatattcgtatccctcttgccgcaggattagcaacaggatcactttcagcacatattggccaacgcatacgttgggcaaaaggaatgatacaaatatttcgtttagataacccgctctttggcaaagggctgacactgccacagcgcttttgttacctcaatgccatgttgcactttttatcaggcataccaaggatgatcttcttattagcaccactaacgttccttatctttcatgcctatattatttacgcacccgccatcgctatcgctttgtatgtcgtgccttatttattacacatttggttagccgcgaccaaattacaaggtccttatcgccactcattttggggagagatttatgaaacgattttagcttggtacaccactcgtcccgtattaagcaccctattctcaccttataaaggtaaatttaatgtcacagagaaaggggcaattatgaagaaaagttttgtcgattggcaaattaatcgcccctatattctgtttcttaatcttaatttgctaggaattctatttgctttctggcgtatcgcaacaggcgatcccgatgaaaggttagccgtactcatgtgcttagtttgggtatgctataacttagtattactaggtgttgccattgctgtttctgtagaagcaaagcaagagcgacagttcccacgggtacgtctaaaagtgcccgcaatactattactccaagacggttcgctttattcttgtcagctcaatgacttctctgataatggctgtgccattgtattaccagataattttacagttcccttatcttgtcaccaagagatcaccgttattctcaaacaaaatcaacgtgaatatgcttttgaagcacgtattttacggattgataatcgcattattggcttacaactgcttaatatggatacacaaaaatccattgattttaccgcctgtacttttgaacgagccgacacttgggctaattggcaacacgctctccctgccgataatccactgaatagtttaagaaatatcatttatatcagtatgcgtggctataacaccttacttaaacgcgccccgtatcttgtttacctcttatttcgtttattagggcagtgtttattgtggctattatcgctacttccacgacgtgtcaatgtttcacaaatatttcattaa

SEQ ID NO: 313398 - DNA, 603 bp, Proteus mirabilis
ttgcaacctttagccgaaaaagtcagaagtgaacgtttagcaacccattctgtcacaatagaataccaatttaatacgatcccattaattggtcgtttaaatgaagtacaagccgatgggttactccgttggcgacccgccacattaacagctaatgatctactgcaattatggatagaacatctcgtgtactgcttaagtggtggaactggcgaaagccgtttttatggtagaaaagagtcgcaatggtgtctatcaccggtgtctgcggatattgcgtattcaacccttgaaagattgatccaagattatcaaacagggatgaatacacctttagccttattcgccaacagtggttgggcttggttacaagcttgcttcgataaaaaaacacagacgtttttatttgatgatgaagagatacaaaacaaggcagaattggtattaacgcaatatttaaccgatagctataaccgagaaggtgaaatgaatgatatctatattcaacgtgtatttcatcagcttgatgcaccttttcttgaggcagtaaaacagaccacgttagccatatttaagccaatcattccatttataaaaaaataa

SEQ ID NO: 313399 - DNA, 1236 bp, Proteus mirabilis
atggcatcaaatcaacctgctttatttcatatgatggcaaagccgacaagctaccactgtaatattaaatgtgaatattgcttttatctggaaaaagaaaatatttttcaagatgagacaaaagaaacaggccatacagtgatgcctgatggtgtacttcgtcgttatattaaagactatattcagtcacacagtggcgatcaggttgattttgcttggcaaggtggtgaaccaacgcttgcaggattagccttctttgaaaaagtggtcaaataccaaaagcaatttgctaacggcaagacaattaccaatagtgtacaaaccaatgcgattgccattaatcgccaatgggcacaattctttgctgataaccactttctattaggcgtttcaattgatggcattgaagccgttcacgataaatatcgtatttcagtcaatggtagcccaacatttgaacgcgtaaaacgcgccatcaatttactaaatgagtatggtgttgaatttaatacattaaccgttgtaaatgatcaaaactggaataaaggaaaagagacttatcaagctttaaaaaatttaggttcaactttttttcaatttattcccatagtcgaagtggatagacgtttcccacacactcatggcggacattatgctcccggtcctaacgcacaattagcggctttctctgttcccgctgaaggttacggaaaatttatgaccgatatattcaatgaatggatacgccaaggtgatgtaggaaaaatatacattcgcttatttgatagcttattagggacatggatgggatatcctgcatcaacatgtattcaatctaaaacttgtggtcaagcattaattattgaagccaatggtgatgtttactcttgtgatcactatgtttatcccgctaataatttaggcaacatacaactaacaagtcttgcacagctcgcaacatcaaaaacacagcaacgctttggtcaaaataaatacgataaacaaaccaacctttgcaaacagtgtgaagtgcaaagcttatgttatggcggttgtcctaaacatcgcattattgcgatagaaggcgaaaaatatcgccacaattatctatgtcactcttataaaaaaatatttcatcacacggcaatcggcatgcaattaatgcgtcaagcgatagctcgtggaggccttgccagtgatgcacttggggcgatgcaaaaaaactatctcaagtga

SEQ ID NO: 313400 - DNA, 1611 bp, Proteus mirabilis
gtgaccttaccttttattaaaaaaagcatactcgcggggatcattgccacgtcatgtttaagccttccaatatcagcccatgctggtggcacacctgaaaaaccgaatgtactgttaatcgtaatggatgatttaggcacaggacaacttgattttgtactggataccttagatgtagatgtgttagctcagcgaccaacacctcctcgttataaaggtgatatcaataaaatgatagaagccgcacgtattgcgatgcctaatgtcagtgatatggcagaaaacggtgcaaaaatgactaatgcatttgtagctcatcccgtttgtggcccttctcgtgcaggtatctttacaggacgctcgcccgccagttttggtacttacagcaatgatgatgccattttaggtataccccaagatatcaaattgttaccctcacttttccaagaaaatggctatgccactgctagcattggtaaatggcataatgcaaaagttatccgtaaaccgaaaataaatgaaaataaacaaacccgtgattatcacgacaatatgatctcaacccctgaagcgggttatgcgcctcatgagcggggctttgattacgcctttagttattatgcatcaggtgttgccttatggaattcgcctgcattttggcgtaatggtgtcaatgttcctgctccgggttacaccacccatctattaacggatgaaacactaaaatttattgatgaacataaagataaacctttttttatcaatctttcttatagcgttccacacataccgttagagcaagcatctcctgctaagtatatggataaatttgatacagggaatgtggaggcagataaatattttgccgccttaaatgcagcagatgaaggtattggacaaatcattgcgaaattaaaagaaaatggtgagctagaaaatacattaatttttttcttatctgataatggtgcagttaatgaatcccccatgcccatgaatgccatggatagaggctttaagggccagatgtttaatggtggagttagagtaccttttattgcttatcaacccggaactattcccgcgggaacaaaaagcgatgcgatgatctccgcacttgatattttgccaaccgcgttacaagtcgctgatattcaaattcctgatagcctgcaagtagaaggtaaaaacattatgccattgcttaaaggtgaaacaacgcgttcgcctcatgcttatctgtattgggcaggccccggcactaagcattatagtgaagaaaaccaagagttttggcatggttatcatcaatggatcacctatcaacgtcaaacgcctccagtaaaccctaacttagagaaactgtctaaaggtgcttgggcagtgcgtgatggtgaatgggcgctctatttttatgatgatggtaaaaatcaaccacagctttttaacgataacaccgatcctggcgaatcaatcgatttggcaaaacaaaatccacaaaaagtggctgaactaaaaaatgcgtattaccagtggatcaaagataaacctaaacctgttatttgggggcaagatcactatcaaatactagtagattcagccaaaccttaa

SEQ ID NO: 313401 - DNA, 288 bp, Proteus mirabilis
atgggagctagcttccgtaatattggtgaaattttagaattagcaggttgtgatcgcctaactatttctcctgcgttattaaaagagttatcagaagcacaaggtgaagtagagcataaactatcctttaatggtgaagttaaatcacgtcctgcgccaatcactgaagctgaattttattggcaacataatgctgatccaatggccgttgataaattatctgatggtattcgtaaatttgcggttgatcaggaaaaattagagaaaatgattgcagatttattataa

SEQ ID NO: 313402 - DNA, 624 bp, Proteus mirabilis; identical to SEQ ID NO: 309572

SEQ ID NO: 313403 - DNA, 1170 bp, Proteus mirabilis
gtgaccaatgtactgaaaaaatttggtgttgaaacggaagttttctttgaagttgaagcagatccaacattaagtgtcgtacgcaaaggtgcagagcagatgaacagctttaaacctgatgtgatcatcgcattaggtggcggttcaccaatggatgcggctaagattatgtgggtaatgtatgaacacccagaaacacacttcgaagaattagcattacgctttatggatatccgtaaacgtatttataaattcccgaaaatgggtgtgaaggctcaaatggtagcaattaccacaacatcaggtacaggctctgaagttacaccatttgctgttgtgactgatgatgaaacaggccaaaaatatccattagcagactacgcattaacgccagatatggcgattgtagatgccaatctggtgatgaatatgcctaaatcactctgtgcttttggtggtttagatgcggtgactcacgcattagaagcttatgtttctgtattagccaatgagtattctgatggtcaggcactgcaagctctgaaattgctgaaagaatatctgccagcaagctatcatgaaggtgctaaaaatccggttgctcgtgagcgtgtccacaatgcagccaccatcgcaggtattgcatttgctaacgccttcttaggggtttgtcactcaatggcgcataaattaggctctgaattccatattcctcatggtcttgccaatgcgttattaatttctaacgttattcgttataacgcgaatgataacccaacaaaacagactgcatttagccaatatgaccgtccacaagcacgtcgtcgttatgctgaaattgctgatcacttagaactgtctgctcctggtgatcgcacagccgctaagattgaaaaactgttagcttggttagaagagatgaaatcttcattaggtatccctgcttctatccgtgaggcgggcgtacaagaaagtgatttcttagcgaaagtggataaattatcagaagatgcgtttgatgatcagtgtactggtgctaacccacgttatccgctgatctctgagttaaaacaactgttattagattcttactacggccgcgaatttaacgagcaccctgttgctgaggtaaaagaagcgaagcctgcgaaaaaaagcagtaagaaataa

SEQ ID NO: 313404 - DNA, 1323 bp, Proteus mirabilis
  misc_feature (1293)..(1302): n is a, c, g, or t
atgggtatcgttgaagataaagtgatcaaaaaccactttgcttcagaatatatctacaatgcgtataaggacgaaaaaacctgcggtattttgtctgaagatttaacctacggtactatcactattgctgaacctatcggtattatctgtggtatcgtgccaaccactaaccctacttctaccgctatttttaaagcattaatcagcttaaaaacacgcaacggtattattttctctccacatccacgggcgaaattagccacaaaccgtgcggctgaaattgtgttaaacgctgcaatcgccgcgggtgcaccaaaagatattatcggctggatcgatgaaccttcagtggcattatccaatgcattaatgcaccatgatgatattaacctgatcttagcaacaggtggcccaggaatggtaaaagccgcttacagttcaggtaaacctgctatcggtgttggtgcgggtaatactcctgttgttattgatgactcagcagacattaaacgtgcagttgcttctattttgatgtcaaaaacctttgataatggggttatttgtgcttcagagcaatctgttatcgtcgtagacagtatctataaacaagttcgtgaacgtttcgccactcacggcggctacatgttaaccggtaaagagttaaaagctgttcaagatattatcttaaaagatggtaacttgaatgcggccatcgttggtcaaccggcagtgaaaatcgcagaaatggccggtattgaagtgcctgttaacactaagattttaattggtgaagttaaagaaactactgatgcagaaccttttgctcacgaaaaactatctcctctgttagcaatgtaccatgcacaaaactttgaagatgcggtacataaagcagaaaaattagttgaaatgggcggtattggtcatacttcttgtttatataccgatcaagacaactgtcctgaacatgttgcctactttggcgacaaaatgaaaacttcccgtattttaatcaatacaccggcatcacaagggggtattggtgacttatacaactttaaactcgctccttctctcactttaggctgtggctcatggggtggtaactccatttctgagaacgtagggccaaaacaccttatcaacactaaaaccgtggcgaaaagagcagaaaatatgttgtggcacaaacttcctaaatcaatttatttccgccgtggttgcttacctattgcactggaagagattgcaactgatggtaaaaaacgcgcatttatcgttacagacagtttnnnnnnnnnnattcaacaacggttaagttga

SEQ ID NO: 313405 - DNA, 285 bp, Proteus mirabilis; identical to SEQ ID NO: 294760

SEQ ID NO: 313406 - DNA, 534 bp, Proteus mirabilis
  misc_feature (507)..(516): n is a, c, g, or t
atgaacattgttgatcggtttatttcttacaccaaggtgaatactacaacaaatagagaaaatggcgccgcggggattatgccttcatcggaaggtcagcgagtcctcgctttacaattagtcgaagagttaaagacgttaggtgttgaagatatcaaaattcgcgatactgccattgttaccgcgacactaccttctaaccttgattatgaggttcctaccgtggctttctttggtcacttagataccagtgcagaacaaactaatgatactaaagcacaaattttaccttataaaggtggcgacctttgcttaaacaaagaacttgagatttttttacgtcaaagtgaattccctgaattagaaaactatattggtgacgatatcatcgtaacagatggtactagcttattaggcgctgacgacaaagcggctatcgcctctattatggatatgttgcaatattttaaacaacatccagaagtcaaacacggtacagttaaaatnnnnnnnnnntggttttgtacccgatga

SEQ ID NO: 313407 - DNA, 339 bp, Proteus mirabilis
atgaactatctcggcatgaatgcacaaaccggtgaacgtattaccgatattgagcacgttcgccagtctattaaagatatttttaacacccccattggtagccgattgatgcgccgtgaatatggcagtttgcttgccgatttaattgatggcccagttaacgccaagatgcgattgcaattaatgtcagcgtgttacaccgcagtttatcgttgggagccacgtattgtgatgacggccattgatattcatagccaacaggaacaggtgattgtcgatatcaccggctattacgcccataaccaacaaccgattaatttctctctaccggtgacataa

SEQ ID NO: 313408 - DNA, 1089 bp, Proteus mirabilis; identical to SEQ ID NO: 282027

SEQ ID NO: 313409 - DNA, 474 bp, Proteus mirabilis
  misc_feature (461)..(470): n is a, c, g, or t
atgtcaaatatagcaacacaaaagcaaaaaacaccagataatgatgaatatacagacgctcttagtcgttgggagtcatgtaagccaccttacacaagtacacacataagaatctgtgttactgctgtcaaaaccattttaaagcatatcaataaaccacgtcgctctaaatatgaaaaagagcactacttgcgtattgattttagtaaggcgggtaaggttaccatatacgcggaatatcctaaacacatggatataaaaggccagaaattaggggaatggccagaactatcattaccgatagcaagagagaaagcgaaagcattagctgaagaagggctaagagctgaatctgttcatcaactattagatctttatgaaaaagatttagcagggaaagtcgaacgctcaaagttaagtgaaaatagtttttatacttaccgttgcagagtaaaacaacnnnnnnnnnnctga

SEQ ID NO: 313410 - DNA, 819 bp, Proteus mirabilis
atgcgccgattttggaaatatgcatcacccatttattctaatggaagaaatattgcatcgagcattcctgatgattatgtgtcatcacgggtgcagaaacccatgccaacaaaacgatatactgatattgagtccattgccactttatggatgaacgttgcttcaagcacctctgtgcatcaaaaaaatgcagttagatatatgatcctcaccggagttagacccatcaatgttgtcaatttaaagtgggaatatgttgatttagataacttagaaataacttatccagctggtttaattggtatgcgcggtgcaatgaaaacgcaaaaagagtttagagtgccaattacaaaggcaatgaaaagcttacttgaggaacaattagcttggaaaaattccactgttaattgcaataaagaatatgttttcctacaaccaagagatccacaattagcgttttctaaacgttcattggataaactagttaaaacatatagccctgaaggggcagtaaagggtgtagtgcatgagggaacggtgaagggaaagtccggagcatttaatactatgtgccgtaagttttttaaaagtaatataattgcacaaatgcgtcaaaaaggcttttcacgttctgatactaaagaaattagcatgctatgtttacatcactctgataaaagtgaagatccaatggctgaacattatgacttttctgatgagatactgcaggaagagatagcgctaaagcgtcaagcatttgaggctcatgaaaatagtatcttgactcaagtagcgctattacgtcgtaaacttagttaa

SEQ ID NO: 313411 - DNA, 378 bp, Proteus mirabilis
  misc_feature (361)..(370): n is a, c, g, or t
atgaataattacaaaacggaatatgagcatactttggagtcagcaatagccgcggttggagccgctattgcggatatttccagagtaaaaatactctgtgctttgatggatggaagggcgtggacagccaccgaattgagcattgttgcggatatctccgcatctaccacaagtagccatttatcaaaattactcagtagcggccttatttctgtgatctctcgtggtaaatatcgctattttcgattagctagtgatgatatagcaaaagttattgaaaatttgatgagcttctcaacagttcatgtatcacaagcaaaaattaccaccccagaacatttaagaaaagcacgtacatgcnnnnnnnnnntgctataa

SEQ ID NO: 313412 - DNA, 564 bp, Proteus mirabilis
atgagtatggcttttttgctgagtgaaaaacagctattattcaggttgtttttatttattgaggaagaacgaatgccatcttttgatatcgtatctgaagttgacttacatgaagtgcgcaatgcggtagagaacgcacaacgtgaactgactactcgttgggattttcgtaatgttgaagcaagttttgaattaaacgaaaaaactgagtcagtaaaaacaactagtgtatctgaatttcaggtgcagcagttattagatattctgcgtgagaaaatggcaaaaagagggattgatggtgctgttttaaatatccctgaagagatgactcacagcggaaaaacatacagtgtagaagcgaccttaaaacaaggtattgatactcctttagcgaaaaaaatcgttaaaatgatcaaagacagcaaattaaaagtacaagcacagatccaaggtgagcaagtacgagtaacaggtaaatcacgtgatgatttgcaagctgtgatgaaattagttagagagggtgaattaggtcagcctttccaatttaccaattttcgtgattaa

SEQ ID NO: 313413 - DNA, 684 bp, Proteus mirabilis
  misc_feature (634)..(643): n is a, c, g, or t
atgccatcacgattaagttgggttcgttatcaagaaaatttagttaatcaatggcctttggcaaatattacacaacaagcaggcacattaacctatcaatataaaccagaagataaaaaaacagatttattactgcgtttatggggaaatttaacgttaggacatactaatactaggggaggaaaaccaagagagcctaaaatggttgattttagagctagcagaaatacaaggtgggatccctctattgatacaggctttttagatacagcttctctatatcaagataataatcgttatggtgttgatttttcatcgttatttaaattatcgcctcagttttctatttctttttccggtcaatatcaattggaaaaattagacagtcatgagcttgaacttcccatgggttttgatttcgtgaccgaggggcgagcagggcaacgtcatgaagtcaatttagcgttagccacagattggaaaccattaccctggtttgcgatgaatattggcggtaaatatcattactatcatctgacggatacctttttaaataataaacggaagaatagggttaaaaattacgagaaaacagcccctatccgcggttatctgatctcttatcgacgagtannnnnnnnnngtattaaccccagaagagtatttactctatcgcgcggttaa

SEQ ID NO: 313414 - DNA, 1932 bp, Proteus mirabilis
atgaaaaggtttttgacaacactcgccattttgcttgtagtgattttggcaggcttaacgacattagttttgctcattaaccctaatgattttcgtggttatcttgttgaacgcgttgaaaaacaaagtggctataaattaaccttacaagatgatatgcgttggcatgtctggccaaaactcagcattattagtggtaaaatgtcattaacagcccccggtgctgagcaaccattgatcactgctgataatatgcgtcttgatgtggaattatggccattactttcccaccagttggaagtaaaagaagtgatgctaaaaggcgcagtggttagacaaacgcctgagagtaaagcaatacctaaaataaccccgccttctgttgccaatgaagacagtactcgtccgattattgagccaaaaacaaatcgttggcaattaaatattgctaaggtgaggatctccgatagtttgattatttggcaaaccaaagggggagagcaacttaatttacgcgatatcaatttattattaaaaacggacgacaaaaaacaaattaaccttgagatgagcaccaaaattaatcgtgatcgtcgcgagttaatgttaaatgttgttgctaatgctgatatgagtggctacccatatcaaatcagtggcaatatcgctcaattagattatgcattatcgggaataggacttccggctcaagggatctccggaaatttaacctcagatttcaatattaaaaatgatagtgtaaatgttattgccttaaataatttaaatatgacggcaaatgagagtcagctacaaggtagcatcacggctgaattggctaaaaagaaccgctatcaagtggaattaactggggacactttaaatttaaataccctattacctgagttagcacagcctaattcatctgaaacagcatcgttaaccttggcaaataccccgtcgagatcattctcattctttagccatgctcaggctgcaccatcacccaatgcaactattatggctcgtccggttattacctccgcgacaattgaaaacaaagcgtatgatttaacccactggggtgatattgaatttagcttaaacttagcgctcaataagttattgtataaagaattagaaataaacaatgttaaattaaccgcattaaataaccccaaatcattaaatattgataggttagaagggcagatcctaaacggaaatttctcactgcctacggtgatttctactagcattgtgccagcgcatattagtatgaatgtcacaatgaataatatccctttgcaacctttattacgcgtctttgatcagccagaaaatttcagcggtttaatttctgcaaaagggcatctagaaggtgccggatataatcgcaacgcgtttcttaatagctggcagggcacactggatacctcattaagcgaatttaaaatgctaggattaaatattccacaagtgatccagcaatctattgcacaaacaaccgatcaagtggtttaccctgaagatattgagaactataccaaagcagatagtgtgattgcccagtttaaactagcacctaaaggccgagtgacgttaaatcagttagatgctcaagcaagtgcttatcagatcagcgggcaaggtcaattagatctacaacgtcataatctagatgtgatgctgatggttaatatcaaaaaaggttggggcaaagagaatgaatttattcgccaactggccaaaatagatattccattaagattgtatggtaattggaatgctatccaatatgagtttaacgttgaaaaattactacgtgatcaattacagcaaaaagcaaaacaggccatagataattggttaaataagcaagatgatagccccgaagttaaagcgcttaatcaattattgaaaaaaatataa

SEQ ID NO: 313415 - DNA, 582 bp, Proteus mirabilis
atgcgattatgcgaccgtgatattattcagtggcttgatgaaggtaaattagtcattgaaccccgcccgcctgtcgagcgaattaacggcgcaacagcggatgttcgcttgggtaaccagtttcgtgttttccaaggacatactgcggcttacattgacctcagtggccccaaaaatgaagttaatgaggcccttgagcgggtgatgagtgatgaaattgtattaccagaaggcgaagcgttttatcttcatcccggagagcttgccttggcggttacattagagtctgtcacattaccggataatgtagtagggtggttagatggacgctcatctttagcgcgattgggattaatggtacacgtcacggctcaccgaattgatccgggctggcatggacacatcgtattagaattttttaattcaggtaaactgccattagcattaagaccgggtatggtgattggcgcattaagttttgaacctatgtcaggctctgcggataggccttacaatcgtcgccaagatgcgaaatataaaaatcaacaaggtgcggtaggaagtcggattagtgaagattaa

SEQ ID NO: 313416 - DNA, 642 bp, Proteus mirabilis
atggctgacacagcacatcagtgcacaattgtaggtatcgctggagcctctgcttcaggtaaaagtcttattgccagtacactttaccgtgaattaagagcgcaagtaggtgatcataatatcggtgtgataccagaagattgctattatcgtgaccaaagtgatttaacaatggaagagcgatataaagttaactacgaccaccccaattcgatggatcacgcacttttataccaacatttgtgtgaactaaaagccggaaacgccatcgaactccctcaatatgattatgtcgctcacacccgtaaatcagaaaccattcattttaaaccaaaaaaagttattattattgaaggtattctgttattaacagataagcgcttacgtgaagagatggatttttctatctttgtcgatacgccattagatatctgtttaatgcgtagaattaaacgtgatgtgaatgaacgtgggcgtagtctagattctgttattgaacaatataataaaactgttcgtccgatgttcttccagtttattgagccttctaaacaatatgccgatattattgtgcctagagggggaaaaaaccgtgttgcgatcgatattttgaaagcaaaaatcggacagttttgtgaataa

SEQ ID NO: 313417 - DNA, 1113 bp, Proteus mirabilis
atgagtgataaatcccccgagcagaccacccctgagattctgaaagaaaaagtttcaggtgtcttgtctacttttgaacacccgacattgaaacgtaatctgctttccctaaaagcattacatcagtgtgcgatgattgatgatgtccttcatatcgaattagtgatgccgtttgtgtggaaaaaacctttccaacaactgattgaagaaaaaacggcagagctgcgtaatatgacgggagccaaagctgttgagtggaagctaaaacacaatattgccacactacgtcgtgcaaacgatctaccaggtattaatggcgtacgtaatattctggcggtgagttcaggtaaaggcggggtgggtaaatccagtaccgcggtaaaccttgctttagcgctagcacaagaaggggctaaagttggtattctggatgcggatatttatggcccatccattcctaatatgttaggtacaaccatggaacgcccaacttcaccagatgggcaacatatggcacctattatggcgtatggtctagcatctaactctatcggttatttagtcacagacgataatgccatggtatggcgtggtccaatggcaagcaaagcgttgatgcaaatgctgcaagatacgttatggcctgatttagactaccttgtgatcgatatgccaccaggaacgggtgatattcaattgaccttatcacaaaatattccggtgactggcgccgttgttgttacaacaccacaagatattgcgctggtggatgcgatgaaaggcattgtcatgttcaaaaaagtcaatgtacccgtattaggtattattgagaatatgagtgcgcatatttgtagcaattgtggtcatcttgagcctatttttggtactggtggtgctgagaaattagccgaaaaatatcattgccaattattgggtcaaattccactgcatatctctttacgtgaagatttagatcgcggacaaccgacggtgatgcgtgatccagaaggtgaattcgctgatatctatcgtgaaattgcttcaacagtttctgcgcaaatgtattgggatggggatgctattccaacggaaatttctttccgcgcggtataa

SEQ ID NO: 313418 - DNA, 2028 bp, Proteus mirabilis
atgtctcacgtcgcgaataaattattggtaacctgtgcgttaccttatgctaacggttcaattcatctcggtcatatccttgaacacattcaggctgatatctgggtccgttaccaacgaatgcgcggcaaagaagttcatttcatctgcgctgatgatgctcacggcacgcctattatgctgaaagctcaacaattgggtattaccccagaagccatgattgaagagatgagcaaagagcatcaacaggattttgccggttttaatatcagctacgataattatcactccacacacagtgaagaaaatcgtcaattatcgacgaaaatttatctagccctgaaaaaaaatggtcatattaaaagtaaaacgatttctcaactttatgatgaagaaaaaggcatgttcttgcctgatcgttttgttaaagggacttgccctaagtgtaaagcgcccgatcaatatggtgataactgtgaagtatgtgggtcaacttatagcccgacagaattaattaatcctcgctctgtggtatcgggttcaacgccggtaatgcgtgaaactgaacactatttctttgatctcccagcctttagcaatatgttgcaagagtggatccgctccggtgcattgcaagagcaagtagccaataagatgcaagagtggtttgacagcggtctgcaacagtgggatatcacccgtgacgccccttatttcggttttgaaatccctgatgcgccgggtaaatatttctatgtttggttagacgcccctattggttatatgggctcattcttaaacctatgtgaaaaacgtggtgatttaagctttgatgagttctggaacaaagagagcaaaactgacttataccattttatcggtaaagatatcgtttatttccacagcttattctggccggcagtgttagaaggtagtgaataccgtaaaccaaccaacctatttgtgcatggctatgtcaccgtcaatggtgcgaagatgtcaaaatctcgcggcacctttattacggcacgtgcctatcttgatcactttgatgctgattgcctacgctattactatgcggcaaaactttcatcacgtattgatgatattgacctaaacttagaagactttgtacagcgtgtaaacagcgatatcgtcaacaaggtggttaacctcgcgtcccgtactgcgggttttatcagtaaacgctttgatggcaaattagcggcaagccttgatgatgcgaagttatatcaacatttcgtcgatatgcaagaaagcatcgcacaatgttttgaaaaccgtgaatttggtaaagccattcgtgaaattatggcattagcagacgaagctaaccgctatattgatgaaaaagcgccttgggtggttgctaaacaagaaggtaaagaggctgagttgcaagctatttgtactatgggaattaacttattccgtgtactgatgacttatttaaaaccaattctaccttctttaacagaacgttcagaagccttcttacaaactgaattaacttggaatgctctgtcgcaaccgctgttaaaccatgaaattactaaatttaaagcattgtttaatcgtattgaaatggataaagccaatgcaatggtagaagcttcaaaaagtaccattgcgccagtcaaagaaatcacgggtccattagcagacgcgcctattcaagaaactattaaatttgatgattttgccaaaattgatatgcgcattgctgaaattaaacaggctgatttcgttgacggctcagataagttgctaaaattaatactggacttagggggagaaacacgccaagtattctccggcattcgttctgcataccctgatccgaaagtattagaaggtcgcttaactgttatgattgcaaacctagcacctcgcaaaatgcattttggaatttcagaaggtatggtgatggccgcaggccctggtggtgaagatattttcttacttagcccagatagtggggctaaaccgggtcaccaagtgaaataa

SEQ ID NO: 313419 - DNA, 468 bp, Proteus mirabilis; identical to SEQ ID NO: 294252

SEQ ID NO: 313420 - DNA, 702 bp, Proteus mirabilis
atgttaatattaatgaatatttggtggtcattaccgctaacacttattattttctacttagcacgtaaactggctgctcgatttaaatggcctattttaaatccgttattgattgctattgttgttattattcctattttattagtgacacacaccgcctatgaggattattttgccggaagtcgtatccttaacgacttgttgcaacctgctgttgttgctttagctattcctttatatcaacaattacaccaaatacgcgcacaatggaaatcgttaattagtatctgctttattggtagtatcgccgccatggctagtggtacagcgattgcattatgggctggtgctactcctgaaattgccgcctccattttgcctaaatcggtaacaacccctatcgcaatggctgttgcggattccataggtggtattcctgcaatcagtgctgcatgtgttattgcagtaggtattttaggtgccatttttggtcatacgctatttaaaatattacgtattccaactcacgcttctcgtggtttagcgatgggaacagtctctcacgcagtgggtaccgcaagagcagctgaaatcgattatattgaaggggcatatagttcattagcattaatgacttgcggtattattacttcacttaccgcaccttttatttttccttttattttgcacctttttagctga

SEQ ID NO: 313421 - DNA, 885 bp, Proteus mirabilis
atgcatactcgttttcaggcaatttggtcagatttatcccctcaattacaacaagcacttacgccttatcttgagcaggatgaatttccggcaatgttcactgcagaacaagttaatgcgttaaaaacacagttacaatgtaatgatgatgagttagccctcgcattactgcctgttgcagccgcttgtgctgtgacacctatctctcattttaatgtgggtgccattgctcgtggtgaaagcggccacttctattttggggcaaatatggagtttgctggcgccccattacaacaaacggtacacgcagagcaaagtgcggttacacatgcttggttacgcggtgagtctcgtttagttgccatcacagttaactataccccttgtggtcattgtcgtcagtttatgaacgaactaaatagcggcactcatattgcaatccatctcccaggccgaaaagtggcgaccttaggtgactacttacctgatagctttggccctaaagatctcaatatcactaccctactgatggataaagttaatcacggttatcaaatagataacactagccaactagcacaacaggcactacaagcaataaatcgtagtcatgccccttacagccattctcacagtggtattgctgtacagatgaaaagcggcaagatctttcaaggcagttatgctgaaaatgccgcattcaatcctagtatgccaccattacaagcggcacttattgcattaaatatggcgggtgaaaatgttatggatattgagtctgcaatattaattgaaaaagcagacagcctattaactcagtgggatgccacccaagcaacattaacagctttaggttgccgccaaatacagcgtgtcactttgtaa

SEQ ID NO: 313422 - DNA, 1698 bp, Proteus mirabilis
atggaactggaacacgaaagtaaacgtcctctctatatcccgtatgcaggcccaatcctgcttgaatttcccctgttaaataaaggtagtgcttttagcgaagaagagcgcagcacctttaaccttcatggtttactgcctgaggcagtagaaaccattgaagagcaggtggaacgcgcttaccgtcaatatcttgattttaaaaatgataacgataaacacatctatttaagaaatatccaagataccaatgaaacgctattttatcgtctgttggaatctcaccttactgaaatgatgcccatcatttatacccccacagtaggtgaagcttgtgagcacttctctgatatttaccgccgtgcgcgtggactttttatctcttaccctaaccgcgccaatattgatgatatgctacaaaacgccaccaaacaaaacgtaaaagtgattgtggtcacagatggtgagcgtatccttggtttaggtgaccaaggtatcggtggtatgggtattcctattggtaaactctctttatataccgcttgtggtggaataagccccgcttataccttacccgttgtactggatgttggcaccaataatccacaacgtttaaatgacccactttatatgggctggcgccacccacgtattaccggagatgaatataacgaatttgtcgatgaatttattcaagccgttaaacgtcgttggccaaatgtactgctgcaatttgaagattttgcacaaaaaaatgccatgccgttattaaatcgttatcgtgatgaattatgttgctttaatgatgatattcaaggtactgccgctgtgacattaggtagtctaattgcggcaagccgtgctgccgggcgtcaattaaaagatcaaactgtcgctttcttaggggcaggatcagcaggttgtggtattgcagagcaaattattgcacaaatgaagtctgaaggactaagcgacgaacaagctcgtgcacgtatctttatggttgaccgttttggtttattaacggataaactgccaaacttactcgatttccaaagtaagcttattcaaaaaagcgaaacgctggccgattggcaaacagaaacggatgcaatttcactgttagaagtggttaaaaatgctaagccaaccattctgattggcgtttctggtcaagcaggacttttcactgaagagattattcgtgaaatgcataagcattgtgaacgtcctaccgtgatgcctctttcgaacccaacgtctcgtgttgaagcgcgtcctgaagatattattaattggactgatggacaagctcttgttgctacaggaagtccatttgccccagtcacctataaagagaaagtgtatcctattgcacaatgcaataactcatacatcttcccaggtattggccttggcgttattgcaagtggtgcaaagcgtgttactgatgccatgttaatggttgcaagccgtgcgttagccgattgctcgcctatggcaaaagaaggcgatggcccactattacctttattagccgatattcaacaagtttcacgttatattgctaaacaagttgccaaagaagcacaggtgcaaggtgttgcaacggtcacgtctgattctgctttagaagaagcgattgaacgtaactattgggagcctgaataccgtatttacaagagaacgtcattctaa

SEQ ID NO: 313423 - DNA, 726 bp, Proteus mirabilis
atgctaaagcgcctcatttatctctttttgaccctttttatcttagttgcggtggcattaattgcttgtgatcgctggataggtgtaaaaactagcccctatatatttgaagatatagataaactacctgccaaaaaagtaggcatggtattaggtactgctaaatattacaccacaggctatcttaaccaattttatcaatatcgtattcaaggtgctgttaatgcctataacagcggcaaagtgcaatatctgttactcagtggagataatgcacagcatagctataatgaacccaatacgatgcgtaaagatttaattaaagcaggcatacctgcatcgcgtatcgttatggattttgctggatttagaactttagattcggtagtacgcacaaaagaagtgtttgggacagatggctttactattatcactcagcgtttccattgcgaacgagccgtatttattgcccttgaaaaaggcattgatgcccagtgttttgctgttgcttcgccgaagagtatgtttaaggtgcgtgtacgtgaagttttagccagagcaggtgcggttgtcgatctctatatattaaaacgcgaaccgcgttttctaggtccaccagaagcaatacctgctgtacaaaatattcctgatgatattaagggctatccggcggtttcaccacaagaggtagaagcgttgccattaaacaatggtaaaaacagttaa

SEQ ID NO: 313424 - DNA, 1152 bp, Proteus mirabilis
atggaacaaagttcacgtcaacgcatcgacgctttagatgcgttgagaggaatagcgatccttggcatcttattactcaatatctcaggttttgccttattaagagttgcctcatttaatcctatgcattcaggagaggcgacttttgcggacaaacttacttggatgggattaaatttatttacccaaggaaagtttctgtttatttttgcgctgctatttggcggaacactttatttattatcacaacgctctgttgcttggaacgtctctcgcctaattattctggcattaatcggtattattcataccctattactatgggaaggggatatcttatttccttatagtatttgcggattatttgttctcttttttattaaagcattacctattaagcggcaatttatccttgggctgctgctctatttatttggcgcgattattttagcttttttattttattactatcgtgattttgttgaaatagtttggtatagctctgactattccgccatgatagagactaactggaaaaccggaaactatataaatagtatctactggcgattagatgaactgagtgattttatttttaatttagttcgtcaatatagttggtttttaattggcgccatgttaatgggggcggcgttaatggcatccggttggttacaacgacgctattcacagtctcattatggtttgatagcggtttgttttttagtcataagtttacttttccaagggacgcttgttattaccgattattatttagattggcattatatgtggtctgcggtagtggctcagcctatcaccatggtgatccaaattattcaaagcttaggttatattgctttactctattgggcatggccttatattcaacacagttttatcgcctatgctttacgttgtgtggggaaaatggcgcttaccacctatttactacagagtattattggcacgacgcttttccagcggatggggttatttaaccaatttactttattgcagcttatgctatttgtgatggctatttgggggataaatattatctttgctgtaacgtggttacgctatttttctcaagggccaatcgagtggctgtggcgccactcgtcaacagggttagctaaacgcttttaa

SEQ ID NO: 313425 - DNA, 663 bp, Proteus mirabilis
atgtcatcaacattaagtaaagaggcgcaatgggtacatgccgcgttagtggagcgtggtttggaaacgcctcttcgtgagccaaaactttcacccagtgagagtaaacaacaaattaaacatcacatgacggaagtgatgaaattgttaaacctagatttgagtgatgacagtttagcggaaacgccacatcgcattgcgaaaatgtatgttgatgaaattttttcaggcttggattatcacaactttcctaaaatcaccctgattgaaaataaaatgcaggttgatgaaatggtcactgttcgtgacatcacattaaccagtacttgtgagcaccattttgtcactattgatggtaaagcaacggttgcttatattcctaaagataaagtgattggtttatcaaaaattaaccgtattgtgcagttcttcgcacaacgccctcaagtgcaagagcgtttaacgcaacaaatattgattgccttacaaacgctattggggacgaaaaacgttgctgtctctattgatgccgttcactattgtgtaaaagcaagaggcattcgtgatgcaaccagtgcaaccaccacaacctcattaggtggactatttaaatctagccaaaatactcgccaagagtttttgcgtgctgtacgccacctttga

SEQ ID NO: 313426 - DNA, 1242 bp, Proteus mirabilis
atgagtcaatgtcaggttagcggtttgttatcccttgatgaggcgctagaaaaattacttgaaaaaccggtggcaatcacagatacccttagtatccctttgcataaggcagcaggttatatcttaagtgagcacatcacttcaccactcaatgtacctcctttcgataattctgccatggatggttacggtgtacgttatacggatctaaacactcaatctcctttacctattgcaggcaaagcgtttgctggagtcccttttgaaggtgaattaccacaaggacaatgtgttcgtatcatgaccggagccatgatacccgcaggtgtcgataccgttattatgcaagaagaaacacaagtgactgacaacggtattctttttccacatccggccaagcttggacaaaatattcgtcgtattggtgaggatataaaacaaaacgatatcgtcttagccgcaggaacaaaactttctacagcacagttacctcttattgcttcactcggtattgccaatattaatgtttaccgcaaattaaaagtggccgtattttcaacgggtgatgagttgcaaactattggccaaccattaaaagcggggcaaatctatgatactaaccgctttgccgtacgcttaatgttggaaaaattagattgtgatgtgcttgatttaggcgttattccagattcgccagaaaaactgagagaaacctttaaaaccgctgatgcacaagcggatttagtgattagcagtggcggagtttctgtgggtgaagcggactatactaaacaaattttagatgaaataggcgaaattggtttttggaaattagccattaagccgggtaaaccttttgcttttggtcgcttacataatgcttggttctgcggattaccgggtaatcctgtatcagcaacagtgacattctaccaattagtacagcctttaattgcccgtttatctggttttagtcagtggcgagcaccacagcgtttccatgctaaaacctgttcaccattaaaaaaatctgtcggtcgtctggatttccaacgcggtatcgccagtattaatgaaaatggtgaatggcaagtaaccacatcgggacatcaaggctctcacgtatatagctcctttagtgttgcaaactgttttatcgtcttagagcgagagcgtggtaaagttgcagcgggtgaaaccgtcactattgagctatttaatcctctgctaaaaagcgaatag

SEQ ID NO: 313427 - DNA, 768 bp, Proteus mirabilis
atgagtatagaattaaccgatgaagaaacgctgcgttataatcgccaaattgtgttaaggggctttgattttgacggtcaagaagcactgaaaagtgcttctgtattgattgtcggtgttgggggattaggctgtagtgtatcgcaatatctcactgccgcaggtgttggcaaactgacactattagattttgataccgtttcactgtccaatcttcaacgccagatcctgcatcgcgatagcaccattggtcagccgaaagttttatcagctaaaacaacattaaacgcgattaatccccatgtacagatagatacggttgatgcactacttgaagataaagcactggctgaattaatcagccaacatcatctggtaatggattgcacagataatgtcactatccgcgaacaactaaatcgactgtgttttatgcagaaaaaacccttagtatctggtgcagccattcgtatggaaggccaaattagcgtctttacctatcaagatgatgaaccttgctatcgctgtttaagtcatctttttggtgataatgcactcacttgtgttgaagcgggtattatggcccctgttgtgggtactattggcactttacaggccattgaagccatcaaattactcactggttatggtgaaactttacatggcaaagtattaatatttgacgctatgcggatgcaatttcgtgaatttaagttacctaaaaatccacactgtgatgtatgtgcggctaatttgcccgataattga

SEQ ID NO: 313428 - DNA, 1701 bp, Proteus mirabilis
atgacatttcaaattgcagacacactctattataacggcctaatctataccgctgataatagtaacaatttcgtcgaagctatcgctgtttcccaaggcattattattgcaacaggcacaaaatcgaatttacttgcttactgtaatgaaaaaacacagcatatcgatttacagaagaaaatggtgatgcccggcattattgatgctcatatgcatccattttgggggggagccacattagcaggttgtcaccttgattacctctccttaacaatcgatgaaattctatcgcgtatccaacgctatcttgatgctgatcccatcgatagtgatacagcttggttgaaagtgtcagcatggtatcgtgaagggatgcaaccggaagggatacaaatgacgcgttatcaccttgatagcttaaatacgtctcgccctatcttacttttttctagtgattgtcatagcgtattagcaaattcccgcgcactagaattattaaatattacggctgaaacccccgatccacctgatggcaatattgaacgtgatggtgatagaacacctattggtattcttgaagatgcgccagctatgcaggctattgatagcctaccgcctttaacggcagagcaaaatctacaaatcgcacgccatgtacaaaagttgctcaatcaacaaggggtaacgactatcatggatgcacgtgttggtgagccacaattacgtgcctttaataccttgcgagaagcgggtgaattaacggttcgtgttgagaatgcggttgaaattacccctgatgatgtggctgatattgcagctattcctcatgctgtacaacaagcaataacacgattctctcactggcatcaaatcagccaaggcgcgcaacccagtgtcgctattcgccatattaagctttttcttgatggtgtattacaagcgccgattatgacagcccgtttacacgccccttatcgtattaatgtcggtacggatgaaacgcctcattggcaagattcagagcatgttggcgatctctatttttcacctgaaatcttgacgccattagtcactgagattagccgtgcaggttatcatcctcatattcataccgtagctgaaggggctattagtgtcgcacttgacgccattagtgaaatgcgcaaagccttgccagaaaaagatattcgccccggccttgcgcataacgaattaatgtgtgaaaaagattatgcgcgctttgcccaattaaatacctacccttttctctcctttcaatgggctggcgtagagcaacataatattgataaagatcttgaaatgttaggcaaagcacgttgccaatatctagaaaccgccggtaaatttattgatgcgggagtgactgtcgcatttggcagtgattggccgattgatccattaaatgagtggtatgactttaaagttgccatgactcgacaaaaagatccctctcagccacgtttagataatgatcgcaatctcaccttaatcgaagtattacgagccgccaccatcaatgccgcttatgcactagatatggataaacagattggttcattagaagtaggaaaattcgccgattttattgtcttagatagaaacttgtttgaaatatcggcagaagatattgaaaatgtcagggtattgtgtacgataattgcggggaaacccacaatttag

SEQ ID NO: 313429 - DNA, 579 bp, Proteus mirabilis
atgaataaaataaagtctattgccgtgtattgtggttcaagtttaggtgcttcaccaatttataaacaacaagcgattctttttgctaaagagctggttaaacgtaatatcactttagtttatggtggtgccagtgtaggaattatgggcacgctcgcggataccgttttacaggaagggggtaaagttattggtgtgatcccaacgctattagaagggcgtgaaatctcacataaaaatctgacagagctccatgtcgttgaaactatgcaccaacgtaaaagtaaaatgattgaactcgcggacggctttgtggcactgccggggggttttggcacattagaagagttcagtgaagtgtttacttggagccaaattggccttcatcaaaagccattaggtatatttaatattaatgatttttatcagccattactggctatgatagataaaatggtagatgaaaaattcttacatgaaaaatatcgtcatatggcgattgttgagcaatcacctatccagttattagataaatttgaaagttatattgccccttcgattaaaacctacgataaataa

SEQ ID NO: 313430 - DNA, 486 bp, Proteus mirabilis
  misc_feature (457)..(466): n is a, c, g, or t
atgagagataaccctacattaaaagagatccctattgcagtcggtggtaatgcttctcgtcgaggtgttatctgtactgctaattatcctgctcgccgttttggtgtccgtagtgccatgtcaacggctacggcattaaaattatgccctcatttaaaagtattgcccggtcgcatggcattatataaagagacttcagctaaaattcgtcaaatatttgcccgttatacagatttaatagagccgctttcattagatgaagcttatcttgatgtctctgatagcaaacactgtcacggctctgccacattgatagcgcaacagatccgccagcaaatttttgctgaacttaacctcacggcttccgccggtattgcgccgattaagtttctcgccaaaatagcatctgatttaaataaaccgaatggacaatatgtgatcacccctgaacagatgnnnnnnnnnncaatatgtgatcaccactga

SEQ ID NO: 313431 - DNA, 4290 bp, Proteus mirabilis; identical to SEQ ID NO: 32493

SEQ ID NO: 313432 - DNA, 183 bp, Proteus mirabilis
atgcgtaaagtagcaatggttgcactagcatcaatgtttttagtagctccgacggtagtaatggctgaaacatcaaatacaaataatcagcctgcagggcaacaacagtataatgataattaccattgtggatacggttacggtatgcatgatggacgtgataaccgaggtcatcgtggataa

SEQ ID NO: 313433 - DNA, 549 bp, Proteus mirabilis
atgaccaacgcatcaaataaaatcgccactcacgagatcactattcggccaactcaattggctgatgccaaccaactaccgaagattgaacaatcggcaggagagttatttagcagcataaaagaattaagttggatcagcgaaagtggtgtacaaagtgttgaggcgcatattcaatttatccatcaacatgctcactgggttgctgttaatcatgacaatcatcccgttggttttatcatgacgcaacaattacctgaaagtgtatttattcatgaattatcggtaagtaaagattggcaaaataaaggaattggtaaattgctgatccagacagtaaaaaatgaagctaaattacagcaatttaatgcggtaacgttaacgactttccgcgatgtcccttggaatgctccctattatcagcgtttaggtttccatatcttacttgagcatcaaataccctattctttacaacaaattttagataatgaagtagagcatgggggatttgcgagagaaatgcgttgtgcgatgaagtgtgaaatttaa

SEQ ID NO: 313434 - DNA, 597 bp, Proteus mirabilis; identical to SEQ ID NO: 305582

SEQ ID NO: 313435 - DNA, 378 bp, Proteus mirabilis
atgaataaatacaccgaactatctgatttcgagattaataaaagggttgctattttcattggcttttcgtgctattacggtgacggaagctatacaaatggcttgggctctcgcgctacaatcgtgaaaggtaaaaataaccatggtaatttcaggttgggagagttcgacccatgcaacaactcagccgatgcaatgccgattattattggaaatttgatatcgttaatggcagatatatcagaggatagagggtcagcttggtggtgtgcaagtgatatttcaaatggaatcacatcgagatataaatcgaacccactgcgcgcagctatggaagttttcttgatggtaaaggatgcggagaatgaaaaagtatga

SEQ ID NO: 313436 - DNA, 972 bp, Proteus mirabilis
atgtacaatgaagaacagaagaaaatagctagaaaagaagttattcacacagcaattgaaaagttgacagttaaaaggtcagattcaactttatgccctaaggattatataagacgagtgaaatctttttataaaaatgaaagcgatgatacgagggcattccttgtagataagttatctgattcaacaattaaaagatgggaagatttttatagctcaataattcatgataaaactgcctctagcttgaaaattgcttatttatcaggtccaaatcctgaaaatgatattaatgaaatgactaatctaggaatactgccggaaaacatttgggctttcgaaagtgattctaaaatatataatgaggctgttatttctgcattgtcttcaaagtttccttttataaaattgattaaatcaaatattggtgatttttttgaggtatccccgcaaaaatttgatattatttacctagatttttgtggtccattgccgagtaagaaaggtgggcaaaaaacattaaaaacaattactactatattaaagcatcatgcacttaccccactaggagtattgattacgaatgtcagtcttccatctaaaacacaaaatgaagaggaccacattaatcttgcaacattaactgctgactatttatatcctaagtcattcttagaaacaaatgatccaaaatggaattgcatggatggggcaatatctcatggcttcgatccagataaatggcgaagtgaggtggctgataatatagaaaattattacggtcagtatattacaagactattaattgatacgatttctgttatatccccttatgagaattttgtatcgtctaattcatgtttaaattgggagataaacaaagtatacaaaaaaaaatcgattcattatatcattttgattgtgattataatgggggggatgttattacagatgcagcattttatcccataa

SEQ ID NO: 313437 - DNA, 273 bp, Proteus mirabilis
atgaaaaaggccattatcctttcggtgtcattagccacattatttcttgctggttgcactgcagatggaaaaatcaaaacctctcaactgacacccgttaactgtgtcggcgtatttaataaaactaatgaacaagtcagctttacggcaaaagatgttgatcagcgcttatacagcccagataagccaatagacagtgttgatggctggattgatgttaaagatgtttctggtcttctctgtgaggatgtgatcacggctaatgaagactag

SEQ ID NO: 313438 - DNA, 516 bp, Proteus mirabilis
atggcgttaccacgcaagttaaagaattttaatttatttatgaatggcgccaattatgtgggcgttgcggaagaactcacattacccaaaatcacccgcaagttagaagcctatcgcgggggcggtatgaatggttcggtgcaaattgatatgggccttgatgacggcgcgcttgatagtgagtttactcttggtggcgctgatattgacgtttaccgccaatggggtgcctcaaccattgatgcggttcaattgcgtttatgtggcgcttatcagcgtgatgataccggtgaagtgcttgccgttgaagtggttctccgtggtcgttatagcgaaatcgatccgggtaactggaaatcaggcgataacacacaaaccaaaatcaccgtaaaacccacttactacaagttagtgatggacggtcaagaaattattgagattgatatcgtcaatatggtggaaaaagtggacggtaaagacctgttacaagcacagcgtgacgcgctggggctttaa

SEQ ID NO: 313439 - DNA, 246 bp, Proteus mirabilis
atgtatatggatttgtttgttttggatgagtgtcgttatttatatgattggatgccttcttttgatatgttttattcagggatgcaagatgtcgaaagacagtacagctttcgatttatattggatgccgttgcgaaacataggatgatatataataatgaattctttttcggaacagcatccgtttgtcgaatggaggacgggttcctagaaaaaatattaaaagttagagatgaaattctttag

SEQ ID NO: 313440 - DNA, 1188 bp, Proteus mirabilis
atgaaattatcaatccgtagtctgttttaccttgtttgctttagcgctttattaggctctctagcacaaaatatttatactcctgtgctgccattgatccagcagcaatttaataccacattatcactggttaaccttacggtatcagctttcacttttgctatggctgttatgcagttatgttatggttcattgattgacaaatggggcagaaaacctattttgctcagtgggttaacgatttcaattatcggcgcacttatttgtatatgggctaattctattaacctattaatttttggacgagtgatccaagccataggtatcgctgccatccctgttgtcgcagcaactattttaggcgatctctatcaagggaatgagcgtgctaaagcaatgggaagttaccaaatgttactagcattagcaccagcgagtggtcctttattaggcggctatttagcacaacattatcactaccaaagtatttttgttttcttaagtatggtgggacttgttttgctgattgcccatctattttatttacctgaaactcgcccagaacaaaaacagttcgttaaaagcttatctgctatgcgacaagtgctcgccgccccagagggtaaatctgtttttgtgataagttttatggtgttttataactacttctgcctattagtatttttacccttaattgcttttcacctttatcacttaaatagcagtgaaattggtgggctttatgttcctatgtccattgcactggtgttaggcagttacctttaccgtaaggtttgtcatttgtttagcgctgaatatggtgtgatcataacttcatgtataaaccttgccatgttgtcgttatttgccctattttggcaaatctcattaccaataatgttaatattaacggtgttatatggtctctctttaggattaactatgcctacacacacgaccttattaaccagccactttagttcagtaagagcaacggcaatgggtatttataattttatccgctactgtggtatggcagcagggcctatggtcgcaagctattttgtcaccgataatcattatcaatatgtcttttattcttgtgtgatcttaacaagtttggcattgtgttttgccatcaaaacgctactttccacattaaaacaacaacgacaaaccatcgactaa

SEQ ID NO: 313441 - DNA, 417 bp, Proteus mirabilis
atgaaactaaccattgaaaatctgccgcagctttcagcacaagataaaatagatttagggaaaatttggcaagatagtgagtaccaaatggcactcactgcaccaatcaccacagagcatgctctttttgtcgcccgttttaacgggcgattactagcggcttgtcgtataaaataccaagcaaaaacagcgcttatcagtgattttatggtaagagaagtgactcgtcgtcgtggtgttgggcattacttactaacacaatgccttgaaaaaaatccaaccattacacattggcaagctttattgaaaacagggcaaatcaacgatcctgtagcacaggcttttttagcgcatcatcattttgctacttcattacaggctgatacttatgattatttctgcaatgataaagcataa

SEQ ID NO: 313442 - DNA, 1149 bp, Proteus mirabilis
gtgaaagagataaaaatagttatcgccccagatccttttaaagagagcttaagtgccaaagaggtggcagaggcgattaaacaaggcttttcacgttatttacctgatgctgattattgttgtattcctatggccgacggcggtgaaggtacagtaacgtcattagttgatgctacccatggtcgttttatcacaacgccagtttgtgatccattaggtaaacaggtaacagccacttggggagtgttaggcgataatactactgccgtgattgaaatggcacaggcatcaggtcttcatcttatcccttcatctcaacgcaatcccaatttaacgacgagttatggtaccggtgagttaatttgtgccgcactagatttgggggttaaaaagatcattttaggcttaggaggaagtgccacaaatgacggcggtgcaggtatgatgcaagcgctcggtcttggtcttaaagataagtctggaacatctctgccttttggtggacatgcattaagtcaacttcattctatagatatcaatcaactacatccaaaacttgcctctgttgatatagagatcgcctgtgatgtaactaatccattatgtggcgaattgggggcttcaaaagtctttggcccacaaaaaggggcgacagaacaagatattgcgcaactggatagcgcactacaccattttggtacttatcttgagaaaatgacacaacgcactcttatcaatattgcaggaagtggtgcagcaggaggattggctctgcctttgctggcatttacgcaagcaacactttcaccaggtattgatttggttgctaacgctgttgaattagaaaaacagttaatcgatgcagatttggtcataactggcgaagggcgaatggacagccaatcggcgcaaggtaaaaccccgataggtgttgctaaattagctaaaaaataccatcgcccagtgattgcattagttggtggttatttaccagattatgatgtggttcatcagcagggtattgatgcggttttctctatcatgcctggtgttgccactttacaacaagcctttgataatgctgagcaaaatttacaggaaaccgcttataatgtagcgaggctttatgctttatcattgcagaaataa

SEQ ID NO: 313443 - DNA, 855 bp, Proteus mirabilis
atgacaaaagaaatgcaatccttagcattggttccgcaaggcagcattgaagcgtatatccgtgcagccaattcctatccgatgttaacggcagaggaagaaaaggaactggctgaacggctgcattacgagggcgatttggaagcagcgaaaacgctgatcctttctcatttacgcttcgttattcatgttgctcgcagttattcaggatatggtttacctcaggcggatcttatccaagaaggtaatattggtttgatgaaagcggtgcgtcgctttaaccctgaagttggggttagactggtttctttcgccgtgcattggatcaaagccgaaattcatgaatatgtgttacgtaattggcgtatcgtgaaagtcgcgacaacgaaatcacagcgtaaactgttctttaatttaagaaaaaacaaaaaacgcttagggtggtttaaccaagatgaagtcgagctagttgcgaaagagcttggggtttctgagagcgatgtgcgtgaaatggaatctcgcatgtcggcacaagatatggcatttgacatgagtgctgatgatagtgatgactcacatcctgtagctccggtgctattcttagaagataaatcttctgactttgctgatggtattgaagaggataactgggataaccatgcagctgaccgactgactttagcgataaaaacactggatgaacgtagccaagacattatccgcgctcgctggttagaagatgataataaatcaactttacaggagcttgcagataaatatggtgtttctgctgagcgagttcgccagttagaaaaaaatgcgatgaaaaaattgcgtttagcgattgaagattaa

SEQ ID NO: 313444 - DNA, 978 bp, Proteus mirabilis
atggctaaaggaaaacactcccgtaaggcaatgccaacaccaaaagcgaaaacaaaagcattacgtggtggacgccgtgagcagtggcgttatgcatggcgtaataccatggccgactttttacgccaacctctctcttctttcttaacggtgatggtagtagcgatttcattaacactacctagtatctgttacattgtctggaaaaatgtatcaacagccgcagagcagtggtatcccactccgcaactgacggtctatcttgataaatctctagatgacagcttagcgcaggcaacgataaaaaatatcgaggcattagataaagtcgaagaggttaattatctttctcgtcaagattcattagtggagtttcgctcatggtctggatttagtagcgcattagatatgctagaagaaaatccattacccgctgtcgcgattgtgactcctgttatggatcctaatgacgagcaattaatggttaatctgcgtgatgcagtggcaaatattgccggtgttgacgaagtgagaatggacgatagctggtttactcggttatctactttaacctcattagttggacaaatcgcaatggtgatcggtagcttaatgattgtggcactgctattggttattggtaatagtgttcgtcttaatattttcagtcgtcgtgataccattaatgtgatgaaattaattggtgctactgatggctttatcatgcgtccctttttaaattggggtttagtactcggctttatcggggctatttttgcgattattttctctgcattattggtatggaagttatctgatgtcgttacgcaagcggcgaccgtatttggaacaactttctcaatatctggattaggttttgatgaatcggttattttgatcctcgtttcgatgaccattggctggtttgctgcttggttgaccaccatgcaacatttacgtcaattcacaccagaatag

SEQ ID NO: 313445 - DNA, 666 bp, Proteus mirabilis; identical to SEQ ID NO: 293796

SEQ ID NO: 313446 - DNA, 852 bp, Proteus mirabilis
atggggctattccgcggtaagaaaattgatgacgagcttttcgaagagttagaagagcagttgttaattgccgatgtgggaatggataccactagcaagatcattaacagtttgactcagcatgctagtcgtaaagatctcaaagatgctgaatctctttatggtaagttgcgtgaagagatgggcgatattttaaataaagtggataagccattaaatattgaaggtaaaaaaccttttgtcattttaatggtcggagttaatggggtcggtaaaacgaccactatcggtaagttagcccgccaataccaagctgaaggtaaatcggtgatgttagctgcgggagataccttccgtgcagcggcggttgagcaattacaagtttggggtgagcgtaatcatatccctgttattgctcagcatacgggggctgatccagcatcggttatttttgatgctattcaatcggcgcaagcaaaaggtgtcgatgttctgattgcggataccgcgggacgattgcaaaataaatctcatttaatggaagagctgaaaaaaatcgtccgtgtaatgaaaaaattagacgaggaagcaccacatgaagtgatgctgacactcgatgccagtacagggcaaaatgctgttagccaagcaaaattgtttaatgaaacggttgggctgacaggattaaccttgacgaaactagatggtactgcaaaagggggcgttatcttctctatcgctgatcagtttggtattcctattcgctatatcggcgtcggtgaaggtattgaagatttacgtccgtttaaggccgacgattttattgaggctctgtttgcccgcgaggagtag

SEQ ID NO: 313447 - DNA, 405 bp, Proteus mirabilis; identical to SEQ ID NO: 303816

SEQ ID NO: 313448 - DNA, 1746 bp, Proteus mirabilis
atgaatgatatagacctatcaacgtggcaaacattccgacgcttatggccgatgattcggatctttaaagcggggttgtttgctgcagcaggcgcattaatcataaatgcgggtgttgatgcatttatgatctctttattgaaacctctacttgatgaaggtttcggtaaagcaagtaatgatgtattaaaatggatgcctttagccgttattggcctgatagttctgcgtggtatatctaactttatttctagttactgcctttcttgggtatcaggaaaagtcgtgatgaatatgcgccgtcggctgttttctcatattatgggaatgccggtgagcttttttgatcagcaatctacaggtacgttattatcacgtattacctatgattcagaacaggtcgcttcatcttcatcaggggctttgatcactgttgtccgtgaaggggcttatatcatcggcttatttggcctgatgttctactatagctggcagttatcacttatcttgattgtgatcgcacctattgtggcggtggtgatcagaatggtatcaacacgctttagaaccatcagtaagcgtatccaaaatagtatggggcaggtgacaacaagtgctgaacaaatgcttaaaggccataaagaagtcttaatttttaatggtcaagaagttgagaataagcgctttaatcatgtcagtaaccatattcgtcgccaaggtatgcgtatggtggtggcatcttctatatcagatcccattatccagcttattgcttcttttgctttagcctttgttttatatgcagccagttttcctgagattatggataccctgactgcagggacaattacggtggtcttctcttcaatggtcgctttaatgcgcccattaaaatcattaactaacgttaatgctcaattccaacgaggcatggctgcttgccaaacattatttgctatccttgatatggaacaagagaaagataccggcacccttgagctgaaaaaaccaacaggtgatattgagttccgtaatgtcactttccaatatatcaccaaagatacacctgctttgaaaaatctgtccttcactattcctgaagggaaaacagtggcactagtagggcgttcaggctcaggtaaatctaccattgcaaacctcctcactcgtttttatgacgttaatgaaggggagattttgatcaatggtcacgatattcgtgattacacattaagatcactacgtaatcaggttgcgttagtttcacaaaatgtgcatctgtttaatgaaacggtagcaaacaatattgtttatgcttgtgaagaccaatatacccgtgaggatatcgagaaagcggctaaaatggcccatgctatggactttatccaaaaattagataatggtctcgatactgaaattggtgaaaatggcgtgttgttatcaggtggtcagcgtcaacgtattgccatcgcaagggcactattgcgtgatgcgcctattcttatcttagatgaggcaacttcagcattagatactgaatcagagcgggcaattcaagctgcacttgatgaactgcaaaaaaatagaacatcattagtgattgctcaccgtctatcaaccattgaaaaagcagatgaaattttagtgattgaagatggggaaattgttgaacgtggtgctcatcttgatttaattgagcgaaaaggcgtttatgctcagctacacaggatgcaatttggcaaatga

SEQ ID NO: 313449 - DNA, 504 bp, Proteus mirabilis; identical to SEQ ID NO: 306939

SEQ ID NO: 313450 - DNA, 375 bp, Proteus mirabilis
  misc_feature (336)..(345): n is a, c, g, or t
atgatctatgctgatttacatgttcacacaaaccatagtgatggtgtttgtgaaataaaagatgtccttgaaaatgcatttagaaacggcattaagactattgcgatcaccgatcacgatactaccaatcattatgacgaaatttaccgagaaggggagcgtcttggattaaatatcgtcaaaggtgttgaaatgagttgttatgactttgacgtttataaaaaagtccatgtagtgggactttggcttaacgaaaaaacgcccaacgttgacaagctgtgtgataacactcttaactgtcgtgatcagtttcaccgagaattaatattatctctnnnnnnnnnncaatcaacaaggctacgatatttgttatga

SEQ ID NO: 313451 - DNA, 744 bp, Proteus mirabilis
gtggtcaccgaccaccaaggaaccccgcgagagatattcagtgaaggcgggcaagtcagttgggcaggacggttgaatacgtggggccaaatgcagttttggcgttaccgagagggcaaagcggagaatgaccctaattataccgaatgtccttttcgctttgcggggcaatatgaagatgaagaaagtggcttgtattataatcgctttcgctattatgatagggaaacagggcagtatctttccccagaccccatagggttattgggtgggctgaatccgtatggatatgtgcattgtccgacggggtgggttgatccgtttgggttggcgggtgggccaggcaacaaaggagatgcaggtgtaggcacacaaaccaatacgccaaaagatagtgtatatattcctcgtgatgcaaacggcaaaccagtagcattggataaacaaatagttaatggtcaagatattcctttacctcatcctggggcggagggacgggcacatactgtattgggtggaaaagttagtggtaaaacgggagaagtttacaggcaatcagctactttccctgaggcaacctggcctccagcaaaaggaaaaccagttcctttaagtgaagttcattggacaagccatggtcgccctgatcatacaaatccacaccaacatccattccattatgaagggcaatatggatggaaaagggcagatagggttcctttcgatccaaatgggggtaaataa

SEQ ID NO: 313452 - DNA, 486 bp, Proteus mirabilis
ttgagtaaaaccaaaaccgttgacagtgacttagcccatatagacccattatttccgcagattaagcctaaaatcaccacgtggcgctatttatggtcgggagaccaactgatagaagaaacgccgatatatgccgatggcactcttgctaatgcgcaacaagttcaatggctgtatcaacccggagagataacgcccaccgcgcgttatcaacagggaaaactgcactatgtggtcaccgatcaccaaggaaccccgcgagagatattcagtgaaggcgggcaagccagttgggcaggacggctgaatacatggggccaaatgcagttttggcgttaccgagaaggcaaggcggagaatgatcctaattacaccgaatgtccttttcgttttgcggggcaatatgaagatgaagaaagtggctttataatcgctttcgttattatgataaggagacagggcagtatctttctccagacccaatag

SEQ ID NO: 313453 - DNA, 414 bp, Proteus mirabilis; identical to SEQ ID NO: 303834

SEQ ID NO: 313454 - DNA, 1491 bp, Proteus mirabilis; identical to SEQ ID NO: 307542

SEQ ID NO: 313455 - DNA, 1647 bp, Proteus mirabilis
atgaatatagcgatgacagaaagatataaatggttattgtttttcctatttatcttattaacttattttattcctttagaaacgcgcctgttatggcaaccagatgaaattcgttatgctgaaattagccgtgaaatgttagtttctggcaattggtcagtgccttatcttcttgatattcggtattttgaaaaacctgttttaggatattggatcaattgtattgctcagtggctatttggtgaaagccattttgcggtgcgtattgttgtagtaacatcaaccttattaacaggatggcttatttataaagcggcaatggtagtttggcgcaatagcgctcttgcttttaatgctatgaccgtttttttatcttcttttctggtattagcaataggtacttataatatattagatcctattgtgacgctgtttgtgaccgctgcaatgtactcatttttagttgcgttatcgaccccgaataaaaagggcaaaataattgcttatatgggtattggctttttttgcgcacttggttttttaacaaaaggctttattgcggttgttttacctgcattagtttttttagtcatggcaattagtcaagctcgctttaaagaagtggtttgctattcctctattgcattgttagctctcgctattacagctggaccttgggtgattactgttgcattacaagcaccggattattggaattattttttctgggttgaacatgtacagcgttttattgctaaagagtctgctcgctcacaaccaacgtggttctatatcccgatagttatattgggtgtattgccttggctaggttttttatttggtgcattaaaatcagctttctctttaaaaaaaggtacactctattttctgctgtggtttgctctcttttttgcttttttctcagcctcaaaaggaaaactattaacctatatgctaccgtgctttgtgccattatctattttaattgcacactatatcgaagagttaaaagatagacctgatgagaaaattagcaaagtgaatgcatctattaatattgcttttgggctaatgggtatatcagccgttatctattctttatacagtgccaaatttgcgctttatgatacgaatgaaacgttaaaaatagtgttagcaataagtgggtttttattttggagtgtgattggtgcgggggcgctgtttagacaaacacagtttttaacgatgttttgctctatcggactaagtttagttattggctatgcaatcccagaaaagatagaaagtaggagtacaccagaaaatattatccaacgttattatgagcctttgagtaataaatcgtatcttttaacggacgaagttggtattggtacatcacttgcttggggactaaaacgtactgatattcgtttaacagagacgaaaggtgagttggcttatggtttaaattacccagatgtaaaaaataaatactatagccttgaacagctattagcattaattgaagcaaaccaatataaaggggtagcgattgttttagtcagacctgatagaaagcagattttgactaaattgactacattaaaggaaaagccgatagtagaaaaagagggcgatttaacgctggtgttctttaattag

SEQ ID NO: 313456 - DNA, 714 bp, Proteus mirabilis
atgaataatcaatcaaaaaaatatgacagaacatatcactatcctttttcaccaggcacaacaagcgatgatcgtattaatgccaattggtggcaagatatttgcaaaataaagcatcttattcatactgaaaaattagatggtgaaaataattgcttaaatcgaatgggggtttttgctcgctctcatgcgactccgacacaatctgcatggacagtacaactacgccagcgttggcaatccatcagaaatgatttaggtaatttagatatttttggtgaaaatctttatgccattcattctattgaataccaacatttggaagagtatttctatgtttttgccatacgttgtcaggataaatggctaagttgggaagaagtgcaattttatgccactttatttgatttacccaccgtaccggaaatctcgctaccaaaatcggaaaataaaatagagtttgaaaagaatattattttacacgcacaaaagcatagctcttttcaatcacgagatgtgttaaccaagaaaccaagtgcgatggaaggcattgtcacacgagatgctcaagcattttcattagatgaattttcacatcgggtgtttaaatatgtgagaaaagatcatgttaaaacagatgtgcattggaaacgtaattggaaaagagcgccactgatttgggaaaaaacacaggagtctcatgatgcttcataa

SEQ ID NO: 313457 - DNA, 246 bp, Proteus mirabilis
  misc_feature (207)..(216): n is a, c, g, or t
atgtcaacgaaatatcctatcgttttagttcatggtttagctggttttaatgaaattgttggttttccctacttttatggtattgcagatgccttaaggcaagatgggcatcaagtttttaccgcttctctttctgcctttaattcaaatgaagtgcgtggcaagcagttgtggcaatttgtccagactctcttacaagagacacannnnnnnnnnagcgaaaaaagtgaattttataggtcatag

SEQ ID NO: 313458 - DNA, 648 bp, Proteus mirabilis
gtgaattttataggtcatagccaagggccattagcttgtcgttacgttgcggctaattatcctgatagtgttgcttcggtaacttcaattaatggtgtaaatcatggttcagaaatagccgacttatatcgacgcattatgcgtaaagacagtatcccagaatatattgtcgaaaaagtattaaatgcatttggtactattatctcaacattttctggtcatagaggcgatcctcaagatgctattgccgcattagagtctttaacaacagagcaagtcacagaatttaataacaaatacccacaggcattacctaaaacccctggtggtgaaggtgatgaaatcgtcaatggggttcattactactgttttggtagctatattcagggattaattgctggggaaaaggggaatctactggatcctactcatgcggcaatgcgtgtgttaaatacattctttactgaaaaacaaaatgacggcttagttggtcgctcgagtatgcgattaggcaaattgataaaagatgattatgcgcaagatcatattgatatggttaaccaagttgcagggttagtgggttataatgaagatatcgttgctatttatactcagcacgctaaatacttagcgagtaagcaactttaa

SEQ ID NO: 313459 - DNA, 894 bp, Proteus mirabilis
gtggctggatttattacctatattttaaatgggagtaaaactcgcaacgatggtagcccagatactcattttactcatctcaatttacaaagtgggatcaatcttgggccatggcgtcttcgtgataactctatttattcttatgattctattaataaatcaagttggaaacatctgaatacttatatagaacgtggtattaataaattatattctcgtcttattattggtgatagctacacacaaagtgaagttttcgacagcatcaactttagaggctttcaactgtcatctgatgaagttatgttaccggatagccaaagaggttttgctccgattattcgaggtgtcgcccggactaatgccgaggttactatacagcaaaatggttatgtgatttaccgtaactcttttccaccgggtccttttgttattgatgatctctattcaacaagtaacagtggcgatttagaggtaaccattaccgagtctgatggttcaacacaaacctttactgtgccatattcatcagtccctttattacaaagggaaggacataccaaatattcagtgactgtaggtagttaccgttcgggtaatgatgagcaggagcggccttattttctacaaggatcagtgatccacggcttacctgcgggttggaccatttatggaggaacccagttatccaaaaattaccaagcggcaagtattggggtaggtaaaaatattgggcgttttggggctttatcatttgatattaccgaagcgagatcaatactacccgatgactctacacaccgtgggcaatcgatacgtattctttataataaatctatcaatgaatctgtctcttatacacatctgacgctgccgacgatctactctgtgtag

SEQ ID NO: 313460 - DNA, 261 bp, Proteus mirabilis
atgagtaacaagtatccagttgcttacgctgttggacaaaaaataaaatcattaagaaaatctcaaggttataccgtatttcagttagcaaaagaaatcgatattagtgaacagcaattatttcgctacgaacgtggagttaatcgtatcgacattgattgcttagttaaagatgttatgggggatatggttgatgttcctgagaataatgaacaacatatcccagctcatttcgacaataaggctctttctattttttga

SEQ ID NO: 313461 - DNA, 1479 bp, Proteus mirabilis
atgtcactaaatgcagaagctcaagagcaacaagcccccgcatctacaggctctttacttgatgaaattatggctcaatcacgtatgtctccagaaacagaagcatacgatattgccaaacaaggtgttgctgcttttattagtaatattttcgccagtgaatctgaagaccaacagatcaatcgattattaatcgataaaatgcttgttgaacttgataataaactaagtactcaagttgacgaaattcttcacgcgcctaaatttcaagaaattgaagcttcatggcgttctttaaaattactcgttgatcgcactgattttagagaaaatattaagatcaatattcttcatgcaactaaagaagagttattagaagattttgaattttctccagaaattgttcaatcaggcttctatcaacacgtctactcttcaggatacggccaatttggtggtgaacctgttgcaacagttattggtaactacgcctttaacaatactgcgccagatatgaagttaatgcagtatgttagtactgttggtgcaatggctcacgcgccattcctatcatctgtttcacctaatttctttggtattaatagctacgctgaactgccggcaattaaagatctaaaatctgtttttgaaggccctgcacatactaaatggcgctcactgcgtgaagcagaagattcccgttatttagggttaacagcaccgcgtttcttattacgtttgccatactctccaacagaaaaccctgtaaaaatgtttaactattcagaaaatgttaaacaagaccatgagcactatttatggggtaataccgcattcttattagcaagctgtattaatgatagttttgcaaaatatcgttggtgtccaaacattattggcccacaaagcggcggtacagttaatgatcttcctgtgcatatttttgaagcgatgggtgaattacaaactaagatcccaactgaagttttagttaccgatcgtagagaatttgaactagcagaagaaggctttatcacgctgaccatgcgtaaaggcagtgataatgctgcattcttctccgcaaactcggttcaaaaaccaaaagtcttcccaaatactcctgaaggcaaattggcagagactaactataagttaggaactcaattgccatacatgtttattatcaatcgcttagctcattatataaaagtattgcaacgtgaacagattggctcatggaaagagcgtcaagatctggagcgtgaactcaatatttggcttaagcaatatgtcgcagatcaagaaaacccaccagcagatgttcgtagtaaacgtccattgcgttcagctgaaatcaaagtacttgatgttgatggcgatccaggttggtaccaagtcgctattcaagttcgcccacattttaaatatatgggtgcaaactttgaattatcacttgttggtcgtcttgataaagagtaa

SEQ ID NO: 313462 - DNA, 351 bp, Proteus mirabilis
atgtggattataaaaacaccgtctaccattcataaaaatgttcctgttaatgaatatacttgcatgaaactagctgaaagtgttggtgctgatattcctgaaataaggcttattgaattacatcagttaaaaaatttacccgatattcaattacctaatgagccatatgcttatggtattaagcgttttgatcgtaataaagaaggacgtattcatacagaagattttgctcaagtattcgggttatttccgtcagataaatatcagaaagttaattatgagcagataggtagaattatttatgaaacaagttcggagcgtttaaaagatattcagcagattgcttattaa

SEQ ID NO: 313463 - DNA, 1233 bp, Proteus mirabilis
atgctgatgagtcacaacaacactgaaacgcaaattggcaatatcgatcttgttaagcaacttaacagtgcgattgtatatcggctcattgatcaacacgggccgatttctcgtattcaaatcgccgagcagagccaactcgcccctgccagtgtcactaaaattactcgtcagcttcttgaacgtggcttgattaaagaagttgatcaacaggcttcaaccggaggtcgtcgcgcaatatccattgttgtggaacatcgccgttttaataccgtcagcgtccgattaggacgcaatgatgccactgttgctctttatgatctcagtggtaaagccttagtagagcaacactaccctttagaacaaagcacccaacaagaagttgaaaccttgcttattaatgctattgatgattttattaaacaaaatcaacgtcgtattaatgagcttatttcaatttcaattatcttgcccgggttagttgatcctaataaaggcattgtccactatatgcctcatatgaaggtaaataactgggcactcgttgataacttagaaaaacactttgatctgccttgctatgcgggccatgatattcggagtctcgccttagcagaaaactattttggtgccaccagagattgtgaagattctatcttggttcgtattcatcgtggcgcaggggctggtgttattatcaacaacaaaattttgctcaaccagcgtggtaatcttggtgaaattggtcatatccaaatagatccattaggagagcgttgccactgtggtaactttggttgtttagagactattgcgtccaatagcgcaatagaagctaaagtccgctaccaacttgaacaaggctatcccagccagcatttatctgcaacacaatgccaaattcaagatatatgcgatgcagcggtaaaaaacgatcccctcgctgttgaaaccattaaacaagtgggtcttcatctaggtaaagccatcgccattgcaattaacctatttaacccacaaaaagtagttctggcaggagaagtgaccgaagcggctgaaatattactaccgtcgatccaaagttgcattaatacccaagtattaaaagagtttagagaagcgcttcctgttgttatctccgaacttgatcatcgctcagccattggggcatttgcacttaccaagcgagcaatgcttaatggagagttactacaatatttattcgacaaataa

SEQ ID NO: 313464 - DNA, 1164 bp, Proteus mirabilis; identical to SEQ ID NO: 294369

SEQ ID NO: 313465 - DNA, 807 bp, Proteus mirabilis
atgaggttaatccccctatccacggcacagcaagtgggaaaatggtcggctaattatatcgttgagaaaatcaacgcatttgcgccaagcgccgatcgtccttttgttcttggtttacctactggtggtacgccattagcaacgtacaaagcgctaattgaactacatcgtgcaggtaaagtaagtttccagcatgttgtcaccttcaatatggacgaatatgttggcattccagcagatcacccacaaagttatcgtacttttatgtatgagaacttttttaatcatattgatattaaagatgaaaatatcaatttattaaacggtaatgcaacagatccacaagcagaatgtgcacgttatgaggcgaaaataaagtcttatggcaaaatcaatctgtttatgggaggtgttggtaatgatggtcatatcgcttttaatgaacccgcctcatcactcgcttctcgtacacggatgaaaacactgactgaagatactcgtctcgctaattcacgattcttcgacaacgatatcaataaagtacctaaatatgcgctaactgtcggtgtagggacattattagatgcagaagagttaatgattttagcgactggcatcaataaggctcaagcagtacaggtggcaacagaaggtgctgttaatcatctatgtactatctcttgcgtgcaattacaccctaaagcaattttagtctgtgatgatccggcgacaatggaactgcgtgtgaaaacactgcgttattttcaacaaattgaagcgcaagagcgccagcaataccaagattaa

SEQ ID NO: 313466 - DNA, 2004 bp, Proteus mirabilis
atggtgcccgttgcgacattgcctgctgcagcaattctgatgggaataggctactggattgatccggtaggctggggaaacgataatgcgctagctgctttactgatcaaatcaggtgctgccattatcgataatatgtcagtattgtttgcgataggtgttgcttatggtatgtcaaaagacaaagacggggcggcggccttaactggctttgtcggctttttagtggtgactacactttgttcacctgctgcggtatcgatgatcaaaggtctaccacttgcagaagtgcctgtggcttttggtaaaataaacaaccagtttgtcggtattctggttggggtactttcagctgagctgtataaccgttttagcagtgtcgaattacctcgtgcattatcattttttagtggtcgtcgcttagtgccgatcctcacgtcattcttgatgattatcgtcgcctttattctaatgtatatctggccggtaatttacggtggcttagtgagctttggtgaaagcattaaagatatgggggctttgggcgccggtatttatgctttctttaaccgcctattaattcctgttggtttacaccatgcgctgaactctgtgttctggtttgatgtggcggggattaatgatattcctaacttccttgctggtcagcaagcgattgatgcgggcttggcaacggtcggtgtgacaggacgttatcaagcaggtttcttcccagttatgatgtttggtttaccaggggcagcactggctatttatcattgtgcgcgcaaagagcataaagcaaaagttgccggtatcatgatggctggggcatttgcggcattctttacggggatcactgaaccgcttgaattctcctttatgtttgttgctccagtgctttatgttattcacgcattcttaatggcgatttctgtttatattgccgcaagtatggagtggatttcaggctttggctttagtgcgggccttgtggatatgttcttatcttcacgcaaccctctggcggttaaatggtatatgttgattgtgcaaggtatcgcattcttcttcatttactatggtattttccgtttcactattactaaatttaacctgaaaacaccgggtcgtgaagatgaagtggcgggggatgaaaccgcagacggctatgatgaagatatcaaagccgtccccactaatagcaaagaagcagtgcaacaagaagcacgtcaatatatcgctgcagttggtggctcagataacttaactggtattgatgcttgtattactcgtttacgtttaaatgtaaaagatgccagtgtagtcaacgatgcttacgcaaaacacctaggtgcttcaggggttattcgcttaaataaacagagtgttcaagtgattgtgggcacacgggctgaaattgttgcaagtgccatgcgtgatgtattagcacaaggcccagttgccgcttatgctggtagacatacagataacgcggtatcgacagaaaaaacatcagaaaaacagactaataatgatgccaaagtcattcttgaaatggtcgcgccatttgatggtgaagtggttgcattaaaagatgtgcctgatgaagctttctcaagcggtgtcgtgggagatggtcttgctattaaacccacatcaaatattgtgatggcacctgctgccggtacggtagtaaaaatctttgatactaaccacgcattttgcattgaaacggataacggtgttgagattatcgtccatatggggattgatacggtcgcattaggaggaaaaggctttaaacgtctggttgaagaaggtacagaggttaaactcggccagcctatcttagagctagatcttgagtatttaaacactaatgctaaatcaatgataagtccggttatcatcagtaatatcgatgactttgataaagtgagtgatattgcatccggtcaagtgacggcaaataacaccataatctataaagtattaaaataa

SEQ ID NO: 313467 - DNA, 1002 bp, Proteus mirabilis
atgggcagaagcagaagtgcaaagaacaagggtttaccgcctaacttgtatttgcgtaaagggatttactattacagggatgtaagaactaaaaaggaattttctgttggctcaaacaaatcattggcaataaccgaagccatacaagccaatttagctatttataaacctaaagagccattagttgacagaattaataatgttcactgtgtaacattgcatgagtggcttgatacttatagggggaaggtaaacagcagggggttaaaagagaagacgctctacgattacgaatcaagaataaagttaatcaaattacactttaatgactgtccaattgagaatgtaacaccaagagatgtagccacatttatttcagagtaccctaaaaaggcaatggcaaaattactaaggtccactatgctagatgcttttaatgaagccattgcggatggtgtgataaaggaaaatcccgtttccgtgacaaagccgccaaaaacaagcgttcagcgatcaaggttatcgctagaagagtttaaatacgccttggagcacacaaatgacaaatataggcatatgtttctactagcggtccttacagctcagcgcattagcgatattatcaatatgaagtgggatgatataaaaaatgataggctgtatgtcacccaaataaaaacaggttctaaagtagcaataccactctcattaagacttgagtctattggttattctattaaagatgttttaaatctcatgaataggaactcagataaaatctgtggcaataccacagcaaaaacattaagaggtaagtttatcgaagccctacctgagtatttggaaaataaaccaacatttcatgaaattagaagtttatctgcaagattatatgaagaagaaaaaagtgctgagtttgcaaagaaaatacttggccacaaatctatgagaatgacagataaataccttgatgatagaggtaatggctacgttgaattgtga

SEQ ID NO: 313468 - DNA, 456 bp, Proteus mirabilis; identical to SEQ ID NO: 300507

SEQ ID NO: 313469 - DNA, 1263 bp, Proteus mirabilis
atgagtcattcagaacataatcaaacacgtcgtcgtcttattaaaggaattggcgcgttattgttattaagtgttagtcctgttggcttagcggcaacatcatcagtggttgccgtcagggtatggcctgcatcgacttatacacgtgtgactatcgaatcaagtagacccttgaaatatcgccagtttgcgttatcagcaccagatagaattgtggttgatcttgaaggtattcaactgaatagcgttctgaaaggtatggctagtcaagtgcaaacaaacgatccttacttaaaacttattcgtgtcggtcaaaataccccaactacggttcgtttagtgtttgaaattaaaacccccgttcagccacaaatgtttactttaaaacccgttgctgaatttaaaaatcgcttagtgctcgatttctatccaagtcatgcggcgacaagtgaagatgatccgctattagcgctattgcgtgaatataacgaaggggatttacaacaagctgtgcctgaacaaacggatacgcgtaagcccggaagagcaggacgagataggccgattattatcatgattgaccccggccatggtggtgaagatccgggagcgatggggaaatataaaactcgtgagaaagatgttgtactacaaattgcccgtcgcttaagagctttgattgataaagatgccaaaatgaaagcttatatgacgcgtaatgaggatgtgtttatccccttaaaagtgcgagtagcgaaagcgcggaaaatgcaggctgatctctttgtctctattcatgcagatgcatttaccaatcgctcggctagaggctcttctgttttcgcgctatccaaaacaggcgcaacaagtaataccgcacgttacctagctcaaacccaaaatgaagcggatttaattggtggggtgagtcgaagtggtgatcgctatgttgatcacgcaatgcttgatttagtacagaccgcgacaattaatgacagcctaaaatttggtagtgaggtattaaaattattaggtggcgtgaataagctacataaaaataaggtcgatcaagccggatttgcggttttaaaagcccctgagatcccttctattttagtagagacggcttttattagtaatattgaagaagagcgaaagctcaaaacggctaaattccagcaacaagttgctgaatctattttcaaaggtattaaagcctattttgctaatggtggggaactgacattagctgatcgaggctga

SEQ ID NO: 313470 - DNA, 1095 bp, Proteus mirabilis
atggttacttggcgaaaatcgttgcttttggggatattagcgcttgccttaacaggctgccatcgtccaacagatcaggggcaacagtataaagatggtaagcttaagcaagatcttattgaagttaactcgccaaatacgcaaggcaagcccattaatggctcagattaccttgaacaaattaaccaaataaatcaaacatcttcacgtctatacaatagtaatcaagatacttatcaagcagtggaaaattggttacgctcaggggcagatacgcgtcaattacgtcaatttaatatcgcagcctttcaaatggaaggggaagataattatgggaatgtaaaatttaccggatattatacccctgttttagaagcacgtttaacgccacaaggtgactttaaatatccgctctaccgtatgccagccaaagtgcgtggtaaattgccttcacgagcggctatctataacggtgctttaagccccactttaattgccgcttatagtaactccatcatggataactttatgatggaagtgcaaggcagtggctatgtcgattatggtgatggtaaacctttaaccttctttggttatgctgggaaaaatggtcatccttaccgcagtattggcaaagtgctgattgataatggtgaagttgaaaaagaagcgatgtcaatgttggcaattagagagtgggctgataagcatagtgaacaagaagtcagaaaattattagaacaaaacccctctttcgttttttttaaacctgaaccttttacgccagtaagaggggcaagtgctattccgctgattgctaaagcgtcagtggcttcggatagaagtattatccctgcaggaaccgtattattagctgaaatccctattttagataataccggtaagtttactggacaataccaaatgcgtttaatggttgctttggatgtggggggagccattaagggacatcatttcgatatttatcatggtattggtaaagaagccggacaaatggcgggtttttataatcattatggacgtgtatgggtattaaaaaaatcgcaacccaccttactgaaccctatacagtaa

SEQ ID NO: 313471 - DNA, 849 bp, Proteus mirabilis
atgcaaaattcattatcagactcctatctgcaacgcttttctggtattggccgtctttatggacaacaagcgctgtattatttttctcaggcacatatttgtgttgtcggcattggtggcgttggtagctgggctgcagaagccttagctcgcagtgggatcggcgctattacgttaattgatatggatgatgtgtgtgtcaccaataccaatcgacaaattcatgcgctaaaagagcatgtcgggcagcctaaatgtgaagtgatgaagcagcgaattttgcaaattaatcctgaatgcaaagttacttgtattgatgattttgttacggttgataatgtggcagaaatgatgcaaaactcatttgattatgtgattgatgctattgatagtgttagaccaaaggccgcattattagcttactgtcgtcgctataaaattcctgttatcaccactggtggcgcaggcggacagattgatccaactcaaatccaagtcgtcgatttagcgaaaaccattcaagatccattagccgctaaattacgtgagcgtttaaaatctgattttaatgttgtgaaaaatagcaaaggtaaattaggcatagattgtgttttttcaaccgagcaattagtctaccctcaaggagatggtacggtgtgtgcggccaaaagtactgctgatggtgtcaagcgtatggactgctcagcgggttttggcgcggtgacaatggtaactgcttcctttggttttattgccgtttctcatgtattaaagaagatgttagctaaggcgcaacgtactcgtcatacttcaagttgtagcgttgttgaccgcattcattcgcactag

SEQ ID NO: 313472 - DNA, 201 bp, Proteus mirabilis
atgcagaattctcaaggggttaactctgttgatatcgcagtgactattttagagtttttagcatctcaaggaggtgctgcacgctcttctgagatagctaaggcatgctcactatcaaaaagtcgtctacataaatatttagtgtctctttgccgtagtgactgctctatcaagagagtgaaggagggcagtattgtttag

SEQ ID NO: 313473 - DNA, 897 bp, Proteus mirabilis
  misc_feature (868)..(877): n is a, c, g, or t
atgtttattgctgcattaatttttgttttaacgatcaccttggttatctggcagccgaaagggttgggtattggttggagtgcaacagccggcgctatattggcactcctttttggtgtgatcagttttcaagatattccgattgtttggaacattgtgtggaatgccacagcgacatttgttgcagtaattattattagcctacttttagatgaaagtggcttttttgaatgggcggcattacatgttgccaagtggggtggtgggaaaggaagattactattcagttatatcgtgctacttggtgcaatggttgctgctttatttgctaatgatggtgcagcattgatactaacacctattgtgattgcgatgttacttgcacttggtttcaacaaaggtacgacattagcctttgttatggcagctgggtttatcgcagacacagcgagcttgccgctgattgtttcgaacctcgtgaatatcgtttctgcggacttctttaatattggatttactgaatatgcatcaattatggtgccagtcgatattgcgggaattgttgcaacgcttgtgatgctacattggtttttccgtaaagatattcctaaccaatatgatgttaaaaagctgagtgagccagctttagctattaaggatatgactacgtttaaagcaggttggcttgtattgttgttattgctcattggtttttttattttagagccattaggcattcctgttagtgcaatagcggcaattggcgctttaattctttgggtaattgcagccaaaggccgtacgattaatactaaaaaagtgttgcgtggcgcaccgtggcaaatcgtcattttctctttaggtatgnnnnnnnnnncttggttgtttatggtttaa

SEQ ID NO: 313474 - DNA, 1245 bp, Proteus mirabilis
atgttttcagaagaaagacgacaggaaatctatagcattattagggaacagaaaaaagttaaagtggctcagctagcggaaagattcaacgtcacattagaaacgatccgcagtgatttgaaatacctcgaaaatgaagggttgatcaaacgttgtcatggtggcgccatactagggaaacaagaaataaaaaagatcagtaaatttagtgatagttttgatatctcatgtttactacacgatttattgatcgtcaaagaacataaaaagaaaacaccagaaggtaaagtgtgtgtattaggctcttttgtggtggacattattgctaatgttgatgcatttcctcgtgtaggggaattggtaaattcaaaaggaaactcaataggtccgggtggaaaagggacgaatcaagccatttctgccagtttttctgatgcaaaagtgcatttaattaccaaagtcggtgaagatcattttagtaaatatgcttataaatatttgcaagagagcggtattgattcatttactatttttcaaacagaaatagagccaacaggtagctcaattagctatttagcagataaaacccaaaataatattacggctacctatttaggcgcaaataacacttttaccctgcaagaggttgatatctcactgccttatattagtgaagctgacgtgctattactgcaaggggaaattaatattgatgctaatgtgaaagccgcttcttttgctcattctattaataaaaccgtcatacttaatgtcgctccgtatagtgatgatttaaaacaactttatttatatgtggattttattacgttaaacgcttaccaagcttcagattggtcaggtattgaaattaatacgattaatgatgccaagcaagcagtagagattattgccggtaacgaaaagaaaaaagtgattatctacatagatgaattaggcgtggtgtattttgatgggaggaatacttttcatattccgccactaccttctctacgtgttgatacgatggcagcaacagatgcttttaatggtgcatttgcctcaaaaatagccgcaggaggcacaatgccagaaagtgttttatttgctagcgctttcttgtctgcatttatagaacaaaaaggggtgacttcaatgccttcactatcacaagtacaagcacgtcttaaattaagaattgaagatattcgaccacaagtaatctgcaatgagaaaaggtgcatataa

SEQ ID NO: 313475 - DNA, 849 bp, Proteus mirabilis; identical to SEQ ID NO: 296462

SEQ ID NO: 313476 - DNA, 639 bp, Proteus mirabilis
atgattgattatgcactgaaattacaggagttaaaaagccaacctgctcataaattaaaagaaattggtgaccaatggcaatcaccagataacctttactacggtattaactctaaatatggaccgtttactttagatttattcactgatggtcaaaacagtaaatgtccgcatttctataccgttgaggacaacgcactcactcaagattgggctgaaaaactgaaagagatcggtggttcagcatttggcaatcctccttactcgcgtagttcatatcacgaaggccagcctttaacaggtgttggtcacatcatgagccatgcattagctatgcgtgaacaatacggtcggtatgtttttttattaaaagcagccacatcagaaacatggtggccagaagaagcggatcacgtttgttttatccgaggacgtattggctttgacgttcctgagtggtttgttcctgcagatgagaagcagaaaccaacgggcgcattctttgctggggcaatagttgttttcgataaaacatggacgggtaaaaaattcgattacattcatcgtgatgaattagagcaaattggcaaagcatttattgagcaaatgaagtggctggcgtcgagaggtgttgcatga

SEQ ID NO: 313477 - DNA, 639 bp, Proteus mirabilis
atgattgattacgcactgaaattacaggagttaaaaaaccaacctgctcataaattaaatgaaataggggatcagtggcaatcacccgaaaacctcgtatatggcatcaattcaatttatggtccattcacactagatctattcactgacggtgaaaacagtaaagcaccttatttctacacagctgaagataacgcgctcacgcaagattggtcagcgaagctaaaagaaatcggcggtgttgcctttggtaaccctccttactcgcgtagttcatatcacgaaggtcaacctttaacaggtgttggtcacatcatgagtcatgcattagctatgcgtgaacaatacggtcggtatgtttttttattaaaagcggcaacaagtgaaagttggtggccagaaaatgcagatcacatctgttttatccgtgggcgtataggttttgacgttccgaagtggtttattccagctgatgaaaaacaaaaaccatctggtgcaatgtttgccggggcaattgtcgtatttgataaaacatgggctggcaaagcatttgattacattagtagagaagaattagaacagcgtggcaaagcatttattgagcaaatgaagtggctggcgtcgagaggtgttgcatga

SEQ ID NO: 313478 - DNA, 297 bp, Proteus mirabilis
gtggctggtaaaggataccgttatccgacacggcaggccgcctggcaggctttacagtcgtttttacagacgacatcccccagacgtattgatgtggggattgcacaggtgaactggggctggaacgggcatcacttccgttccgcctgggaggcctttgatccttataccaatttgcatgtggccgcccgcatcctgcgccgctgttatgaggcgtcaccgggtagttggatccgtgccgccggctgttatcaccatccggcggcacggatccaactacccggtgacgcctcataa

SEQ ID NO: 313479 - DNA, 456 bp, Proteus mirabilis
atgatgtggcgcatttgttatcaatatcgccaatatctccttgctcttggtttgctggcaggcatattgcctgtcacgcaagccgcagatgatccgactgaaacttttttatatgagcaagttagactaggtaactcgaaaagtaacgatgttttagtttctcaatcactgtatcgtttatcacttataaaaccgaacgatcctagtgtgttgttaatgcgtatccaatttgctgtaaaacaaaaagaaacagcaaaagcacaacaactgattgagcaattacgtatgcatggcgaaaatactgaacaatatcaacgtgcgattaagctactatcattaacccatgaagataaccgccaaatcctacaaaaagcctacctttatcagactgcgggtcgttatgatgaagccttgcaattatatgatgatatttaccaaggcacgcccccccgatga

SEQ ID NO: 313480 - DNA, 516 bp, Proteus mirabilis
atgccgttattggatagctttactgttgaccatacacgtatgtctgcacctgcggtacgcgttgctaaaacgatgaaaacaccctctggtgatactattaccgtttttgacttacgctttactgtcccaaataaaaaagccatgcctgagaaaggaattcatacgttagagcacttatttgcaggtttcatgcgtaatcacttaaatggtgaaggtgttgagatcatcgatatttcgccaatgggatgtcgtacaggcttttatatgagcttaattggtcagcctgatgagcaacgtgttgctaatgcatggaaggcagctatggaagatgtattgaaggttaaagatcaaaaccatattcctgagcttaatgtctaccaatgcggaacttatgaaatgcactcgttagctgaagctcaagatattgcacgagacattttatctcacactattggcattaatcataatgatgaattagcactaccagaagacaaactcaaagagttacaaatctag

SEQ ID NO: 313481 - DNA, 201 bp, Proteus mirabilis; identical to SEQ ID NO: 313472

SEQ ID NO: 313482 - DNA, 1194 bp, Proteus mirabilis
atgcgtattgtctttttctatatgctttttttggtattaagtgcagatggtctaatggtttttttgacacctgttattgtttatcaattaacaacaagcattgaatatgcgggattgacatacgctttatggtggttaccacgtatttttttaataccgcttattggtcaatatattgatggtctaggtgtccgtcctgtttctgttatttccgatagctgtaaaattatcggttgtttatttttattaatagtagatttttcctctgatttagttattgcaattagttttggattagtgggtagcttaatttctattggtaattcacagacactgatttcatatgaaaaaattattgccttgatgagttgccataaagaacatcatattaatataatgtctcgaatggattttttgggcatgatcattggcccattaatcggtatgttatttattgattatggttaccattatttactgattattccctgtctattttatttcattaacgccgtgttctttttgttcttttacttagtgccaaaacagcgccaatctgccactcagttacatagcctaacagagacattacaggtgacgaaaaggatagtggtgatttttacgtctcctattttggttttttctattttaattgctatcggcaataatatgtttgatggattaattgagtcgagtggggcggcgttgatcgaccaatcgatgaatttacccattaaatattatggctttattgatatttctgcggggatctgtggcgtgataggaacttatttatatggttatctaacccattatttaaatcgaaaattattaatgtctctatcaatttgtatcatcacaataagttcttttctattggttatttttcaacatgatatcacggcttttattctcttttatgctctatccattattggtaaagttttttcagggaatattttacggatgttaagaatagaaattattcctgtggcacaattagctagcatttcctcactgattattttgtttaatcaactgattttgcccattgttgggggattgctctttttctctacagggaatatttcgacagtatatatattgatgataattgctatggcgatcaccttggtgagtggcgtaatgcttattatgcggttaaaccataaaaaagagataatcataaaataa

SEQ ID NO: 313483 - DNA, 480 bp, Proteus mirabilis
atgaatatttactatgataataaacttttattagccttgtattcatatttacggcaaactgagttatccatagatagagggttaaatgaatggaagaatgctagatcttacttaaaacatcgctatttagctgataaactaatcatggcattggctataaataaaacactacatcagaagaacacctttagtaaggtatattgctatgcatacctaaagttacgacataaacaatatttgacacgacaagagtctgatacaatatgttgtttattaagaactattggaagttatctttctgaagattcacctgatagatctaatttaattaaactaagaatagaactgtataatgctgcaaaattagttagaaaaaggattaccaataataatcgaataatattagctgatagagtagagcattataatcagcatttgcatggtactttttattctatagaagaaataactagtttatag

SEQ ID NO: 313484 - DNA, 924 bp, Proteus mirabilis
atgttatctcagcaaaatgcgaatatatctttatcagcaaccagaactgaacgagatagtggttatcaagatgatgctattaatctgtatttaacaataccattatataaaggccatagcatttcattttctgaatcatattctcgtattggtaaaagtaatcaatatagccatagagcaagttatagtggttatagtgatcgcgataattatagtctgaatgtgggctatagtcatggagaagaaattgatagccaatcaagtatcagtggttattattctcgcgacttttctcaagctaacttatctgctaacgcaagttatgtaccacaacaatatcgtagtgttggtgcatcaattaacagtggtattacagctacaactcaaggtattgcgttgcatcgttcagctaatggtgatactcgtttaatgattgaaacaccaggggttggtgatgtacctctagatagtggcgttatcaaaactaatcactttggacttgcagttattcctaatgttaatagttatcgtaaatctacggtttctattaataccagtcagctacctgaaaatatagaaacgctagaatcaacaactgatattaccttgactaaaggggcgatagggtatcgcagtttatcagtaatgaaaggggaaaagttgtttgccattatatccctaaatgatggtaagaaaccgccttttggggcaagtgtacgtaatgcggataatcgtgagttgggtattgttggtgaagatggtgtgacatggctagtaggcatttcatcaaaagaaaaactatctgtttattgggcagggaaaaaacaatgtgagttgtcacttcctgaagatttagcatcgccaactagcatgttattgctaccttgctcttcacctactatatcaaaaattacagaaaattaa

SEQ ID NO: 313485 - DNA, 2280 bp, Proteus mirabilis
atgagtattagtcgtcgttcttttattaaggggatgggtataggatgtgttgggtgtacggtgggaagtttaccaccaggggccctcgcacttaatccagtagcatctcttaagggtcagtctaaattaacaccaagtttgtgtgagatgtgttcttaccgttgtcctatagaagctcaggttgttaataacaaaactgtctttatccaaggtaaccgaaattcaccacatcaaaaaactcgagtctgtgcgagaggaggcagtggtgttagccttatttatgatccgaaacgcattgtaaagcccatgaaacgcaaaggccctagaggtgccggagaatgggaagttattagctgggaacaagcttatacagaaattgccgaaaagatggcaagcatcaaacaacattatggtgctgaaagtatctttttctcatcaaaatcaggctctctctcctctcatttatttcatttagcggcggcatttgggtcaccaaacacctttacgcatgcatcaacttgtcctgcgggcaaagccattgctgcatcggtaatgatgggtggtgatttaaaaatggatctcgcaaattctaaatatattctttcttttggtcataatctttatgaaggaattgaagttgcagaaacctatgaattaatgacggcacaagagcatggtgcaaaattagtcagttttgatcctcgattgtctgttgtttccagtaaagcaaatgagtggtttgctatccgaccaggaggcgacttacctgttctaatggccatgtgtcatattatggtaaaagaaaatctttatgataaagattttatagaaaaatttactgtcggtttccctcaattagtggaagtattacaagataccacgcctgaatgggcacaagctcactctgatgttcccgcaaaagatattattcgcataacacgtgaaattgcagctaaagctcctcacgcattagtcatgccaggccatcgcgcaacctttaataaagatgaaattaatatgcgcagaatgatcttcaccttcaacgccctactgggaaatattgaacgtgaaggtggcatgtatcaaaagaaagctgctgcaaaatataataaattagcgggtatcgacgttgcccctgaattagctaaaccaaccgttaaaggcatgcctaaaattacggcaaaacgcgtcgatgctacagcgcctcaatttaaatatatcaataaaggcggcggtattgttcaatctatcattgactccacactccatggtgtaccttaccaaaccaaagcttggattatgtcacgccataatccatttcaaacagtaagttgccgacctgatctagaaaaaacagcccaaaaactcgacttaattgtcagttgtgatgtgtatttaagtgaaagtgcatcttatgcagattatctgttaccagaaagcacttatttagaaagagatgaagagatttctgatgtctctggtttaaatccagcttatgcattaagacagcaagttgtcgaacctattggtgatactaaaccaagttggttaatttggatggaattaggaaaaaaactgggattagcgagttattttccttgggaaaacatgggagttcgtcaactttatcaagttaaaggggatgaaaatctctataaagagatccaccaaaaaggctatttatcttatggtattccgctacttttacgtgaaccatcctatgtaaaagcctttgttgcacaatacccagatgctatcaaacatgttgatagtaacaatatgatggaaaaatctctttcttttaaatcaccaagtggtcttattgagatctattcggaagagttagaaagtctattagagaattatggtattcctcgtttccataacttcccattaaaacaaaaagatgaactctattttattcaaggaaaagtcgcagtacataccaatggcgcgactcaatatgtacctttattagcagagctaatgtggaaaaatcctgtctggttacatcctgataccgcaaaaagtcatggaattaagcatggtgatgagatcattttagaaaatagcgtaggcaaagagaaagcccatgccttaattaccacaggtattcgtcctgacacagtgtttgtctatatgggttcaggctctaagaccggcgaaaaaacgccagcaaccacaaatgggatccactgcagtagtttattacctcatgaaattagccctgtttcaggcactgatgtacatacttcaggcgtcaaaattagtctggcttaa

SEQ ID NO: 313486 - DNA, 1122 bp, Proteus mirabilis
atgacgactatttttgatgttgtacaagctatgtcagggcagaaaaacgtcattgttattcctgttccctatttagatttttttaagggggatcagcaagctcatgccttgtctgcaattttaaatcaacttgtcttctggtctggtgtttcatcaagtgctgatgatggttggttctataaaagccatgaggaactagcagaggaaattcatggtctttctggtgaagagcaggctcgacgtctcgttgataaattacgtaaaaaatattttcccggtgtgattgaaactaagacaaaaaaggtcaatggcacacccgttactcactacaagatagatggtaataagcttatctctatgattttcccgtctatttctgaaacgtcgaaagtgaggaatggaaacgtcgaaagtgaggaatcggaacgtcgaaactgcggaatggaaaccgcagaaatgcagaatcatggaaacgtcgaaagtgaggaatcctatctttatacagatcttaactcagataaaaacttacagatcagtaaagacctttcgtcgcagaattctggcgaatccagcgacaagccaaaaaatgattttttaactcgttatccagaagcagtaatttacagcactaacttccaaaaatggggtgatgaaggtgatttaaaaacggcaaagtggatgtttggtcgtgttaaaaaactgaatccatccgcgttagagcctacttggtgtgactgggcgaacgatattcgtttgatgcgccaaatcgatggacgtactcatgagcaaatttgtgccttgttcgattgggctaacaaagattcattctggtaccaaaacattttaagccctcgtaagttacgtaaacactttgatgaactattcgttcgtagtcaaaaaccaaaggatgagccaaaggttcaagttgataccgttgagcgtgacagtgctttctctcgcttgattggttctcgttctaaacctcaaaaccgtattgaagaaattgcgcttgaactagcgggtaagacaggcattcgccgtatgagtgagttttctggtcgccaggcatggaacagtatttggaagcaagcgacagaaatgtcacaggaggttcagcaatga

SEQ ID NO: 313487 - DNA, 516 bp, Proteus mirabilis
atgattatgttatcgggactcggggagttagatggacgttttcctgttgcacaggttgatggcaacaaagtgaccctgtgcgacgaagtggattggagtgataaaacgttacccacggattttgcaaacgccaaagcacaacgtattcagtggtctaataacttttgtgcggtaaaaagcttcagcaaagacggttcaacgactgaacaaatcgatgtcaccaccatttgcagtgatggcaaggaatatgaatctggcgatacggaatacggctcaattaaattgacctttttcttacggtatagctccagtgatgtgcagcgactcttgcgtaaatatgaaaacagcaaagaaaaatttgcggtgaaaatgatcttaacacgagatgagggctccatgttttattacggctctgtcgaaacgggcatgaacattgatggcagtgtagggcaaatgatggattcggggatctcgattaaattgtctggccgtgattatttgaatgcgaagaaataa

SEQ ID NO: 313488 - DNA, 639 bp, Proteus mirabilis; identical to SEQ ID NO: 313476

SEQ ID NO: 313489 - DNA, 639 bp, Proteus mirabilis; identical to SEQ ID NO: 313477

SEQ ID NO: 313490 - DNA, 462 bp, Proteus mirabilis
gtgttctttgcactatggccgtgggtattaggctatcgtcaagaagcacccctctatcaaatttggatgttgaccttcccattcttattagcagtattaggattaggtaagttgatcaccgaatgcttgcgcagtgttgagatgatttacttaacattagcatttgtgacgacaccggtattctatatttcgggaactatttggccattacaagctatgccagattgggtattggcaatatcctctgcattaccttctacatgggctgtaaatgctatggccggaattaaccagatgggattatcattccaaagcatcctaggggatatcgtgatgatgctggttttaggcgtgatatataccattttgggggtgttagtggggatgttgcgcaatggtgagttaaggaaaattactcatcaatttaagcattgggtgagacattaccaccgttcaaagtaa

SEQ ID NO: 313491 - DNA, 258 bp, Proteus mirabilis; identical to SEQ ID NO: 292774

SEQ ID NO: 313492 - DNA, 336 bp, Proteus mirabilis
atggcaaataaaaatatggctaaagaatacacaaaaaagaaaaatgaaaagtcatttgaggaaatactctgggatgcagctaacaagctgcgtggtagcgttgaatcatctgaatacaaacacattgttttgagcctaatttttcttaaattcatcagtgataccttcgagaaacagcgccagaagctaattgttgctgggctagaaaaacacattgatatggttgcagcctataccaaagacaatgtgttttacctaccagaggagagccgttggagttttattcagaagaatgcgaaacaagaagatattgcccttaggttgataccgcgctga

SEQ ID NO: 313493 - DNA, 1218 bp, Proteus mirabilis
ttgccagataactacttttctcgtcttagtttagatgttagcaagttgtctgctttgatcgatgtgattaacaacatcaatacattagccaatccacacgaagatgtagtaggccgtgtatatgaatatttcctagctaattttgctatcgcagaaggtaagggtaagggtgaattctacacgccaaagagtattgtgaatctaatcgcagaactgattgaaccatataaaggtaaaatttatgacccttgctgtggttctggtggtatgtttgttcaatcaatgaagttcattgaaaaccacaaaggaaataaaaaagatgtctctgtgtatggtcaggaatacacaagcgcaacatataaactggctaagatgaatctagctattcgtggtatctctgccaacctaggtgccgccgcaaaagatacctttgccaatgatcagcacgaaacccttaaagctgattttattatggcaaaccctccgtttaaccagaaagattggcgagcttctgacgaactcgttgatgattatcgttgggatggttatgaaactccacaaacaggcaacgctaactatgcttggattttgcatatgacttctaagttgtcagagaatggagttgcaggcttcattctggctaatggtgcattatcaggcgatggcacagaaaaaaatattcgccagaagcttatcgagaatgacttagtcgaagctatcattattctgccgatgaagatgttctataccaccgatatcagcgtgaccctttgggttattaataaaaataaaagagagcgaactgttccacacgaagaccttactcgtcattaccgtaaccgtgaagataaagtgttatttatggatttacggaaacacggtgaaccattcgagaaaaagtacatccagttttctccagaaaaaatctcagaaatagctgaaacatttcacacctggcaagaagtgcgagccgaaaccgaatacaaaaatattgctgagtattgttactctgcgactaaagaagaaatcgcagcaaaagattattcattagttccaagtaagtatattgaatttaagaatcacgatgaagatctcgattttgatcaaaaaatgagtcaaatacgagatgacttcacaatgcttttaaagcaagaagagaaatctaaatctgaacttttgtctgtatttgaagagctgggttatgagatcacactataa

SEQ ID NO: 313494 - DNA, 1131 bp, Proteus mirabilis
atgagatcacactataagcgtattggtgattacgtcaccctagttaagctaaaaaacactgatggggctatctcttcactaaaaggcataaatataaacaaacactttatgccatcggttgctaatgtaaatggaactgatcttagtacataccgagtggtaaagaaaaatcaatttgcatttaacccaatgcacgttggtcgagatgaggtgctacccatttcgatacttgaagatgatgaaccaatcattgtatcgccagcatacgtagtttttgaggtaaaggatgaagaagaacttttacctgcatatctgatgatgtggtgcagacgctcagagtttgaccgaaacgcttggtttatgactgacaatagtgttcgtggtggttttagttgggctgacttttgcaatatgaaactaccaatcccatctatcgagaatcagcgtgaaatcgtgcgtgaatacaatgtggtgaatgaccgtattgcacttaacgaaaagctaatgaatatgctggagaaaagcacatttgctttgttcgaagaatattttccaatacacggacacgaaattgaaactgagcatacgactttagaacatttaattagttttaatcctaagcacaccattaagaaaaatgctgcaacaacttacgttgagatggcgaatgtagcggaaaactgtatgacaattgataatcctgttgtcagaccttttacagctggctcgaagttcaaaaacaatgatacgttgcttgctcgtatcaccccttgtttagaaaacggtaaaacagcatttgtaaatattctaaacgaggatgaaattgcttatggctcgaccgaatttatcgttatgagaagtaaaggagtagtcagcccattttggatatattgcttagcaaaaaatgagaattttcgatcatatgccattagtagtatggttggttcgtcgggaaggcaaagagttcacagtgattacctgaaagagtacagagttgatactagcgcattagaagctatgtctgatttccatcggttagcaactccaatattcatatcaattgccaataagcactatgaaaacaataaattaaaagagttaagagaactactactacaaaaggtagcgtaa

SEQ ID NO: 313495 - DNA, 702 bp, Proteus mirabilis
  misc_feature (686)..(695): n is a, c, g, or t
gtgtactctgcattaccatgggacattaaagatgatatggatgatatctttgaacttcggaagagattacttaatttaggttgtacagcaagttatattgattggaagtcattgagcaaaacatatccattacgtgcactctttttcattgaattaatattggaacattatagaaacgttatctgtgaatatccatactcctataatataaaaaatattaataagataacgcatcgtgacggttggactgatgatgatcttaaagagattaaaaggttggcagtagtagcaccaatacaatatatagatagtgtttttagttcaaaacagcatgaatatgctattcatcaatggtttgaacgatctaggcatattaattatcatgatgtaagtagtattcgaaatggactctttacacttattgaggcggcagggcaacagttagaggctcgccctgacacattgctagatcttatgacaccttatatggaaaaatcaaatgctgtgataacgcatttggttgcgacactgttattgaatttaccaaaccaatatgcagatttggtcataagttggctattggcctctccgacaatccgtttagcctgtggcaatgagtatattgagcctgcctgggttttaccaggaaaactcataactaaattttcccctcattgttctaatgnnnnnnnnnncaattag

SEQ ID NO: 313496 - DNA, 252 bp, Proteus mirabilis
  misc_feature (165)..(174): n is a, c, g, or t
atgttagatcaagagatgatccgtacttttattcaagtagcagattgccaaagctttactaaagcggcggagatgttacacaaaacatctgcggccatcagctatcggatcaaaaccctagaagagaatattggtacacagttgtttaatcgtacgacaagaccnnnnnnnnnntacgacaagaaccgtcacattaacgccggcaggggaatatttattagagaaatgtcgccagtggattgtttggcttga

SEQ ID NO: 313497 - DNA, 681 bp, Proteus mirabilis
atgaaaaatggcaaactctctttcgatgcaaaaatcatatcatcagtcttagtctctatctgccgttttttaaccgggatcagagccaaacaaatatctccgattgagaaagataaaccttgtatttattacgcaaatcactcaagtcatctagatggtttagttatttggtcttcacttgccccccatattcgcccatttgtgcaccctgttgctgcagaagattattggaataaaaaccgtttacgtcgttatctttctcgtcgtatctttcgtgcagttttgatcccacgccacgcgaataaaacaaatgttactgaaggaaatggtgaaacaacaactgtacctcagaaagtaaatgctcttacactgatgcaggctgttttagataaaggtgaatcgctaattatttttcctgaagggactagaggtaacggtgagtctattcaggattttaaagccggtctttggcatttgtcccgtaacaatccacaggctcaattagtccctatctatcttgaaaacttaaaccgcgtacttcctaaaggctctcggcttgttgttcctatcatttgtagtgccacatttggcccgcctattgagccgacacatgaaaatgaagataagactgaatttctattaagagccaaaagtgcgttagaggagttacatcatggatag

SEQ ID NO: 313498 - DNA, 570 bp, Proteus mirabilis
atgaaagcgtcatcggacaataacgacttccgcgcccgcggctggggctggctgggctcactggaaaccggtctgcccttcagtatcactgacaacctgatgctggagccacaactgcagtatacctggcagggactttccctggatgacggccaggataacgccggttatgtgaagttcgggcatggcagtgcacaacatgtgcgtgccggcttccgtctgggcagccacaacgatatgacctttggcgaaggcacctcatcccgtgacactctgcgcgacagtacaaaacaccgtgtgagtgaactgccggtgaactggtgggtacagccttctgttatccgcactttcagctcccggggtgacatgagcatgggtacagccgccgccggcagtaacatgacgttctcaccgtcccggaatggcacgtcactggacctgcaggccggactggaagcccgtgtccgggaaaatatcaccctgggcgttcaggccggttatgcccacagcgtcagcggcagcagcgctgaaggttataacggtcaggccacgctgaatgtgactttttga

SEQ ID NO: 313499 - DNA, 1083 bp, Proteus mirabilis
atgaaaagaatctttgtcatattatttcttttaactctattccctagtctagctgttgctggtgcagatgactacgtaccgtctccaataacaatcaacacatctaccctccctgttgttgttattggtcctgctgatgcccatacttacccacgagtgataggggaactcaccggaacaagtaatcaatatatatttaacggcggtagtttaatagcattaatgcgtggaaaatttactcctacattacctaaaataggcaaaatcacatataactttcgccaaggaaataacactcaatcttccgatttcgatatatttgatactggagttccagggctaggtattattattggtatggcgggctattggcctgcaacgccattggttcccataaacagctcaagtatatatattgatcctgttgccgccaatacaaatccaaatgcttataatggtgcaactggaagttttggtgctcgtttatatgttgcttttgtcgcaacaggacgattacctaatgggtatgtaacgataccaaccaaacaactgggccatcttttattggaatctaatcgggcaagtttgaataataaaagattaacagctcctgttatgttaaatggagggcgcatccaagtgcaaagccaaacatgctcgatgaatcaaaagaattatgttgttccattaaatactgtctatcaatcccagttcacgtctttgtataaagaagtgcaaggaggggaagttaatatacaacttcaatgccaagacggtattgatgtttatgctacattaaatgatgcgacccaacatgggaatcgttctgatatattaacattagcaacggattctacggcaaaaggcgttgggctaagattatataaaaataatgaagtaactgcgattagttatggttcagacactcctaacaaaggaaatcaaaatcaatggcatttttcaaattatagaggagagataaatccacgtataaaattaaaagctaattatataaaaacagaaaatactattacgccaggaagtgtaaaagcagtagcaacgattactttttcatatcaataa

SEQ ID NO: 313500 - DNA, 726 bp, Proteus mirabilis
atgttaaagttcattcttattttcttgactctgtttgtatccacagtggctcaagccagtgtggttattatggggacccgcgttgtttatcccgcaacgcaaaaaagcattaatgttcaattaaataataacgatgaatcccccgcattaattcagtcttggttagataccggaaacgcagctgcagcaccagattcaattcacgttccttttatcattactcctcccatatttcgtatggagccaaaatcagggcaaaccatccggattgtctataccggtgaatcattaccacaagatagagagtctcttttctatttaaatgtcttagacattccggcaaaacctaaagtggaagaaaattcggaaaactcagagggaaataacaattacttacaattagccgttcgtagtcgcattaagtttttctttcgccctgataatctcaacgtaacgcctgatgatgcttaccaaaaagtgacttggcatcaggaaggagcactacacattaaagcgattaacccaacaccttattacatcacttacaacaaaatctcagtgggtcaggataaacaactaacgcctgttgaacaaagtgggatgatagctcctttttcttcaaaaatattttcacttaaagagaagccaacattaacaaataaagtcacttgggttgttgttaatgattatggtggataccaacaaggtgaatctactttggaataa

SEQ ID NO: 313501 - DNA, 1245 bp, Proteus mirabilis
atgttttcagaagaaagacgacaggaaatctatagcattattagggaacagaaaaaagttaaagtggctcagctagcggaaagattcaacgtcacattagaaacgatccgcagtgatttgaaatacctcgaaaatgaagggttgatcaaacgttgtcatggtggcgccatactagggaaacaagaaataaaaaagatcagtaaatttagtgatagttttgatatctcatgcttactacacgatttattgatcgtcaaagaacataaaaagaaaacaccagaaggtaaagtgtgtgtattaggctcttttgtggtggacattattgctaatgttgatgcatttcctcgtgtaggggaattggtaaattcaaaaggaaactcaataggtccgggtggaaaagggacgaatcaagccatttctgccagtttttctgatgcaaaagtgcatttaattaccaaagtcggtgaagatcattttagtaagtacgcctataaatatttgcaagagagcggtattgattcatttactatttttcaaacagaaatagagccaacaggtagctcaattagctatttagcagataaaacccaaaataatattacggctacctatttaggcgcaaataacacttttaccctgcaagaggtcgatatctcactgccttatattagtgaagctgacgtgttattactgcaaggggaaattaatattgatgctaatgtgaaagccgcttcttttgctcattctattaataaaaccgtcatacttaatgtcgctccgtatagcgatgatttaaaacaactttatttatatgtagattttattacgttaaacgcttaccaagcttcagattggtcaggtattgaaattaatacgattaatgatgccaagcaagcagtagagattattgccggtaacgaaaagaaaaaagtgattatctacatagatgaattaggcgtggtgtattttgatgggaggaatacttttcatattccgccactaccttctctacgtgttgatacgatggcagcaacagatgcttttaatggtgcatttgcctcaaaaatagccgcaggaggcacaatgccagaaagtgttttatttgctagtgctttcttgtctgcatttatagaacaaaaaggggtgacttcaatgccttcactgtcacaagtacaagcacgtcttaaattaagaattgaagatattcgaccacaagtaatctgcaatgagaaaaggtgcatataa

SEQ ID NO: 313502 - DNA, 231 bp, Proteus mirabilis; identical to SEQ ID NO: 302525

SEQ ID NO: 313503 - DNA, 552 bp, Proteus mirabilis
atgagtattagtcgtcgttcttttattaaggggatgggtataggatgtgttggttgtacggtgggaagtttaccaccaggggccctcgcacttaatccagtaacatctcttaagggtcagtctaaattaacaccaagtttgtgtgagatgtgttcttaccgttgtcctatagaagctcaggttgttaataacaaaactgtctttatccaaggtaaccgaaattcacctcatcaaaaaactcgagtctgtgcgagaggaggcagtggtgttagccttatttatgatccgaaacgcattgtaaagcccatgaaacgcaaaggccctagaggtgccggagaatgggaagttattagctgggaacaagcttatacagaaattgccgaaaagatggcaagcatcaaacaacattatggtgctgaaagtatctttttctcatcaaaatcaggctctctttcctctcatttatttcatttagcggcggcatttgggtcaccaaacacctttacgctgcatcaacttgtcccgcgggcaaagccattgctgcatcggtaa

SEQ ID NO: 313504 - DNA, 321 bp, Proteus mirabilis
atgaattataaagaatttgcaaaacaaattctcgctattgttggtggcgaggataatataaagtcattagtacactgctccactcgattacgttttacattacataatgaagataaaattgatccttcaaaagccaaagcaaatagtaaaatattatctgatgtgatgaagggaggacaatatcaactggttatcggtaatgatgttgataaagtatttaatgaactaacaaaaatgataaaaacaaataatactcctcatgataataataaagattatcagcaattactggctctatcgctccggttatccctctgttag

SEQ ID NO: 313505 - DNA, 678 bp, Proteus mirabilis
atggccttccagtacatccaggcgaccgccggactccagaacaacgccgtcagccttaccgttttccaccgtgaaattgcccagacggttgctgccaagaaccgttgccgcagtactggtgaccagtgctccaccctgtttcagggtgacattcgtggctgtaccaccggcgttcacctgcagtttgcctttctggttaacggtggtgaaatccgccagaccaccttccttgacaatctgccagccgtcactgtttacaaccgtgtcagaggctgtgcctccgttgtgcacatactggtaaccgccattcagtgtggtatccagcgcatgcccgtgtaccgtctggtcgccgccggcataaaccacagtggtatttgctgttccttcaacagccacaatctgacgaccatttttattgatggtggtacgtacggcatttccgcgaacaaactgcccggtatcaccattttctgcatctggtcccccttccgcgccggtattcacaaccgtgtcggttgccattgcgccggatttgacggcctgccagcccttctcattaatgacggtacccgttgcaatcccgccttcatgtacccactgctcaccgccgttcagagtggtattcactgcctgcccctgaaggctctgtccgcctccggcactgataaccgtgtctga

SEQ ID NO: 313506 - DNA, 1053 bp, Proteus mirabilis
atgcacccctgtcgtcagagacataccggcaacctctgttctgagcaggtcaccctccagacggacgaagccatagctgccgctgctttccggcgtggctccacgggcaataccgccgttgttatcgtgaccgagatgaccgccctgaatgctgagacggacgctgttattttcaccgtttacaccggtctgatggctgcgggagcctgccagaatccggtcatagtccattgcctgtgtcagcatggatgtatacagggggacttcagcacgataagcattttcactgcgcaggtaccagtcttcatcgctgtcacggttcagggtgtagttaaaggcgccggcctgaagcgggcgactcagggcaaacgcaccttcttctgtggtggcgccattctgtgcatccacaacccggataccctgtccggaggttgccaccccgaggttgctgtttccgacatttgtaaacgcaagccaggttttgccggttgcctgaccaccattaatcaccagctggtcagaggcattgctgccatcaaggcgaacacgcatattgatggtgccaccctgaccggtgaggttactggtggtcagtttatggaacgttaccggggagtcgccttttgcaacagcacggctcagtacggcatccggtgttgtctgattgtcaaagtaaatctcccctgcgttaacaatatcgccggtactgaccacatcaccattcagtaccatgctggcgcctttactgagctgtgttctgccactcagacttcccccggcagccagcatcagtgttccacgatgtccgacagtggtgttgctggcctgtcccccggcattaaccgtaaagctgccgccattttccagcagcagtccgctggcctgaccggatgtgccatcaatactgaacttaccgctggcattggtcccctcaacagtggcaccactgtctgcaatcagggcactaccggatgtcatggtgacatctgttgccttaccaccggcagacactgccagggttccgccgtcatccacccgtgttttctgcgctga

SEQ ID NO: 313507 - DNA, 162 bp, Proteus mirabilis
atgataaatacgttaactaagaaacaagcaacaaggactctgctattttcactatttcttggtttatccgtgtcttctttttcttctgttgcagcttcaacaaatgtaaccattaatggcaatggctatgataatgttggatcaaaaacgcgatctccgtaa

SEQ ID NO: 313508 - DNA, 156 bp, Proteus mirabilis
atgaataattacaaaacaaaaacggaatatgagcatactttggagtcagcaatagccgcggttggagccgctattgcggatatttccagagtaaaaatactctgtgcctgtctcttatacacatctgacgctgccgtagcggccttatttctgtga

SEQ ID NO: 313509 - DNA, 189 bp, Proteus mirabilis
atggatatattagatgaaacatttgaagtatggtttaagaagtctcacggttatagcccatcagtagcgccacctgatagtcatttaattggtgttaggcgtatggcatttaaggctggatatagagcagctttgattgaatgcaaagatatattaatcggcgacgaggtggaaataaaaaatgaatga

SEQ ID NO: 313510 - DNA, 201 bp, Proteus mirabilis
atgtcaaaaaatagtgatattctcagtaatatcgatagagaggaaaatttctcatcggcttttatctgttttgaagattcacctctgatccatttttgtagtaatggttttgattatctttcttcacaaaattgtccagatacttttactcaattacgtattgaagaaatgctcattctattgcgttactacgccaattaa

SEQ ID NO: 313511 - DNA, 363 bp, Proteus mirabilis
gtggcgggtgttctaacagtttgttacggacacacaggtaaagacattattcaaagtaagacatactcacaacaagaatgtgatgcgttattacaaaacgattttattaagacacaacagcaagtcgatgcattaatcaaagtaccactcgatgactacaccaaagccgctttatattcctttgcttttaatgtgggaacgaccacatttgctcgctcaacattacttaagaaactaaatgcgggtgatagagcgggtgcctgtgaagaaataaaacgttgggtatatgcgggtggaaaggtttggcgaggtcttgttagtcgtcgagaggcggagtcagtactatgtcatggaaacctttaa

SEQ ID NO: 313512 - DNA, 420 bp, Proteus mirabilis
atgagttatttttatagcgcaatagaaaatgcattttatcctgaatcaatgaaggatgattacataattgctggcacattcccaaacgatgcaatattagttgatgacagtgtttatgaggaattttctaaaaacccacctgacaataaaattaggatttcagtagatggtcttcccgcatggggagataagccacaactaacaaaagatgaaatggttatagtggaagagagaaaaaaagcatcgctgattagtgaagcgaccagcgtcattgatcctatgtctgatgctaaaaatgggggatatatcgaaaatgatgatattgctcgattggataagtggcaacgttatcgatatgcgttgacaaaagtcgatacgtcattgtcaccagacattgagtggccacaaaaacctgagtaa

SEQ ID NO: 313513 - DNA, 720 bp, Proteus mirabilis
atgttcggaatgccagatataccaaactggaagggattacctaacgctggattagatgcaggtattagccttggcggtgctgcgttaattaattccttattcggtaactactggggaatattcaatgaatacggtgttccgttattactcgctgataacgtgatatcactccagtatgaaaataaaagccgtgttgtaaatgcgcccatcgaaagaggaacatttgccagctacaacaaaataagcgatccatggaaagctaccgtgcaaatgagtaaaggtagcggtggcgctttagagcgtggtgctttcttggctcaacttgaaattctatctaaaagcacattgcgatttatcgttatcacgcctgagtttgtctacaagtttgcaaatatcgtcgggtatgacttagcgagagaagctaaagatggggcgacacttattaaagtaaatgtgcatcttgaagaaattcgagaggtcacagttagctatgcagaggaagaagtcactaagccagatgattcaaaggtgaaggatattggcgatcagactaatgatatccaaaagcaacaagtagatgatttgattgatgggctaatagatagatctacattaaaaagtctatccaatggaataaaaaatgcttacggtcttgtgaataaaattcctagcttagacgagattatgaaattcacacaaagccaaatatcaggaggttaa

SEQ ID NO: 313514 - DNA, 162 bp, Proteus mirabilis
atgaataagcaaaataaaacagaaaaagttcaattaagaacaactgaatatctaaagggaaagttagataagttatctatgcaggatggaatatcgaaaaactcgttaattaatcaggcgatagcttggtatgtggaagagagagagaaacgtgttgcgtaa

SEQ ID NO: 313515 - DNA, 297 bp, Proteus mirabilis
atgactactaagcaagtaaaagaatacgataaattcgtggttaggcttccagacggaatgcgtgaccagatcgccaaaagagcagatgaaaacggtagatccatgaactcggaaatagttcagatacttcaagatgcactagaggataaatctttagatatagataaaattgattctaaaaatgctaatcctgaggatttagcgtctgaactagcaagacagttagaagaaaaacaaaaagaagtaatgcttgttgctaaagcatttgcatcgctaatgtcatcaaaaaagaagtga

SEQ ID NO: 313516 - DNA, 519 bp, Proteus mirabilis
ttgtctatatttaatattattcgaggaattttaaaaaaaaataagactgaatttaacacgatgccaaccgtgaaatgcaatatcaggaaatttatttcagaaaaagatgtaataaatgagttagcgccaataaaggaaaagtatagcaacttaattttttcagacaaagatatggcggacagtatactgtctggatttaatttaaaaatagctagcgactcactgatatctcttaataaagagagttctagggcggatatattaccacctatttattggctgtcctctaagtgtcactatcttcatgattcaaggcgagcaagttcagttggaataacacatggagagtgggtttgtattcatggattttgtgaaggaggaaaaaacaagccttcacatcaaaagctgcatggtaaaaaatttagtcttaaagacggtttaaaatatagaggaaatacttattttcccggaggtgaggatgggtgcaggtgtttttacaggccaatactaccattttaa

SEQ ID NO: 313517 - DNA, 294 bp, Proteus mirabilis
gtgagctggaaaagtcaaattgaaggtctaactattgaacagttaagaaatttcagagatgaaataaacaaagaaatacgcaaaaaagaggatgagaaaaaacgtacagcatggcgagtgtgttgtaggtggcaaaattatggatggttccgtgaggatgattaccttggagcagttgagcttttacttaagttagcaagaaaacttaatagtgacggtgagcctgaacatccgtcaatttcaattgaaccagagcttatccctgaatctgattatgaggattggtttaaatga

SEQ ID NO: 313518 - DNA, 204 bp, Proteus mirabilis
atgcagtttgaaagagaacgtcgagccaatttaccggttttccctaagattaaaaaggccgaggagacagagcccaaacagccaaagcaacaagatgatgactttaagtgtcgattaaaatttgtcgacaaggctgatgtctcaggcatgggtaatccaatgttgatgaagtttgattcattattgagtggggtgagagtgtga

SEQ ID NO: 313519 - DNA, 663 bp, Proteus mirabilis
atgggtaagctcttttttaatcaaacttgtccacactgtcttagagaaaacgcagtgctagaagcttttggtgaacaacgaaaaggtgaagatgaacctttttatgatgtatcttttatgtgccgaagttgtcacaattcaggaattgctgtcgtcagaagtaacgcttcttacggacctttaatcactgccaacggcagggtttctgggatgagcataccttctgatgatcctaagtttgtcttgcttggaataattcctaaagttaacaacaccactgctcctgaaaataccccagaaagagcggctaaattttttattgaatcaaaggatgattttcaacgtggcagatatgaaacctgcgtaatgaattgcagaaaggttatggatattgccactaaagtccttatgggtgatgaagctaaggatgaaaaattatcaaaacgcatcaccatgttgttttctaaaggaaaaataactgaacagatgaaagattgggctcatatcgtaaggattgattcaaacggtgcaattcactctgacgaggaatttacgaaagaggaaaccaagcaaatacttggctttaccgaggtatttctaatgtactcatttactcttcctgaaatgattaaaaaacggcaagaggaaaaagattcaaattaa

SEQ ID NO: 313520 - DNA, 186 bp, Proteus mirabilis
atgtacaatacatttaaattaattcaagcgcattgggtgccacgccctaacgaagaaacaaagaatatcgatgctgaaacattcaatagagccaaggaggatgcaattaaagaattacaaagccagattaatcatattaatagaatggaattacaacaatataagtttcaccttaactaccagtaa

SEQ ID NO: 313521 - DNA, 171 bp, Proteus mirabilis
atgaaatttaatgtcggtgataaagttagagatgtaggctttggctatgtaggggaaataaagaatattgatactagcaaacaaaatccttatcaagttgaaataatagaaattgattggatatttacattttggtttgcagaaaatgatttggagttaattaatgaataa

SEQ ID NO: 313522 - DNA, 345 bp, Proteus mirabilis
atgaataaatacaccgaactatctgactttgagattaatttattagtagctcaatatgttttacctgaaacgcaatacgatgtaattaaacaaacaatggatattatccaattccttgttgatggctcgtttggttatcgctttttcgacccctgcaataacccatccgacgtatggcgactaatactagacgcaaaattatccattcaccctgactttaataatgactgtaattcatggattgttcgtaacgtccatataccaatggtaaatgaaaataatttagcacgtggaattagtattgcttatttattaatgaaggatgcggagaatgaaaaagtatga

SEQ ID NO: 313523 - DNA, 915 bp, Proteus mirabilis
atgtctgagattaaatctctcgaagatatttttaatgatgatgatctaggtctactagatgatggtcaagatggtgacatctttaagattaaacatgttactgcccaacgtgctgctgcagacgaggttgctaaacgcaaacgctgtaaggactttgatcaatttgaacatctatttaaaaatgttcatcaagagcttcgggaaggtaaacgtaagttattacctttcaacgataagggataccaactagttgaaggtaattactatgttttaaatggcttgctggtttatcttgcagatatcaattttacgtctgaggctaaaaccgtggatggcaagcgttttcgtaaagatggtcggacacgaaccatctttgagaatggcaccgaatcaactatgctttatcgctcactagctaaagcattgtataaagatggacgtattgtttcagaaacgaatgagcaagaaaactccaatttctatactcattttggcggtattaccgaagatgatacatctacaggttatatttatatcctaaagtcacaaagtaaagatccacgcattcagtcacttgatcacctctataaaattggatttgcaactacaactgttgaaaaacgtattgctaatgcaaaaaaagaacctacctatttgatggctgatgttgacgtaattgctgagtatcaagcattcaatattaacccacagaaatttgaatattacttacatgctttctttggtgagtcttgccttgatttatttgttgcagataaagatggtaaaaatcatcaacctaaagagtggtttattgcgcctttaaatgtgattcaacaagccgttgaattattagtaaatggccaaattacgaattacaaatacaataagttggcgaaagagattgagttgagatag

SEQ ID NO: 313524 - DNA, 288 bp, Proteus mirabilis
atggaagattttgactggcttcacgatatgattgctgatgacgatttggggcttttaaaagttaagaaaaagacttcagccctaactgctgatgaacaattagtctctaaatttaatgaaatcaataactttatgacacagcatggacgtgtacctaccaaaaatatggcaaacatttcggagtttatgcttgcgagtcgtctagaatcgatcaagagtaatccagagcaatatatggctttggcagattacgatgaacataatttgctcccagaacagcaggactaa

SEQ ID NO: 313525 - DNA, 1932 bp, Proteus mirabilis
atgattaatataattgatgtttgttaccagcaaactggtgaaagcacctcaacaaacaacatgggtatgcgggctatgcaagctcgtgcttacgcatctcgcaactcacaatatttattgttaaaagcaccacccgcttcaggtaaatctcgtgcattaatgttcctagcgttggataaactgcataatcaaggtattaaaaaagttatcgtagctgtacctgaacgctctatcggtggttcatttgctaacactaagcttacagaaaatggtttttttgcagattgggatattaaacctgaaaacaacttatgtactgctggtggggacaaaagcaaagtaaaagcctttaaacgctttatagaagactctgatcagatcttggtgtgtacccatgctacattaagattcgcttttgaagagcttgaagataaggtatttgacaacacattagtcgcaattgatgaattccatcatgtatcagcagatgccgataatattttaggtactgttcttaaatctctgatggacaataccacagctcatattattgcaatgacaggctcttacttccgtggtgatagcgttcctgtacttacccctgaagatgaagccaagtttgataaagtttcgttcaactattatgaacaattaaatggttacacttacttaaaatcacttggcataggatatcacttttataaaggtcgttattttactaaagatgatgaaggtaatattgctcttgagtatgtattagataccgacaaaaagaccatcattcatattccaaatgtaaattcaggtgaatcaaccaaagataaatatgatgaagttgatgccattctcgaaattattggcgagttcattgctaaagcccccgatactggcattattaccatcaaacgtccagatggtaagattttaaaagtagctgatctagttgaagaagatgggcgcgacaaagttgttgaatatctacgaaatatcaaaacagtcgatgatcttgatctaattattgctcttggaatggcaaaagaagggtttgactggcaattctgtgaacatgccttaacgattggttatcggggatctttgacagaaattgtgcaaatcgtaggtcgctgtactcgtgatagctcaaacaaatcacatgcacagttcacaaatcttattgcacaacctgatgctcaagatactgaagtcaaatttgcagtaaataacatgcttaaagcaattactgcatctttgctcatggagcagatccttgcaccaaacttcaagtttaaaactaaacgagatgatgaggatattgttccaccaggcactttaaccatcaaaggatttaaagaaccaagtacagcaaaaacaaaagcgattattgaaaatgatcttgtggatctaaaagcagcaattcttcaagatgccaaagtgatcgctggctctgctggaaaggttgagcctgaagtagtcaataaggtccttattccaaagattatccaaactaaatatccagatttaacaaaatcagagcttgaggaagtgagtcaatatttagtagttgactcagtgattagtacagcagaagtaaaagaagtcggtgataagaaatttattcgtatggcggataagtttgtcaatattgatgatctcaatattgatcttattcaatctgtgaatccattccaaaaggcttttgagattctgtcaaaggatgtcacagtgaatgttttgaaattgattaaagaagcaattgaagcaactaaaattagtatgactcaggaagaagcaattgagctgtggcctaaactcaaagccttcactaaacaaacaggacgtgaacctagtctagagtcaagtaacttaattgagaagcgactagctgaatgcttaatctatattcgtgaacaacgtagacgagctggagtgtaa

SEQ ID NO: 313526 - DNA, 2709 bp, Proteus mirabilis
atgaatattgtccaaatcgaagaaaatgttaaacagatcatcagtaaaattactcaagatgagttaaacaaacaagactttatctatgagttgcttttagcttatggacatcgcagtcagtctgtggggcgtgtgcgctctggtgagcgaaatttagctgaagataaggaaaactctgttttttggaagcgccaactctattttaaaattgcaaaacaacaagatctatatggtctcattgaccaaatgaagcaagaaagacgaactgaaggcaataagattcgtttcttaatagtcacggattttaaaaaattattagctattgataccaaaacaaatgatagtttggatatcgagtttagtgatttagctaaaaaatttgatttcttcctaccatgggctgggatggagaaagctgtatatcagggtgaaaacccagcggatgttaaagcagccgaaaaattggcaaagctctttgacgaaattaaagcagataatttcgatgaagatggcttaaataataaagagaatttacatcaactcaatattttcttatcacgattactgttttgttattttgctgaagatacagaaattttcaaagataaacagttttctgatgctattggttctcatacaaaacaagatggttcagatctatcagactatttaaagcgattgtttgttgttttaaatcaatcaaaacagcaacgccctaaagatctaccagactacttatcagattttccttatgtaaatggtggtctctttaaggatgatatccaagttcctaaatttaaccgtaaatcacgccaaatcttgattgaatgtggtgcagaattagattggtctgatattaatcctgatatttttggttcaatgttccaagcagttgttcatacggaacaacgtagcaatatgggacagcactatacgtctgttccaaatattatgaaggttattgaacctttatttttgaatgacctttacgaagaactagaaaagaatcaggacagcataaataaattattgcagctacagcagcgtttagggcaattgaaaatttttgaccctgcatgtggttcaggaaactttcttattattgcttataaagagcttcgtaagtttgaaaaggagcttttaaaacgtattcaagagcttgaacttgataaaacaggtcagctttcaaaaccattttcagtgattcaggtttctcaattttatggtatagaaattgatgattttgcacatgaaatagccatattatctttatggttagctgaacaccaaatgaatattgcttttaaagatgaatttggagaatctttaccatccttacctcttaaaaaaggaggtaatatcataaatgcaaatgccgtccaaataagttggtcagatctatgtccaattacagaaaacgatgaagtcttcgtgctagggaaccctccttacaaaggtttttcacaacaatcagaaagtcaaaaaaatgatttatatgctgtaattggttcaactacgaaattagattatatatcctgttggtttattaaaggttcacaatatattaaaagtactaaaggctctcttgcatttgtttcaacaaactctttatctcaaggggagcaagtttcattactttggcctctcatttatcaaaataatgtagatatacattttgcacataaagcttttaaatggactaatagtgcaaaatctaatgcaggtgttacatgtattattgttggattgattaataacgaatacttgcctttaaatagaaagctttatcaggaaaatagagtcctagtttgcaaaaatattagtccttatttaacctctttaaatactcctactgtctctaaaagaacaaaagttctatcaaatttacctaaaatggttttaggaaatatgcctaatgattggggatatttgcatttttcaacagaagaaaaggatcaattaattaatgagtatccaaaattaaaaccatttattaaaaaagttgttggttctaatgagtttattaaaggcatagacagatggtgtttatggatatcagaaggagatttacatgaaattaaggatattccaccaatgcaagagcggttaaattcagtgtatgtcgagcgtgcacaaagtaaaaaaaagtcatatcaacaatttgccgatcgtccatatcgttttattgagattagacaccaagcaggttcagctataattattccaggaacatcttcggaacgtcgtccatatattccgataggttttttagatgattcgatcataattaataatcttgcgtttgctatatataatccagaaccttatgtattttcccttctaacatccaaaatgcacatgctttgggtaagagctgtcggaggggcacttgagacacgtttaaggtattcatcggtgctttgctacaatacattcccatttcctaaaattactaaggagttaaaggaggagttagttgcatcagcatttaacatcttaacgattagagaaacatattcaaatttaccaatgtctaaattatatgatccagatactatgccattagatctattattagcacatcaggaaaatgatagaattgttgagcagtgctattataaaaaaacattagattcagatgaagaaagacttgagcacctttttaatctttataataagatgattgaggaggagcgtttaaatgattaa

SEQ ID NO: 313527 - DNA, 537 bp, Proteus mirabilis; identical to SEQ ID NO: 146806

SEQ ID NO: 313528 - DNA, 267 bp, Proteus mirabilis; identical to SEQ ID NO: 146807

SEQ ID NO: 313529 - DNA, 915 bp, Proteus mirabilis; identical to SEQ ID NO: 146808

SEQ ID NO: 313530 - DNA, 372 bp, Proteus mirabilis
  misc_feature (323)..(332): n is a, c, g, or t
atggcgtcactgaaagatgttgctcgacttgcatctgtttctttgatgacagtctcaagagcgattaataaccctgagttattaaaaccagatacgttgaaacaagtccaacgcgcaatcgaagaactgaattatgtgcccgatttttcagcgcgaaaaattcgaggtcaagggactaaggtctcatcgatcggtgtgcttggtattgataccgcaacgacccctttttccgtggaaatgattttatccatcgagcgtaccgctcgtcagtttggctggagttcatttgttgtaaacctcactgaacaagaggggtatgatcnnnnnnnnnngaacaagaggggtatgatcaagccatttggcaactgttag

SEQ ID NO: 313531 - DNA, 204 bp, Proteus mirabilis
atgcttaaacaactctttcgatttttaatcggtgataaatttattccattgaataaactgaataaaattgattttgaacgtatttctgattttgaatcaatagattggagagtcggtgttatccggaatggtgggctctataaaagagattggttaaaactcaaagacaatgaaaaaaaggaattaaaaagcaatcgaaaataa

SEQ ID NO: 313532 - DNA, 255 bp, Proteus mirabilis
atgaatttaaaaaaactagaaatggtggtcagtcttgcattttcggtaatgatttttgttttatttggtatgtttctatttgaaggttcaattcgattaaatggatttttctttgttgtattatatattcttgctggtgcaaatatatttttgattacctataatcgtaatggaccagtcagtaaaattattgcttattcaattgctataattcttttgctaatacttatttttgccttgatatttgttctttaa

SEQ ID NO: 313533 - DNA, 285 bp, Proteus mirabilis
atgtcagcgataaatgacttgggctttggtttggtttggtttggtttggttattacattttggatctgtctagcatttgtcatgttattagtttacatattcaaatccgatttgaataagaaagccgtgaaagatggaaagcgatatagccaattaaagatttaccgaaccatcgagcgagattacaaaattctctacgtgctaggtgatgaaagttacagtattgaagtagataaggattattacgatgcggctattgataaatataatcagtctattaagtaa

SEQ ID NO: 313534 - DNA, 135 bp, Proteus mirabilis
atgagatctgaaacgcacattaccgaaacagaagcaaaaaaaattgttaataaccagatacctagcgataagtgggtgttacgttcaattgatgaacgtgactatgggacagacttcattgtgggcggacaataa

SEQ ID NO: 313535 - DNA, 1575 bp, Proteus mirabilis
atgataagtttatcaccaccgactatttgcaacagtgccccaaaagatgccaatattctttcgactacctcccctcaaagccatatcacgtacgttaatcctgacttcattaaaatcagtggtttcactgaggaagaactattaggccagcctcacaacatcgtaagacacccagatatgccgcctgctgcatttgagcatatgtggagtacattaaaatctggccgctcatggatggggctagtaaaaaatcgctgtaaaaatggcgaccactattgggtaagtgcttatgtaacgccaatagctaagaatggttcgattgttgaataccagtctgtaaggaccaagcctgaacctgagcaggttttggctgcggaaaaattatatgctcaattgagaagcgggaaggccgcgaggccgaaattggctgctagcttttccgtgaaaatactcttgctcatatggggtagtattatatcaagcgcaatggctgccggcatgcttactgatacatcaataagcagcttattgttagccactttaatgtcaggaagcttaagctctgttagtgttttggctattctctctcctcttggaagactggttgaaagagccaggaatatttccaataacccattaagtcaatccctctacactgggcgcaccgatgagtttggccaaatagagtttgctttacgaatgatgcaagctgaaacaggcgccatagtaggtcgcataggtgatgcatcaaatcggcttagcgaacacacccgaggcctactaaaggatattgagtcaagcaatgtacttacagttgagcagcaggcagagacagatcaaatagcaacggcagtaaaccaaatggtggcaagcattcaagaggttgcgagcaatgcacagcatgctgcagatgcggccggaagagcagacactgagacggcatctggccagcgtctggtagcccacacaagccagtcaatcactgcccttgaaggtgaaattaggcaagccactcaggttattcatgagcttgaaggtcaaagtaacgagatatcaaaagttcttgacgttatacgagggatcgccgagcaaacgaatttgttggcactcaacgcagcaattgaggccgcgcgtgctggtgagcaggggcgtggttttgctgttgtcgccgatgaggttcgcagtcttgctgctcgcacacagcaatcgacaacggatattcaaagcatgatcagcgctctacaagagcgagcgcaatccgctgttacagtcatggagcaaagtagtcggcaagcgcacacgagtgtagctcacgcagaggaagcagctacagctcttgatggaattggccaacgcgttaacgaaattaccgacatgaacgcgcaaatagcgactgcggtcgagcagcagggagcagtaagtgaagacataaaccgcagtattatcaatatacgcgatgctgctgataccaatgtacagaccgggcagaataatttgcaaagtgcgaaatctgtcgctcagttaactagcgctctgagcgaactggcaaaacagttttgggaaaaacgaggataa

SEQ ID NO: 313536 - DNA, 255 bp, Proteus mirabilis
atgaatgttcctgttatggcttatgttcaagaaagcattgcccctgaaatgatgggcaaggtgttttcccttttgatgaccgccatgactctttctatgccgataggcttacttgttgcaggtccggttgttgaggttataggtgttaatacatggtttttctggtctggtgttgcgttgatagtaaacgctgttctctgccgcattctgacacgacgctatgacaaagtaacaatgaaaccgcaagtggactga

SEQ ID NO: 313537 - DNA, 864 bp, Proteus mirabilis; identical to SEQ ID NO: 38933

SEQ ID NO: 313538 - DNA, 246 bp, Proteus mirabilis; identical to SEQ ID NO: 38932

SEQ ID NO: 313539 - DNA, 249 bp, Proteus mirabilis; identical to SEQ ID NO: 38931

SEQ ID NO: 313540 - DNA, 792 bp, Proteus mirabilis; identical to SEQ ID NO: 38930

SEQ ID NO: 313541 - DNA, 576 bp, Proteus mirabilis; identical to SEQ ID NO: 38929

SEQ ID NO: 313542 - DNA, 333 bp, Proteus mirabilis; identical to SEQ ID NO: 38928

SEQ ID NO: 313543 - DNA, 423 bp, Proteus mirabilis
atgaagaataaatacactacattcattcggatcatttttttaaccgtcatttgtgtatatccagcatatatgttaattcgaaaaagaaatataattgatatttcagtattaatattaactgttttaattgcattagtaggcgattttgttgaatctattccgttaattgaattgtctaaggtattcgcatcattctttcttcttacaatttatgtatattgctatcatatctattttgaacactctaaaaatcatattgattcaatcagctttaaaacagttaataataagataggacatcttgttttttccagtgacactatatgttattttttgcctttaaaaataagtagccactttaatatgttatggttttatggatatttgagagccataaccatgcaccaccaaaatagaaagtga

SEQ ID NO: 313544 - DNA, 699 bp, Proteus mirabilis
atgattgaaatatttgaaaacagtaatccaacgggtgattgtttttttgtacaatctaaaggaactgtcagttcatttgatgaaactgtaaaactaagttttcctgttaaaacaataaaatacgcattattatttaacgttcctttttttatattttatacatccataccatcaaatgaaactaaatacatatggttacaaaagtatgtggaaatacaccttaataataaaaatcaaaaatggcagcaacaagaatcagtgacaatcacattccctgaagaaaatgatctatcctcgaatattgaaaaagtaaatgaactattaacgaatcaccgcgcaacgtcacaaagtttagcatttctaaaagtatatgaagaattagtgtttcacgctagaaatgttttatctggtgaatttggagtgggtcatacttgtgttatttactgttataaattagtaaaattaaattggttaattaattatctagcatctaatacttgtgtgaatatcgaaagaatgagtattttcaatatgaaagatgcatttgaagaaattgcaagtacaaatattattgacaatgaaaacaggaacgtaattactgaacaattaaaattattgagcgaattgaaacaaattattatatcaacagaatcaagagaagaactaggctgtgaaaattacggtttattcccattttaa

SEQ ID NO: 313545 - DNA, 876 bp, Proteus mirabilis
atgaatataatcttttttgaaaagaattcaaacgagaaagtacaattacaacctcatgctaagcatactataacggcgaaagcaggggatgtgtatcagttaattgattcagatactcaactttctccattagatattcaagcgcatcgtaaatcggatgatcttattttatctagtaaagaacaaaatatagaagttgttattaaagatttttggcaagaatgccaaccaggggaacaacaatgttacgccactttaaatgttttagattcaaatggtgtaatgggacaagcaactattactcaagatggtcctgttttagaacatttagttgctggtgaaacaggtactctttctgataatgatgatggaattggtctatttttatgggttgctggttcaatcggtagtgcattagcgatctttttagctaatagaaatcatggtggtgacaataataaaggtaatgaggctgatattaccgcgccgagtaagccaggattaactgctgaagatgatggttctgtttctatcgatttaccaaaagatgccaataaaggtgattctgtagatgttacttttgaagatgaggatggtaattcaaatactgtcacattagaaaagggagataatggctggacatcaagtgatcctgaattaattcctgatacagataacaatcaagtcactatccctaatgataagataaaagataatagtgatgttaccgcaagtgcgaaagatccgagtggtaataaaagtgatgatgttactgtaacagccaaacctgatcccgtatcagatatacctgttttaagcattccagaagttgacgatggttatgcgaatgcagaagagctgaaagacggtttataa

SEQ ID NO: 313546 - DNA, 1086 bp, Proteus mirabilis
gtgaaggttcaaaggataaaagtggagaataagccatatccattgtatttattgctagatgaagaatatcaggtaatagaaccagtaatgaggtttataaaatatctagataatactggtaagtcaccaaataccattaaagcatactgctatcatttaaagttgctatatgagtttatggaacagagggggattacccttaatgatattaactttgagaaattagcagattttgtaggttggttgagatacccaacagcagcaaatgtaattgatctccagtcaaaagaagccataagagaagaaacgacagtgaatacaattttaaatgctgttatgagttatctggaatatttaagtagattaggagaatttaagtcaattgatgtatttaaacaagcaaaggggagaaattttaaggggtttttacatcatattaataagggtaaatatcaaaagaatatcttaaagttaagggttaaaaagaagcagataagaacactaacatcagaggaagttaagcaaattattgatgcttgtcatacgaagagggataaattaattttaatgcttatgtatgagggtggtttaagaatcggtgaagtgttatcgctaaggcttgaggatattgccacttgggacaatcaaatccatttaacacccagagacgttaatgttaatgaggcctatattaaattaaggaaggaaagaacaatacatgtgagtaaagaacttatggcactttatacagattatttggtatatgagtatggtgaggacttggagcatgattatgtttttatttctttaaaagaaggctattttggaaaaccactaaagtaccaaagtgttcttgatctagttagaagaatagttaaaagaactagaatagagtttacgccgcatatgctacgccacactcatgcaacgcagctaattagggatggatgggatgttgcacacgttcaaaagaggttgggccatgcacatgttcaaacaacgttaaatacctatgttcatctttcagatcaagatatgaaaaatgagtttaataaatatcttgagagaaaggaacataagaaatga

SEQ ID NO: 313547 - DNA, 978 bp, Proteus mirabilis
atgaatgattctagtaaaaggaaaattatcagtcagagtgagatcagtaagaaaatagctgcaatgaatgaagaattgcagggattttgggctaataatagttgggatataaggaaatgtccgcatccttctgccatagaattaagtaagaaccctactttaagaaatcggtgggttcgttttgaacgtgttaaaaatctgtggttaagaacagaattgaaatatttttatttttaccatttaaataatggaatatggaatgcaaaaactgtatggattagaaaaggaactgtaattaatagaatgttagattttttagatttaaagtatcctaacattacttcaattactgaagttcctattaaaaaagcaatgacggaatataggacatatttgacagaacagggtgttagaattaccactactaattataagattactgctaatcaagaaaaaatagctgtagaagctaattcttactatgttactaatttaaaacaatttatggagttttatgaggacttttattttgatggggaggagtgggataaagacatttgggatagacgtaagttacctttgccagatgataaggttaatccgacacaatatgaatatgtaattaactttaaaggggttcgcaatacgtattttaaacaactcgtaaaaagatattgtaaattgagattaaatacggatagcttttcctatgtatgtgatatcgcccaaaaacttaaagagttctttaatttcttggacatgaattttaaacacgttcagagaataaaccaattaacgagaatggaaattgaagcatatttaagcgaattaaatatgatggggataaagcctagcacaataactgggaggatctctatattggaaggactatttagtacccttctaaggctagaatggaatgatattccttccaaggtgttaatctatccagaagacggccatgtattcaatatgtag

SEQ ID NO: 313548 - DNA, 276 bp, Proteus mirabilis
atggctaaagtcgatgtaaggtgcccattttgtcaacaaactccctcagtaaaaaaacatggattaggaagcactggccatcaacgctatcgttgtcaagattgctgtcgaagctttcaactcgattatgaatatcgcgcctgccaacctgggactaaagataaaattatcgatcttacgatgaataatgccggtattcgtgataccgctagagcccttcatatcagcattaatgcggttgttcgtactttaaaaaactctcgccgaggcaggtaa

SEQ ID NO: 313549 - DNA, 801 bp, Proteus mirabilis
ttgtgcaccttgaaaaaaggttgtctattagaggacaaagatggagattactttttaaagtattatcaatggaaaatgaaaaaggagcatatagttccaatatcaaaagaggtagctttattgattaaagttcgggaagataaagtttcatgggagtttccagatagtgaatacctctttccaagaaaagatggatcgccattaaaacaagaaacatttagagacgagttaaacaaattagcttatgagcaaaaaatagtcgataaatcaggcgagatttatagattccatgcccatgcctttcgccatacagtaggaacaagaatgattaataacggagtaccgcagcatattgtacaaaagtttttgggtcatgaaagtcctgaaatgacaagcagatatgctcatatttttgatgaaacccttaaagctgaatttacaaaattcaaagaaaaactggtaactaataatggagatataattgagttagataatgacaatgaagtcgatgatgttgatcttcaatggttcaagaaaaatattaatgcacaagttcttccaaatggttattgccgattaccagtaatagcaggttcttgtccacacgccaatgcttgtttagattgtactcatttttgtacaagtaagcagtttttatcgcagcatgaggaacagttaaatcgtactgaggagttattggcagtcgctaaggaaaagcaatggcaaaggcaaatagagactaataaccgtgttaaagagcgactagagcaaataattggcagcctgaaggggattagttag

SEQ ID NO: 313550 - DNA, 378 bp, Proteus mirabilis
atggttaaacaggtacgaaatacagaggaaattgtgcgtttggcaaagcaaaagtccaggcggactagagaaaatgtagacaaggttatctctaaactatcgcttgaaggtaagactattaattttaacacagttgcaaaggaagctaatgtttctaaatcatggctttataaggaacatgatattaggcaaaggattgaatctctccgaaaacagcaaaaaacagaaaatgtaatatcaaaacccaagaaaagctcccgttctgaagaagtccttattaaaaccttaaaaacaagagtaaaggaattagaagaggaaaatataagattaaggaaccagatccaaaaattatacggagatttgtacattagagaatag

SEQ ID NO: 313551 - DNA, 804 bp, Proteus mirabilis
ttgttaaaacaaaaggaactaatggcaagggttaaggaacttgtccagtcagatgaacgaatatctgcttgtatgatgtatggctcttttacaaaaggagagggagatcaatactctgatatagaatattacgtttttctaaaagatgatacaatttccacctttgattcagcaaaatggctaaatgaagtcgcttcctacactttactctatcaaaatgagtacggtacggaagtagtaatttttgaaaatctaatacgtggtgaatttcatttcctttccgaaaacgaaatgaatattattccttcattcaaagaatcaggctacattcctgacacaaaagcaatgtttatttatgatgaaacaggacaactagaattgtatttatcagagttggaaggtccgggaccaaatagacttacagaagaaaacgtaaattttttattgaataatttttccaacctatggttaatggggattaatgttcttaaaagaggggaaaatgcacgttcactggaacttttatctcaattacaaaaaaatatactacaactcattcgaattgcggaagaaaatgccgataattggtttaatatgacaaagaatcttgaaaaagaaattagtcctgaaaactatgaaaagtttaaaaagactactgcccgattaaatgaattagaactatatgaagcctataagaactctttgcttctcgttatggaacttcgaaatctcgttgaaaaacagtatcaattaaccattagcgatgattttttaggcaaactgtttaattatatgaacgaataa

SEQ ID NO: 313552 - DNA, 627 bp, Proteus mirabilis
gtgacgtggctggcatggctgcgccagtcgcctgccaaaccgaactctcgccacatgctcgaacatattgagcgcctgaaatcctggcaagcacttgatctgcccgcaggcatcgagcggcaggttcaccagaaccgcctgctcaaaatcgctcgtgaaggtggccagatgacgcctgctgatctggcaaagttcgaggtgcaacgacgctatgccacgctggtagcgctggccatcgaaggcatggccaccgtcaccgatgaaatcatcgaccttcacgatcgcatcatcggcaagctgttcaacgcggccaagaacaagcatcagcagcagttccaggcttccggcaaggcgatcaacgacaaggtgcggatgtatgggcgcatcggtcaagcgttgattgaggccaagcaaagcggcagcgatccgttcgccgccatcgaggccgttatgccctgggacaccttcgccgccagcgtcaccgaagcgcaaacattggcgcggcctgccgactttgatttcctgcaccacatcggtgaaagctatgccacgctacgccgctacgcgccgcagttcctgggcgtgctcaaattgcgggctgcaaatttatcaagagtaaactattaa

SEQ ID NO: 313553 - DNA, 1290 bp, Proteus mirabilis
atgtcatcatcgaatatagttcaaggtagcaaagctgtttctaacataatcgcaagtttaaaaccgaaatttactgagaactctcttagtgaaacatcgtattttaatgaagcaatttttgctaagaatcagattgataacaacaaaaaactaatggcgattgctattaataatcccgctagttttaaaactgcttttttacagcttgcaacaacgtcactaacgttagaccctgctcaaaaattagcatacttagtacccagagatgagcgtgttattcttgatgtctcgtatttgggtttaattaaaatggctattgaagctcaaatgtgcaaaaacttaattatagatttagtttttgaaaaagataaatttgagttcaatggcagacggacaccaccaacacatcactatgacccttttgctgatgttggaaatattcttatagaccaattcgacaaaggctcaatcggtgaaagaggtaatttcaggggggtgtatgttgactaccttctgcatgacgatactcacttgatttacttcataaccagacgtgatattgcaagcgcacgtttaaaatctgcaagttggctgtatagtcctgataaatctccgtggtcgttgtttactacacagatgatcagaaaaactgctatcaaatcctgtatacacttacttcctaacgctaatcaggcaatcatgcgaacaattgattatctgaatacagatgggggtgagggttttactcaaaatcgtcctgtttcgctcgaaacaactacttatgaagctgtacacgcatttaccgaccaagactcagcagtagtaacagactcgcctaaaaacgtgtctgaggctattgtagttgatgtcattcgtaatggagtgaaacggcggattgacaagctggttgaacggtgcagcaagaccaatgcatttgaaagcatgcttgatgaaatctcaaataactttgagtttaatcctgctgaaattgaatatgcaaaggaggaattaatagcagaaagaaagaatgtatttaataaaatactaactaatgcaatccagaataataattttgaagatgttgataatttcatttcaactgtttcaggttcagatcaagtggcatttataaaaacacttgagcaagttaaatctgatttagcttgttgccgacagttattctctgattgcaaaaaacaaagcgatatgacaccacttataaataagttgtctattatcgaatttaaaccgttatctgattatattttgcttactattgagcggaattaa

SEQ ID NO: 313554 - DNA, 420 bp, Proteus mirabilis
atgataagtatgcgatatccagttaagttagataaaactgaagaggggatatttgttattggatttcttgatatccctgaaatattggttcaaggtgatacaaaagaaaaagcgctaaaaatggctaaggataaattgttagctatgtttggggcttattttaaaaataataagaaattacccgaaccatcagagatagtgggtgactatattgagctgccagttagtgttgtagctaagattttaatgttaaatttatttcttgactcgaagataacacaagttgagcttgctcaaaaaatgggagttaaaaaacaagaaattacccgactttttaatctgcggcattcaaccaaaattgatactattaatcaagccattatagctatgggaaaaaatttgaatatttcgttatcatag

SEQ ID NO: 313555 - DNA, 156 bp, Proteus mirabilis
atgaaagataagagtatctgcaaagaattaagagataaagcaaaagatagatataatatctgtgttggcattgagatggggatttataaaatagaagattattggaaaatagctgctgacacaccagaaaaaaaagaagcaaaagaaacctcataa

SEQ ID NO: 313556 - DNA, 198 bp, Proteus mirabilis
atggcaatgaataacactaaattaaaagaatcagcctgtgatgaattaatttatgcgacttctattttaaacatcattatcaacgacaatgtaatgcctagcgataatatgtttaatgcgattgaatctgcagtagccaatatagaaagagctaaaggacatatctctcaattaaatattggagaatctcatgaataa

SEQ ID NO: 313557 - DNA, 435 bp, Proteus mirabilis
  misc_feature (404)..(413): n is a, c, g, or t
atgcttactattacggcactactagaaaataagacaagcgatcccgcccttagccattatccaggcctttcactgctattagaagacactgaaagcgaaagtaaaattttatttgatactggtaaagatctcacttttatcaataatgctaaaaaaatggcgattgatttgacatcattaacgacaattgttatttcccatgggcactatgatcattttggtggattaactcatttaaatgaggatttctttattactaagccacatattattgcccatcctgatttattttcagtacgttattcagcactttttatggggcgccagtctattaaatttaagcgccttactccattttttaaccgacagcagctagaacagccgtttccatttcagttaacagnnnnnnnnnncagcagttttcatttcagttaa

SEQ ID NO: 313558 - DNA, 318 bp, Proteus mirabilis
  misc_feature (302)..(311): n is a, c, g, or t
atgaaaagtctatttatcgaaataggttattcaattgaatataaagtcttatctgcaaatgaatacggtgttcttcaaaaccgaaaacgaataattctagtaggtaaacggggacatcgcagtaaaaaatctttttaccctgagattgaaaaatggactcctgaagcaacagtttgggatctactcaaagatcttcctaaagtaaatgctggtggaggtaaatcctctccattagaaccgatctctgaaccgtctcaatggctgaaagatgctcagatatcaactgagcttcctttaacttnnnnnnnnnnctgttaa

SEQ ID NO: 313559 - DNA, 264 bp, Proteus mirabilis
gtggttgctggggatttggccgcctgccatactatagttgcacatatatctaaagatggacatcattatatccatcctgatataaatcagaatcgttcattgactcctagagaagcggcaagaattcaaagtttccctgatgattattattttgaaaatgtttcaggaaaaccagcacgtacaactgcctttaaacaaattggaaatgcagtacctgttttacttgcacaaaaaattgcagaacatttattaaggaattggtaa

SEQ ID NO: 313560 - DNA, 420 bp, Proteus mirabilis
atgtattattttagtgcaaaagaaaattcattttatccagaggaaattaaagatatttatatatcaacaggctctttccccggcgatgttattttagttgatgactccgtttttaatgagttcgccgctaatttaccaccagaaggtaaaatgaggggagtaaaagatggttttcctgtatggattgatatcccaccactagcgcagtctgagttatcaagtattgcagagcaatgtaaaattaagttaatcaatgaagtaacaaatattattgctccaatggctgacgccttaaatggcggatatattgatgataaagatattagacgactggataaatggcaacgctatcggtatgagttaaccaagattaatatatcattagcacctgatattgaatggccacaaaaacctgagtag

SEQ ID NO: 313561 - DNA, 258 bp, Proteus mirabilis
atgaaactgaaaagtagcattaatgattatacagaagctgaatttaaacaatttattgaagctataattaattgtgaaggtgacgaaaaaacacaagatgataatttagaacattttattaaaatcactgagcatcctgaaggttcggatctgatttattatccagaaggcaataatgatgggagtgctactgctattattaaagaagttaaagaatggcgggctaaaaatggtaagcctggatttaaaaaaggttag

SEQ ID NO: 313562 - DNA, 2520 bp, Proteus mirabilis; identical to SEQ ID NO: 4900

SEQ ID NO: 313563 - DNA, 648 bp, Proteus mirabilis; identical to SEQ ID NO: 113263

SEQ ID NO: 313564 - DNA, 720 bp, Proteus mirabilis; identical to SEQ ID NO: 4899

SEQ ID NO: 313565 - DNA, 582 bp, Proteus mirabilis; identical to SEQ ID NO: 4898

SEQ ID NO: 313566 - DNA, 537 bp, Proteus mirabilis; identical to SEQ ID NO: 4897

SEQ ID NO: 313567 - DNA, 522 bp, Proteus mirabilis; identical to SEQ ID NO: 4896

SEQ ID NO: 313568 - DNA, 501 bp, Proteus mirabilis; identical to SEQ ID NO: 4895

SEQ ID NO: 313569 - DNA, 1011 bp, Proteus mirabilis
atgaaaaaatggttcccagctttgttattttccttgtgtgtgtctggtgagtcctctgcatggaataatattgtcttttactcccttggaaacgttaactcttatcagggagggaatgtggtgattactcaaaggccacaatttataacttcgtggcgcccgggcattgctacggtaacctggaatcagtgtaatggtcctgggtttgctgatggttcctgggcttactacagggagtatattgcgtgggtagtattccccaaaaaggttatgaccaaaaatggatatcccttatttattgaggttcataataaaggtagctggagtgaggagaatactggtgacaatgacagctatttttttctcaaggggtataagtgggatgagcgggcctttgatgcaggtaatttgtgtcagaaaccaggagaaacaacccgtctgactgagaaatttgacgatattatttttaaagtcgccctacctgcagatcttcctttaggggattattctgttacaattccatacacttccggcatgcagcgtcatttcgcgagttacttgggagcccgttttaaaatcccatacaatgtggccaaaactctcccaagagagaatgaaatgttattcttatttaagaatatcggcggatgccgtccttctgcacagtctctggaaataaagcatggtgatctgtctattaatagcgctaataatcattatgcggctcagactctttctgtgtcttgcgatgtgcctgcaaatattcgttttatgctgttaagaaatacaactccgacatacagccatggtaagaaattttcggttggtctggggcatggctgggactccattgtttcggttaacggggtggacacaggagagacaacgatgagatggtacaaagcaggtacacaaaacctgaccatcggcagtcgcctctatggtgaatcttcaaagatacaaccaggagtactatctggttcagcaacgctgctcatgatattgccataa

SEQ ID NO: 313570 - DNA, 747 bp, Proteus mirabilis; identical to SEQ ID NO: 9873

SEQ ID NO: 313571 - DNA, 1500 bp, Proteus mirabilis
atgaatatcagaaaactgttttgtccgggcaatacaccccggattttattgtttttattcttttttgttgtttctgtcataaccacaattgcatgcggatacactgagaagaatgccaccgggaatgtgttgctgctgttccttcttctgctccttgcacacagaaataccctcacatccattacagcgctgttatttctgttctgttgtgcactgtatgcgcctgccggtatgacgtacggtaaaatcaacaacagttttattgtcgcgttgttgcagaccacaactgatgaggcagcggagtttaccgggatgattcctgtttatcattttctggtcagtgccgcgattcaggtattcatggtgattttctggcgaacacaccgccgtggtcaccgtaactggctggcactgctgctgttcgtattatgctcagtaaacagctggccgttgcggatggttaaaggaactgttgtggggacaactgacacattgcgtgaaatgcagcgttataaacaactgaatcagcacggggctgacaactggaaaatcctgccgggtgtaccgttgtatgacacgattgttatcgttactggtgagagtgtgcgcagggattatatgtcggtatatggctatcccgtgccaaccacgccgtggctgaatacagctcccggtttatttattgacggctatacatcggcagcagccagtaccgtaccttccctgagccggacactgatttatgactatgagcagaaccctgactccggcaacaacgtggtggcgctggcagcaaaagcaggatacagcacatggtggatatccaatcagggaaaactgggggagcatgatacacgcatctctgttattgcttctgatgcggagcataccgttttcctcaagaaaggcagctttgcttcccgtaaaacggatgacatgttgttgttacaggaaacagaacgtgcactggcggataaatcctctccgaaggtgatattcctgcacatgatggggtctcatccgaacccgtgtgaccggcttcactcctggccgaatcattacctggagcagtatccccgaaaggttgcctgttacctcgccagcatcagtaaactggataactttctcggtcagcttgatggtatccttcgccggcattcccgtcatttcgccatgctttacttttctgaccatggtctgtcggtcagcgacagcgctaatcctgttcatcatgatggtcatgtgcagggaggctacagcgttcccctgattattaccgccagtgacatcacgtctcatcagtccgtcagcagaaaaatcagtgcccgtcatttcgcaggtatttttcagtggctgaccggcattcgtactgaaaatataccgccattcaatccgctgacagacgaagataatgaacccgttatggtttttaacggggagaggaatgtaccggcagacagtctgaaaccgcagcctctgattcttccggacagaagataa

SEQ ID NO: 313572 - DNA, 3516 bp, Proteus mirabilis; identical to SEQ ID NO: 4891

SEQ ID NO: 313573 - DNA, 852 bp, Proteus mirabilis
gtgaacttaaatcatattggtgggatattattggtaactttattatcaggatgtactacacaacctgcgacaactactaataagcaggttgataaattcatatatgacattgatgataaatttaatattaacgagcaagataaaaaatattttgttcctaaaaagcaagcgcatatattagaaactgttgaggagattaaaaatgcaaactgctcttattatatgaattccacaggcatcattgatataccaattgataatgtaaaagtaacgccatcttcatttaaaaaaggattattgtttgataatagttatacagagtgctcacttagacaagattatagaaataaagattttttcaaaatagagatgtctgagagagctttagttaatggagtaaaggttacgattagacatagctcggacgatggaacttttatagtaggaggcgggattgggtatggagatcataaaacatgggtaggtcattgtagcaaagatgctatgacagataatgtaagctgtgtagcttctaatggtaatttcatgattatgaaaattggggggaaatacacatcagcaattgttggtgatatatatccaggggaaaaaagctatattagaattgacggtgaaaagccacactcatcaattatagttaatcaagttaattattttgataatttagaaactaaaaaaataatgaaagaaatggagagccatagcttaaggaataaagcaataactcaatatattagttggcctgaaagaagaaaagtcaatgaagatatagatatttcatatataagcgtggttaaagaagtcttagacacagtttatgataatttttag

SEQ ID NO: 313574 - DNA, 1743 bp, Proteus mirabilis; identical to SEQ ID NO: 306052

SEQ ID NO: 313575 - DNA, 627 bp, Proteus mirabilis
ttgcaacataaagcttatcatcctgagcatgccgtaatcggcagcacaacgccattagaaatttctgctaatcatgccgtcaatgggcattctatccgtgagatcccagaaaatatgcaaattgcttattttgccatgggctgcttttggggcgttgaacgcctattttggcaacaacccggtgtttatagcacaagtgccggttatagcggtggtgtaacagaaaatcccacctatgagcaagtttgccaaggccgtacaggtcatgcagaggtcgttcgtgtggtatttgatccgacccttatcagctatcaacaattattggctattttttgggagaatcatgacccttcccaaggtatgcgccaaggtaatgatattggtagccaatatcgctcggccatttataccctaaccccagagcaatatgcacaagctattgagtcaaaacaacgttatcaacaagctatcaatagtgaaggggcacataaagagatcaccactgaaatacaacctgccggacctttctattttgctgaagattatcatcagcaatacctatttaaaaaccctcaaggttattgtggacttggtggcattggtatctgttttccaccggcaaactaa

SEQ ID NO: 313576 - DNA, 561 bp, Proteus mirabilis
atgcacaaaataaccttggctgcacttttgcttagcacatctacatgggtatttgcccataatattactgaagaaactctcctaccggcgatctctgtgagtgacaaaggggagcttctttatgatggtgccaaagataaatttagctatcaaaattggaatagcggactacttagtggcaaagtacgcacaattcaacatatcgctggacgcagtaaggctaaagagatgaatgcgccactgattgaagccaccaaacaagccaaatttccacaaaatagttatcagacaaccactatcatcaatactgatgatgctatctttggtactgggccttttgttcgcggcagtgttgaagacagtaaaaaagagtttccttggtcacaatttattgttgatgctgatggtgtagcgcaaaaaggttggggactagaaaaagagagttcagcaattattgtgcttgataaacaaggaaaagttcgttttgtcaaagaaggtgtattaagtggtgcagaaataacttccgccattaaccttatcaatgacttaattaaagaatag

SEQ ID NO: 313577 - DNA, 225 bp, Proteus mirabilis
atgagtaaaaagtatgaatatattgctaataattttacacatgcaaataaggcaatcactgtttgtgtatctgtagcgcctagtaattttagctcaatgccaatttttacttttcctgtgtcagttgagaaaaaagatggtgaagatattgaatactacagagttgtggcaatcatgaaagcaaaggatattataattgacattgcaaaagaggcggctaattaa

SEQ ID NO: 313578 - DNA, 285 bp, Proteus mirabilis
atgcataacgagctattgaatataaaacaaaagttggcattgcttgagcgccaaatgaatataaataccgcagctagtaattttgttataagacatttggtcgatgtccttactgaaaaattaccaaacgaaaatatcattggcacattacaggaaaaacttgagcatgatattggaagagttaatgttttaggaactagcggtgtaaagaaagctattaataatttactccaaactccagtgcaggaagctttcaaacaaaaagaagctccttttattaaataa

SEQ ID NO: 313579 - DNA, 324 bp, Proteus mirabilis
atgaaagagattttagcagcatcagaagagcaaactcgtggcattgctcagattagccttgcagttaatgaaatggataaagcgacacaacaaaatgccgcgatggtggaacaatctacagctgcttcagcaacactaagtgaacaagcctcaatgttagatatgattgtaaataccttcaaggtagaacaagtcgcggttacatcaccacgatcaccaacattctcggctaagccagctgaaccggaaataacaaaaacagcaacgacatccacaataaaatcccatcatcatgaagccgatgacaattgggaaagtttttaa

SEQ ID NO: 313580 - DNA, 177 bp, Proteus mirabilis; identical to SEQ ID NO: 4925

SEQ ID NO: 313581 - DNA, 885 bp, Proteus mirabilis; identical to SEQ ID NO: 8055

SEQ ID NO: 313582 - DNA, 963 bp, Proteus mirabilis
atgacggcacaacaaagtgatgcgctgcgtgagattgctaataaggccagagttaccaccattcttcagtgtaaggcctggaaagatacccagcgaatactgaagcgcagcggactcgtgtgcagagaacggtcagagccgtttgatccggagaaacattttgactgttatacggtgcgttatctgtacctgcttaacataatggcacttgagctaaagtcagatacacggattaaggttgaggtggggcaatggtatcgcatgacgggtaaacgtttatcacttaatgtcccgccttttatgctgatcccgcgtaatatccggagaaaagtggacggattcagacaatccagacaatcagaagatgaagcaaccaaaaatccgcctcaaccgttcacgggcagtttgtataaggttttgagcagggacagcgattcggctgagctggacgcctggtttgctgaaccgccgctgacacggcaggaagtgtgggaggggaggcgtgttacagattttgatccatgggcgctgtcttcgtttatttgccgttcagaatccccgacgtttgaacttttttaccaggaatataagcgactgggattaaaatctctttttgtatcaggggtaatgtttgaacagtttttaacagggctaagtttcagaaaatatggggactgggttgaatctcagttactggaatcactgggaaatgtgatgtttttcatgctgctttatgacatggaaaatctggataagtttataaaagaactgatggacattaatgttcaaagtgaagattcgaaggaaaaagggaaatcacgaaaagagagaatgctggagtatatcaactcatatatccgcaatgtttatggaagattcctttgtacgtcaaaagaaaggtacgaacagcataaacgcaaaaacagcagcaaaaagaaaaacggttctggtggaactcattaa

SEQ ID NO: 313583 - DNA, 855 bp, Proteus mirabilis
atgtctgtgcattcaccagatgaatctgatcatgtttttagtcggatggaatatgaatattaccgacataacgataaatcaccttctgttaatgctgataatgcaggcagagacgttgttccggagtgggtgcaaaaagaccctgtagccgcattctgggtatggatgtttatatatcatgtccctgacagtattgtccgactctcaggtgagcaatatgcagattacggaacttcctgtctgtatgccagactgtttgccacagaagcagctccagctaatcatcaggcaaggattcgtgtgacgagaaaatggctacaggagcttataaggctaaccgggacagaaaatgtatctgacttcttgtatgtcgttcattttttatggtcatatgctgaaaaagtgaaccccatgacatggcttggttcccggcggatacatatcaaatgggcatgggcgtatctgcaaaaacattgcactgacgaagaacgtcactgtcctgatatttcagaatttaaagcttcaggggagtcacgtctgttcataatagcttatgtgcgccgtgtcttcatgaaaatctattctgtcggtactgaacctcaaaagttaaaagaattagtttatcagcagaatgattttctcaggcgcatgaagtgctcataccagaaaatgttccggtatgagaaaaccgattcccgggtacagataagtgccctgatttctccggaagccaggaatgcactccggaaaatggcaaaaaagaataatctgacgcaggctgaaatgctggataaactcatcttatcagctgatcgtctgtttatgcagaaaacagcaggggattattcccgttaa

SEQ ID NO: 313584 - DNA, 732 bp, Proteus mirabilis
atgaatcaaccaatacacaatgcttactggttatcccgttttgacagccttctcgacagtgccctggcgcagcaccgtgccgtctcgttaatccgggtggatttacgtttccctgagtatatgcctgtcaccatcatggatcccgatccggattcagcggtgatttctcgtttttttgcatccctgaaagccaaaattcaggcttaccagcggaaaaaaagatgtgccaatcagcgtgtgcatgcaaccagcctgcgttatttctggtgccgggagttcggcaagatgtatggcaggaaacattatcacgtgatattactgctcaacaaagatacctggtgctcgctcggggatttcagcgaaccgtcttcgctggcgacgatgatccaggaggcatggtgcagcgccctgcatcttgagccctggcaaggcgatggcctggtccatttttccaggtggacgccttcccgtaaaccagcatcgtctgatgttcgcccttcttccgatgacacgcctttgtcgggtggatgttctgatacctggaaggcttcagacaaaaagtctggtgaagccgctgttctctggatcaagcgtggtgatgtggaagcgatgcagaaagcccggaacagagccagttatctcgtgaaatatgagacgaagcagcatgacggttccgggcaacgtaattatggttgcagtcgtgggccggggcgtttgctggatggcaggtga

SEQ ID NO: 313585 - DNA, 453 bp, Proteus mirabilis
atgaacgttattgacagccgcattcgtgatgtgaaatttggtgaaaatgtgaaagtcgtcatgccagtaaacctctatgaatgtgaactgggggatgatgtttttatcggtccctttgtggaaatacagaagggatgtatcattggcaaccggagccgaattcagtcccacagtttcatctgtgagaacgtcattttaggtgatggctgtttcatcggtcatggcgtaacttttgctaatgatctttttaagtgtggtggtcccgatgcctctgcagaaagctggatacgcatcgtattaggtaacactgtaacagtgggtagcggagcgaccattttaagcacagaaatttgcagtggagcagtgattggtgctggtagtgtggttacaaagcccgtgctggtaaaaggcgtgtatgccggtaatccagccagacttttgagaacactttaa

SEQ ID NO: 313586 - DNA, 2049 bp, Proteus mirabilis
atgaagaacaaatatatcattgctccgggcattgccgtgatgtgttctgcagttatatcatcaggttatgccagttctgataaaaaagaagatacgcttgttgttactgcctccgggttcactcagcagctcagaaatgccccggccagtgtctcagtcattacttcagaacaactgcaaaaaaaaccggtttcagatctggtcgatgcagtaaaagatgttgaagggattagtatcactggtgggaatgaaaaaccggatatcagtatacgtggtctaagtggcgattacacgctgattctggtcgatggacgacgtcagagcggtcgggaatccagaccaaacggcagcggcggttttgaagccggatttatccctcctgtggaagcaattgaacgcattgaagtgatccgtggccctatgtcttccctgtatggttctgatgccatcggaggggtcattaatatcataaccaaaccagttaataaccaaacatgggatggcgtacttggacttggggggattattcaggaacatgggaaatttggtaactcaaccacaaatgacttctatctgtcaggcccattgattaaggataaacttggtcttcagctatatggaggaatgaactatcgcaaggaagatagtatctctcagggaacaccggcaaaagataataagaatataacggcaacgctccagtttactccgactgaaagccagaagtttgtttttgaatatggaaaaaataaccaggtgcatacattaacacctggtgagtctctcgatgcctggactatgcggggaaatcttaaacaaccaaacagtaaaagagaaacgcataattcacgtagtcactgggtagcagcatggaatgcccagggcgaaatactgcatcctgaaattgctgtttatcaggagaaagttattcgtgagattaaatcaggtaaaaaagataaatataatcattgggatcttaattacgagtcaagaaaaccggaaataaccaacacaatcatagatgcaaaagtgacggcatttctgccggaaaatgtactgaccatcggaggtcaatttcagcatgcagagctccgtgatgactcagccacgggtaaaaaaacgacagaaacacagtctgtttcaattaaacagaaagctgtttttatagaaaatgaatatgcagcaacggattctctcgccctgactggaggactgcgtctcgataatcatgaaatctatggcagttactggaatccaagattgtacgctgtttataacctgaccgataatctcacactcaaaggggggatcgcaaaagcatttcgggctccttcaattcgtgaggtgagtcctggatttggaacactgacgcagggtggtgcctctattatgtatggaaacagggacctgaaaccggagaccagtgtaaccgaagagatcggtattatttatagtaatgatagtggtttttcggcgagcgcgacgctgtttaatactgattttaaaaataagttgaccagttacgatataggtacaaaagatccagtcaccgggttaaacacttttatttatgataatgtaggtgaggcaaatatcagaggggtggagcttgcaactcagattcctgtgtatgataaatggcatgtatctgcaaactatacatttactgactctcgtcgaaaaagtgatgacgaaagtctcaatggcaagtcgctgaaaggggaacctctggaaagaactcccagacatgcagccaatgcaaaactggaatgggattacactcaggatattacattttattcatctctgaattatacgggaaaacaaatctgggcagcacaaagaaatggtgctaaggttccccgcgttcgtaatggattcacatctatggatattggtctaaattaccagattctgccagacacgctgattaattttgccgttcttaacgtcacagacagaaagagcgaggatatcgataccattgatggtaactggcaggtcgatgaaggacgccgttattgggctaatgtaagagtatccttctga

SEQ ID NO: 313587 - DNA, 771 bp, Proteus mirabilis
gtgaagaagcaccagaccacgctgtctgatgagctcgagcgcaagatcattcgcctgttcgcgctggggatgagctaccaggatatcagccgggagatcgaagatttatatgccttcagtgtttccacggctaccatcagtgcggttaccgataaagtcattcctgagttaaaacagtggcagcagcgcccgctggaaaaggtttatcccttcgtctggctggacgccattcactataaaatccgcgaagatgggtgttatcagagcaaggcagtttataccttactggcgctgaatctggaaggcaaaaaagaagtcctgggcctgtatttgtcggaaagcgaaggcgctaacttctggctgtcagtattaagtgatctgcaaaaccgtggcgttgaagacattctgattgcctgcgtggatgggctgaccggcttccctgaagcgataaacagcatttatccgcagacagaggtacagttgtgcgtcattcaccagatacgtaactcgattaaatatgtggcatcaaaacaccataaagcgttcatggccgacctgaagccagtgtatcgtgcggtgtcggaaacggcgctggatgagctggaagcgaaacgggggcagcaatatccggtggtgctccagtcctggcgccgcaagagggaaaatctgtcagcgtacttccgctatccggcgaatatccgcaaggtgatctacacaaccaacgcgatagaatcagtccaccgccagttcaggaaactgaccaaaacctaa

SEQ ID NO: 313588 - DNA, 219 bp, Proteus mirabilis
atggccagatgtacagtggtgcgcctcatggcggttatgggacttgccggtgttctccggggtaaaaaggtccgcactaccgtcagccggaaaaccgttgccgcaggtgaccgcgtaaaccgtcagttcgtggcagaacgtcctgaccagctgtgggtggctgattttacttacgtcagcacatggcagggcttcgtctatagtggcgttcatcattga

SEQ ID NO: 313589 - DNA, 567 bp, Proteus mirabilis
atgcctaaatcttacacaccaaactggttttttaccgctttacttgacaatcacatcaatcaaatgatggcacgctattcctgcctgcgggccttacggatggatttcttctacaggaaggatacgcctgatttcttacaacctgatcatcgttggcttgaattacaactgcgtatgctgctggagcaggttgaacagtttgaaaatatggttggcttcttctgggtgattgaatggacggttgatcatggttttcatgcgcatgtggtcttctggctcgatcgtcagagggttaaaaaaatatatccctttgcggagcggattacggaatgctggcggtctattacgcataacagcggttcggcacaccgctgtacatatcagccgcattatacatacaacatcaacattcctgtgcgccacaacgatcctgaaagcatcgataatattcgcggtgccctgcattatctggcaaaagaagagcaaaaagacgggctgtgtgcctacggctgcaatgaagttcctgaacgtcctgctgcagggcgtcctcgtaagcctcacttctga

SEQ ID NO: 313590 - DNA, 573 bp, Proteus mirabilis
atgaatgctatcccttatttcgactatagcctggcccccttctggccatcttatcagaacaaaatcatcggcgttctcaaccgtgtgttgcgcgagcagtcctgctcccgaatacggcggatcctgcttcgtctgccgggggaacatggcaacatcttcagcgacagaaaaacctggttcggtatggcctttatcgaaaccgtcagtgcgctgatgaatgcaacacccggacgtgacctctgctggctcctgacacgtcatcctgaaaaaccggaataccacgtggtgctgtgcgtcagacaggagtatttcgacggccctgaactggatcggctgattctggatgcctggagcaacgtactgggcttcccatcaccgggtgaagcagcaccgtaccagaagcagatcacccgggatgtggtgctggacagttgttcaccggactgcgaagagagactcaaagagctgatatgggcgttcagtgatttcgcccgcgatcgtcgtggtgtgcgcgatccggaagcccgttacctcgccggtaatccctggtatcccgtagcaggccagctctga

SEQ ID NO: 313591 - DNA, 237 bp, Proteus mirabilis; identical to SEQ ID NO: 19887

SEQ ID NO: 313592 - DNA, 549 bp, Proteus mirabilis
gtgcaaataaccaaagccttaatttcagagccgggagacatccggcgttttgttcagcaggcggtggaccactggccaaatctgttggcatttcacttcacgctctattcggcagaaggaaacatcaacgggcaacagattcatgcattctgtacttccttttaccgacaggtgcacgaacgtattactgagcgtaatcacacggccagcccatcctcgccggtggtattacgctggttgcgggaacaacatggaggagcaacaatacgatgcctgttgctgttcagccaggagcttttctgccatccgcgagccagtgtgacagttgatgaagaatgttcacaactggtggatttactacaacagacttggcaggtgataagcgctggcggacaatgccgggtggaaaagcgttttcaggtcgtccggggtgatacatctggccagtatgttgcgttaaaaacagtcgcattgtctctggggttaccggttgtgatcgccattacccatcgtccggtacagcgctgtacattgattacagctcagtga

SEQ ID NO: 313593 - DNA, 192 bp, Proteus mirabilis; identical to SEQ ID NO: 19886

SEQ ID NO: 313594 - DNA, 675 bp, Proteus mirabilis
atggattatacgctcacccgcatagatccgaacggtgagaatgaccgttatcccctgcaatcacaggaaattgtcagtgacccgttagatgctcacgttcatcgcagcgtgtatatgggaaaactggaacatgcgttacatgacgttgtgaactggggcagaaaaaactctttatggccatataattttggtctttcctgttgttacgttgaaatggtgacgtcatttactgcggtccatgacgtagcgcgttttggttctgaagtattacgagcttcccctcgtcaagctgactttatggtggttgcaggaacctgctttacaaagatggcgcccgttattcagcgtttatacgatcagatgctagagcctaagtgggttatttccatgggagcttgctctaactctggtggtatgtatgacatctattcggtagtgcaaggtgtcgataaattcatccctgttgatgtgtatatcccaggatgcccacctcgtccagaagcttatatgcaagcattgatgttattacaagagtccattggtaaagaacgtcgcccattatcttgggtggtgggcgaccaaggcgtttaccgtgccaatatgcagtcagaacgagaaagaaaacacggtgagcggatcgcagtaaaaaatctgcgtactccagacgaaatttaa

SEQ ID NO: 313595 - DNA, 936 bp, Proteus mirabilis
atgcaaaatcgcattccttatcgcatttcgggtgaaacctcgtttttttcccgtgaagagatcaaggatattttggcttacttaagagtgatcactaatccggatgatgatgctgcattcttacgtatcgtcaataagcctcgtcgtgaaataggcccgatgactatccaaaagttgggggagtgggctaaagtccgtgataaaagcttatttaatgcctgttttgacttgggattaagccaaacgttaacagggcgaggtttaagtgcattacaggctttttcacagtggatggcgcgaattgtacaacaatcagagcgtgagcctttgcttgctgtacgtgatttgcttcatgaaatggattatgaaagttggttatatgaaacctctagtagcgcgaaagcggctgaaatgagaatgaaaaatattaaccagcttttttcttggatgagtgaaatgcttgagggggatgagttacatgaacccatgacgctctctcaagtggtcaaccgttttactctgcgcgatatgatggagcgtggcgaaaccgatgaagagttagatcaagtgcaattaatgacgcttcacgcctcaaaaggactggaatttccacatgtttttctggttggcatggaagaggggatcttgcctcatcaaagtagtatcgatgaagataacgttgaagaagagcggcgtttagcttatgtcggtattactcgagcacaaaagacattaactttcacattatgtaaagagcggcgtcaatacggtgaattaattcgtccagagcccagtcgttttctatatgaattgcctcaagacgatctccattgggataccaataaaaagaaagtgttaagtgctcaagaaaagcaagaaaaagggcaaaaaggggtcgctgggcttaaagcgatgttggcgagacataaaccttag

SEQ ID NO: 313596 - DNA, 135 bp, Proteus mirabilis
atgaaacatataaatgatttttttcaggctttagtgaatttagataccgcaatctggaatctaatttacctattggtaaaaggtgcattctgggtatttgtactttatatcgctgtgagtatagcgtggctataa

SEQ ID NO: 313597 - DNA, 678 bp, Proteus mirabilis; identical to SEQ ID NO: 4927

SEQ ID NO: 313598 - DNA, 234 bp, Proteus mirabilis; identical to SEQ ID NO: 4928

SEQ ID NO: 313599 - DNA, 486 bp, Proteus mirabilis
atgaaaactgtttctcagaacacctgtacactttctgcttccgtagtcacagcttcagagaatgaccagcctcaactggttgccactctcgttcctcatgaacagcgcatcagcttctggccgcagcattttggcctcattccacagtgggtgaccctggaaccccgtgtcttcggctggatggaccatctttgcgaagactactgcggtggtatctggaatctgtacaccctgaacaacggcggggcatttatggcacccgaaccggatgacgatgatgacgagacatgggtactgttcaatgccatgaacggtaaccgtgctgaaatgagcccggaagccgccggcattgctgcctgtctgatgacgtacagtcatcatgcctgtcgcacggagtgttatgccatgacggttcattattaccgtctgcgggactacgccctgcagcatccggaatgcaacgccattatgcgcatcattgactga

SEQ ID NO: 313600 - DNA, 846 bp, Proteus mirabilis
atgtcagacatcacaatctcccgtccggaagtggtcaccgggcatacggacgttatctgctccaccagtatccgacacgttgtgacggtacggaatgcagcactgcaacaaaccgaaacgcttatccggcaactggcagaaatctcagtgctgacagcaggcattggcggcaaaaccgccctggactgggcgatgaaacagaattttcgctgtggctgctggctgatggaaaaaccggaagcagcaatgaaagccatcacccgcaatctcgatcgagaaatctggcgtgacctgatgcaacgttcagggatgctttccttaatggatgcacaggcccgtgatacatggtaccgatcactggaatatgataattttccggaaatcagtgaagcgaacattctgagcacatttgaacaactgcaccagaacatagatgaagtgtttgagcgaggggtgatcaacgtcttcaggggactgaactggaattacaaaactaattgcccctgtaaatttggcagtaaaattatcgtcaacaatctggtgagatgggaccggtggggatttcatcttatcaccgggcaacaggcagatcgacttgccgacctggaaagaatgctgtatttgttcagcggcaaaccgattcctgacaaccgggaaaacataaccattcatctggatgatcacatccactcagttcagggtaaagcgtgctatgaagatgagatgttcagcatcagatactttaagaagggctccgcgcacatcacgttcaggaaaccagagctggttgacagactgaatgatattattgcgaaatactatccggaaaccttatcgcccgtttaa

SEQ ID NO: 313601 - DNA, 414 bp, Proteus mirabilis
gtggaatttagtgaagacgttaatatattaaaagaacagattactatcacttcacttggcgcagtaaaaatcaatgaaagcactgctgatttaattgcatgtaatgatagtgatagtgatagtgataaagttctagttaatccaattattatgtatagcaaccacgaaattaaggaggctatgtctcaacgttacatcatgagtgatgaaatggctctaattattgaagaaacaaatcagttaattaatgaaatagataaattcatatcaatacaaataatagatcactttagtagagatgacttacttttagatatcaaatctagtaccttatctgaaacaaaaaaaggtggcaggtttgactacaccacaaaactcaatgagcttcatgaaagagtttcaaccctgcactag

SEQ ID NO: 313602 - DNA, 297 bp, Proteus mirabilis
  misc_feature (269)..(278): n is a, c, g, or t
gtgtcaacatttgaaaaaatcaataaagtatcagtcgttattcccgtttataacgaggaagagagtctcccacagcttttagagcgaacaatcaaaagctgtaaacagttagaacaagagtatgagctgatccttgttgatgacggaagtagcgataattcagcaaaaatgctagaagaagctgccaacattgaagataaccatgttattgcgattattttaaatcgcaactatggtcaacactccgctattatggcggggttttaccnnnnnnnnnnctattatggcgggttttaa

SEQ ID NO: 313603 - DNA, 156 bp, Proteus mirabilis
atgaaaactaactattacagcgctatgcgtgattgcatggcggtgcgcatcactacgcctcaagcacgtaaaaataagcgtacaagcccatggttattcagtttggctgtggtcattgtgacaacagtcggcgtaataccgacatttgtaagttga

SEQ ID NO: 313604 - DNA, 264 bp, Proteus mirabilis
atgaaaatttcatacagctactcgaacggaacacgggtagtagacggcaagacagtcatggaatttgacgacaatagcaaacttagtgttgaggcaggaagtttcgctaagctggctaaattaacggaaattgacccaattgaggcaatggaatatgtgctcgattgtgacgatgaatcgcttgaacggactatcaatgcgattggcaaggacgcctttattaacaggatattacgtgtttctaagctaaggagggttgcgtga

SEQ ID NO: 313605 - DNA, 369 bp, Proteus mirabilis
atgaataaatacaccgaactatctgactttgagattaatttagctgttgctcacattgcacttggcaagggtagctatgattggtgccctgataaaaaagaggtttactttgcaggtattgatggtggtgaatttttacatcatggatacttcgacccatgcaacaatccagccgacgcaatgccgattattattgagaatgaaatatctttaatttttgatactgggtgtaaagagtgggctgctggagatgcttactgggtagatggctatgagtggcaagtaggtggcgcagtgagaaaaaataacccactacgcgcagctatggaagtgttcttaatgatgaaggatgcggagaatgaaggctga

SEQ ID NO: 313606 - DNA, 2445 bp, Proteus mirabilis
atgaaaaacatcaaagagatgacgttactttccacccccctatctcgccgacgctttgtcaaagtgggagccgctggtggattagttgcaacggcaggtggattatctctcccctttagccaagccatggcttcggagcaaacagcgccgacatctaccaataaagaaaaagtcgtctggagtgcatgtaccgtcaattgcggtagtcgttgtccattgcgtatgcatgtcgttgatggcgaaattaagtacgttgaaacagacaataccggcaatgacgtttacgacgagttccatcaagtacgggcttgcttacgtggtcgctctatgcgtcggcgtgtttataatccagatcgcttacgttatcccatgaaacgcgtaggtaaacgtggtgaaggtaaatttgaacgtatctcttgggatgaagcctttgatactatttccgacaccatgaaacgcctgataaaagattatggcaatgaatctatttatctaaattacggtacaggcaccctcggtggcaccatgacaaaatcttggccaccaggagcaacccttattgcccgtttaatgaattgctgtggtggttatctcaaccattatggcgattatagtactgcgcagatcgctgcaggcttaaattacacctacgggggatgggctgacggcaatagtccttcagacatcgaaaatactaaattggttgttatgtttggtaataatcccggcgaaacacgtatgagtggcggtggtgtaacttattatgttgagcaagctcgtgaaaaatcagatgctcgcatgataattattgatcctcgctatactgatacgggtgcaggtcgtgaggatgagtggatccccattcgtccaggtactgatgcagccttagttaatgcgttagcttatgtcatgatcaaagaagatttagtcgataaacccttcttagataaatactgcgtaggttacgacgaaactacgatgccagaaggggcacctaaaaacgcccactataaagcctatattttaggtgatggcgcagatggtcaacccaaaaccccagaatgggcagcacaaattaccggcattcccgcggcacgtattgtcaaattagcccgtgaaatcgccggtgctaagccggcttatattactcaaggttggggccctcaacgccgttcaaatggcgaattagcctctcgcgctattgcaatgctcgctatcttaacaggtaatgtgggaataaacgggggtaatactggtgcccgtgaaggctcttacagcattccttttgtccgtatgccaaccttaactaaccctgtcacgaccagtatttctatgtttatgtggacagatgccattttacgtggccctgaaatgaccgctacacgtgatggcgtgcgaggtaaagataaactggatgtacctattaaaatggtctggaactatgcggggaactgcttagttaaccaacattcagaaataaaccgtactcatgaaatcctacaagatgataaaaaatgcgaaatgattgtggttatcgataatcatatgaccgcatcggcaaaatatgcagatatcttactgccagattgcacggcatcagagcaaatggatttctgtatggatgcttctgcggggaatatggcttacgtgattttcgctgaccaagcgattaagccacgttttgaaagtcgcaatatctatgagatgaccagcgaaattgctaaacgtatgggggtgggtgagaaatttaccgaaaatcgtacccaagaagagtggttacgccatctttatgagcaatctcgtcaaaatttaccagaactgcctacctttgaagaatttcgggcacaaggtatctttaaaaaacgtgatccacaaggccatcatgtggcttaccgtgaatttcgcgctgatccactcaacaatccactgacaacgccgtcaggaaaaattgaaatttattcttcgcaattagcagaaattaaagcgacatgggaattagcggcagacgatgtgattgatccactgccaatctactccgcaggttttgaaagctatggcgaccctgctatggataaatacccattacaaatgacgggttttcactataaagctcgtacccactcaacttatggcaacgtagatgtattaaaagcggcttgtccacaagaaatttggataaaccctgttgatgctacaaaacgtggtatcaaacacggcgatttagtccgtatttataacgatcgcggtgaagtacgtatcaaggctaaagtgacaccacgtattttgccgggcgttgtgggattaagtgaaggggcttggtataacccagacagtaaccgcattgatcatgcaggttgcattaacgtgttaacgacccaacgcccttcaccacttgctaagggtaatccttctcacagtaatcttgttgaagtcgtcaaggcgtaa

SEQ ID NO: 313607 - DNA, 651 bp, Proteus mirabilis; identical to SEQ ID NO: 307889

SEQ ID NO: 313608 - DNA, 540 bp, Proteus mirabilis
atgctccagccgcccgcattggagaaattcttcaaattcccgttgcacatagcccggcaattcctttccctgctctgccataagcgcagcgaatgccgggtaatactcgtcaacgatctgatagagaagggtttgctcgggtcggtggctctggtaacgaccagtatcccgatcccggctggccgtcctggccgccacatgaggcatgttccgcgtccttgcaatactgtgtttacatacagtctatcgcttagcggaaagttcttttaccctcagccgaaatgcctgccgttgctagacattgccagccagtgcccgtcactccctgtcgtctgggcgttcctctgggctaaacatcgacatgatccggcgcttaatatcgccgtccttgttgaccagcgtcttggtcacgaaggccgcgtattctttggcgttgtcgtaccctttccagacctcgtgggggtcaagagcgtaggcgcaaacccgcccagcgactgggattctgaccaaggcgcgttctgtctcaaggtggggttctag

SEQ ID NO: 313609 - DNA, 1074 bp, Proteus mirabilis
atgatcctcaataaaaaaaacattcattccaaatcagtaatgctattttgtgccggcattgtttctttaatgccattgcacgcaattgcttatttacaaggtgaagtgagaaccaatggtggccctaatattttctatgccgtattagatcacaccacctttcctaataacaaagcgggagaattagcaacagtaaacttttcgttgcctgatcgctatgatggcacggtatattgtcctaactcacgtatttatgatcgtgcattaacctattttaaagcaacgactgatttacctcctgttggtaataacttttatcaattaaatgagtatgttgatatcaaaattaattttgaaatttgggggcctaatcctttacccacagtgcccttttctgacatacctaataatagaaataaccaacaaggttgcagagtaccctcttcacctaaaccgcatatttcctcaggaagtagcggtcaactcactttccgtttaagaaaacccattattaatggtgtcagtcttaatgggcaatctcttgcacaaatgtatgccatggtaagtcacagcggtgcgccaaaaacctatggctcagagcccatttctaaattagtgatcacctcggggatcattaccactaaagataaatgtatctttaataatggttcaccaattacctttgactttggtaatgtgggaaatacctctgattatctcaatgggcaaaactacaaaattactcgcaacatccccatcaaatgcgaagggggaagttttaccgatcctaatagcagaataatgtttaaagttcagactggtagctcaggtattgcgagttttgattctaattaccttggtacaacaggctctgtagatagaagtaacttaggtatcgtcttaagagataagtcaggtacgattatcccacctaaccaatatttttcagttggcaaactcaataatttcaacggaaattgggaagtaagtgcagcccccatcgccaaagcgggcagtaaaattaccgaaggtgaattttcagctcatgcgacactcattgcggagtttatgtaa

SEQ ID NO: 313610 - DNA, 855 bp, Proteus mirabilis; identical to SEQ ID NO: 313583

SEQ ID NO: 313611 - DNA, 963 bp, Proteus mirabilis; identical to SEQ ID NO: 313582

SEQ ID NO: 313612 - DNA, 885 bp, Proteus mirabilis; identical to SEQ ID NO: 8055

SEQ ID NO: 313613 - DNA, 177 bp, Proteus mirabilis; identical to SEQ ID NO: 4925

SEQ ID NO: 313614 - DNA, 1326 bp, Proteus mirabilis; identical to SEQ ID NO: 312550

SEQ ID NO: 313615 - DNA, 999 bp, Proteus mirabilis
atggaagatgttatccgctctatatctactcaacgacttgaaatatacgaagattatttttcttgttcatctaaagctgaagcgttaggtatgtacttatggaatcaaagagtatcatctgaattttcttgtattattcaaataatagaaatttccctaagaaattcaatctataacgcatacattgaaaagaaatcaaacgatgaagaatggtttgttaaatattctaaagctttgcctaagtcggaggaaggtagaaggcaaatcgattatgtaatagaacagttatctcataaagctcagtatagcattaatgatgttatctctagacttccatttgggtattggacatcaatgtgtcggaatgatcacaatgagtcaatttctggatccttagagttatggccttcgctattgccattcgtttttaaaggaagaacaagtgaatcacaagatgatatatttcatctgattgttcaagttaataagtttagaaatcgaatctctcatcatgaagttatttggaaagatgttgttggctttggattggcttcgtcttttaataagatttttaatagcttttctatatgtttaaaactagcaagtattatagggattgataatcttaagattatagaaatatccaatagtatcaatagattaaaagagctttgtacagaagggaaagtggaggaatacaaaaaaatcatatctgattggagtagtatcaacccaaatattaataacgtttttgatgacgtgtatttgtgtactgaagttactggggtaataactagtataaaacctaacaagatcattattcagagcactagttgtttaactaaagatggaaaacaaattaaatttaaaattgataatagtgaaatgaattcattctcttcttgtgccaaatttactcccattaaattcacaccatatgtttatcgaaatcgtgtacgcggaaatttttatgtcgccaaaaatgtctctcttgtgtga

SEQ ID NO: 313616 - DNA, 897 bp, Proteus mirabilis
ttgactaatcacgcattagcgttatttaacgaacgtctccctcataaaccgtattattcagatgatttgcaatttggtgtgcgtattgccgccaaagatcgcgccattctcgccaaatatatccagtttaaccaacctcacgcccaattctggctgggatttgacgttgaccgtcagggggctgctttagactggagtgaccggaatgctccggctccaacctttaccattatgaacccgaaaaacggacatgctcatctgctttatgggctggaaaccgctattcgtaccgcaccggatggaagaataaaacccctcaaatacgcagcagcggttgagaatgcgttacgcaaaaaactggatgcagatatcggttactcagggttaatttgccaaaaccccaaccacgaacactggcaggtgaatgcgtggcaaacggaattgtatacgctggattggctcgctgattcgcttgatttaacctcagctaatgacaaagaaattatcactgattatggtttagggcgtaattgtcagttgtttgaacagactcgtaaatgggcttatagggctatccgtcagggctggcccgcttatgaacagtggctacaagcctgttttgagcgagctaaagcctataactttcaattcttaacgcctttagatgaaaaagaagtattaggtatagccaaaagtattgctaagtggactcattctaaatttagtcaggaatcttttgatgcttatgtggaaaaaacgcatacatctgagatacaagccattagaggtaaaaaaggaggaatgattagtcgtggtggaggaagaccatcattgggaaaaccatggattaatcttggtattagtcggtcatcatggtatcggaaatataaactgtaa

SEQ ID NO: 313617 - DNA, 1587 bp, Proteus mirabilis
atgattgttaaaattcattcccgtggtgcgggttccggtagtggtcctgttgattatcttctgggtaaagagcgaaaccgtgaacaggcgaacgttttacggggcgaccctgagcgggttaaagagctgattgataccagtgaatacacacgaacgtatacctctggtgtgctttcctttcaggagcgggatttacctgatgatgagaaagctcggctgatgaatgaatgggaaaatacattgatgaccggtcttgataaagaccagtacacctgcctttgggttcagcatcaggataaagggcgtttagaactgaattttgtgatcccgaatgtggaattacagagtggaaaacggcttcaaccttatttcgaccgcgcagatcgtccgagagtgaatgcgtggcagacattaaccaatgagcgtcttgggctgcgcgatccgaatgacccgatttatcggcggccgttaacgccgtccagtgatttaccccgcgacaaacagctggctgcggaaagtatcactaaggggctgatggagctgatgcgagttggtcaaatcagggagcgaaaagatgtggtttctcaccttgaacagtttggttttcaggtggtcagggaaacgaaaaacagcctcagcatagctgatccgtctggggggagaaatatccgtttaaaaggggctatttatgagcgagattttaaatttagcgaaacagttcgagacgacatcgaaacagcaagccgacgctaccgaaaccagcgtcaaaatcgaatttcagcggcacgagaatgctatcagacaggccttgaaatcaaacgagcagagcatcaacaacgctatccaagagcagaatcaacgtcagcgttggttgttggtcactatgatgggcaaactcagtctgtggattgggctatccggcctttgtctgattgcgatactgtccggcattctggtgtatcagggcaagatgatagccgaccgctatcaggaaattcagcagttagatcagagcgtgctggagatgaacgaatacacagggaaagggctttcggtactgacggacgacaaaacgaaaaaccagtattacctgatcttgccgaaatcggcgtacaacgtgggcgcaccgtatcagagcaagaacggccatactgtcatcaaataccagaccaaataacccctttaaacgtccctgataacgatacagcggcgttttctcaacgcaggaatccttctcatgacggaaatggagaaacaactcctgagcgcactggagagcttacagcacagttacgcgcaacagcagagcgaatggcagagcagttacgccagcttacagagcatgttcgatactaccttgagtcattacacgcaaaatcagcaagaaaacgcccaactgagcgagcaagtgacacgcttacagcagcaagtcgaggacttgagcaggcaagtcatcagtttgagcgacaagctgcccctgttattgcggtagccgagcataaacgtgcagaacaacggcgaaacgaattagagcaacagcgacagaaaacgcgtagccgtgatgatggttttgggatgggattttaa

SEQ ID NO: 313618 - DNA, 333 bp, Proteus mirabilis
atggaaaaacgaacgaaagaaatcaagatcagactgactgagcgtgagcatgagctattgcttgaacgatgtgagcaatctcagttggcatcatggttaagggcattggggctgggtgaacgtcgtccccgtcagcgtaaattgccgacggttgatccggcactacttcgccaaatctccggcatggggaataatctcaaccagatagcgcggcttttgcatcagtccccgtcattctcaccatctgaacgggttcagttactggccgttctcaccagcatggatcatcaattgaatgacttattagcggagcatcgatgcgatgattgttaa

SEQ ID NO: 313619 - DNA, 267 bp, Proteus mirabilis
gtgaataaaaatgaacttcaagtattaatcgattataccaaaggcatgattgcagataataaggagccagaaaggaaagttattattgcattgtgtgatgagctggagagaataactgaatcagagcctgtcgcttggatgtaccctgtatttcatgatgagaaaatgcaattcactactgacgcagttgcatctgaaaatatagatattcattttcaatctcatggctcaccacttaaagtaacaccgctctaccgcttagattaa

SEQ ID NO: 313620 - DNA, 252 bp, Proteus mirabilis
atggataaatcaagacagcaatttgaggggtggataaataaaaaccaccctaaatgtagttattatcacaaagatattcgacttgaagcatggatggcatcacgcgagagtttggaagttgagttaccggttaaattaccaactatggacgatgattcgtttgaggagggtttgtgtgaaggctataacaacgcgatagatgatttcaagcaaatattaatcagcaatggagtgaaaataaaaggtgaataa

SEQ ID NO: 313621 - DNA, 204 bp, Proteus mirabilis
atggataaatcaataccagatttagcagctgagtttcattgcctgctagcgaaaatggaagaagttcacggctctaaaataatatcattaataaacaccactgaagaaaacgtcaaagccgcgattagaacaaaccgaatgttgcttcatagttattcgtatgaattaaataaattgaaaaagcaggttgatgacaatggataa

SEQ ID NO: 313622 - DNA, 174 bp, Proteus mirabilis
atgagtaagcagatggttttagttgcaagaacaaacaaggttggatctgactctgaatgtgggctgggtattactgaggacgaatgggataaattaaccgaagaagaacaatcaggatatatcaatactgcaattgataatcttgttgattggtatgtgaagacagaagattaa

SEQ ID NO: 313623 - DNA, 699 bp, Proteus mirabilis
atgattagtaatgacatcattctaagcaaaacaggcatcgatttaaccaaagtagagcaaggaagcgaagaatggatgtctatcaggctcggtgtagtaactgcctctgaggcatggaaggttatctctaagccaaagtcagggaaaaaatggacagacacaaagaaaacatatttaaacacccttattggtgaagtctgtacaggagtttacaaggaagtatcagcaaggacgctggaatggggtaaaaactacgaattagaagcaaagatgacattcgagttttacaccggattaacggcaaaggaagtgccaataatatttaaagatgagcaactacggatagcttgctcaccagacggcatttgcagtgatggctctggattagagcttaaatgccctaataacacggacgtatttatagacttggcattgaatggaatcgatgcaatgaaaaaggaatatgtggctcaagttcaatattccatgtgggttacaggtaaggatatctggcactttgcaaattttgacccacgcatgccggcagggaaagaaatcgcatatttccctgttgagcgtgacgaaaaaatgatgaaagaatttgacgagttagtacctgagttcattgaggtgatggatcagggattaaacaagttaggcattcaatttggcaatcaatggagtgtatatggcaattaa

SEQ ID NO: 313624 - DNA, 927 bp, Proteus mirabilis
gtgacaaatgcagttcaaagaatatatgaggttgtaaatcctcttaaaaatgaattcgaacaagtgtgtagcgagccaagcattgcattcaaaagggaatctgaattcgccatgcaaatattcgcaaacaatgattatctggcaaatgttgcagttaacaaccttgtgtcggttcgtagtgcgatcatgaatgtctcagctataggaattagtttaaacccagcgcaaaagttggcttacctagttcctagagacaagaaagtatgtctcgatatcagttacatgggcttgatgcatattgctcaacaatcacaggctattaagtggtgtcaatcaagcattgttcgacaaaatgataatttccaactcacatcaatagataccgcacctcgccacgaatacaacgcctttgccactcaaaagcagaggggtgagattgttggcgcttacacagtagtaaaaacagaagatggagactatctaactcacaccatggctattgctgatatatacgcaatccgtgaccgttcatcagcatggaaagcttggatagcaaagagaaaatcatgcccttgggtaactgatgaagaacagatgatcctaaaaacagtagtgaagcaggcggctaaatactggccacgcagagagcgcctagataaggctattgactatgttaacactgatgctggagaaggtattgattttggaagtgagcaacaagaaccaaaagacataacgccagcgagtgaagatcaattaaaagccatcactgatttgatgattaaagttaatggtgaatggagtgacacgttcttcgcatttattagtaaaaaattcaaccatcaaatatcccatccagagcaattaaccgcatttgaggccaataccattatcgacatgctaaggaaaaaggcagaaggaaaatga

SEQ ID NO: 313625 - DNA, 222 bp, Proteus mirabilis
gtgaatccttaccatgaacttgacgcaagggaagaacgcaaacaagaagaagtatcatggattgatgcaaaggacgctgagttaagtaatgtcgcatttagcgtggttgatggattaccaaaagacattacaagtcaatggagtgacagcgttttcgatatgacaattgatggtctttacagggagttaaagaactatcaagaacgtaggaggatgtcgtga

SEQ ID NO: 313626 - DNA, 264 bp, Proteus mirabilis; identical to SEQ ID NO: 313604

SEQ ID NO: 313627 - DNA, 156 bp, Proteus mirabilis; identical to SEQ ID NO: 313603

SEQ ID NO: 313628 - DNA, 261 bp, Proteus mirabilis
atgggtgatgtaggagacgattttcgcgcatacaaggaaatggtaaaagagcggaaattagagcgacttaaaaataatacggagcaactaaaggatatagatattccgtacaccagagattcaagtggaactattcactttcaaacaaagaaaggaaaggttttattttacccaacaacaaataagtatcagcacaagcgaagcgttaaacgaggtggcctatttaaggctgttgagttagcaaaacgcctcggaatctaa

SEQ ID NO: 313629 - DNA, 372 bp, Proteus mirabilis
  misc_feature (338)..(347): n is a, c, g, or t
atgacaaacacagttattaagtacgttttagaccgattatatgatttaggtatcaaagatatttttggtgttgctggtgattatgccttccctattgaagacactgtttgcaacagccaacaacagcgttggattggtaactgtaatgaattaaatgcggcatatgctgcagatggctatgctcgaattaaaggaatggcggcattatccaccacctttggtgtaggtgaattaagcgcgattaacgctattgccggtgcctatgccgaaaatttaccgattttccatttagttggcatgccagcaagtggcgtacaaaaaagtaaacgtcttgtgcnnnnnnnnnngtcttgtgcatcatactttaggtaa

SEQ ID NO: 313630 - DNA, 1317 bp, Proteus mirabilis
gtgcatcatactttaggtaatggtgattttgatgttttttatcagattgctcagcgccttgcttgcgctcatactattttaacacccgaaaattgtgtggaagaaatggagcgcgtaatagaagcagcattaaaagagcgtcgtcctgtttatattggtataccttcagattatgctaatagccaagtagtagcgccgttatctgttaccgcaccacaaaagccaacaagtgataaagcaacattagaaaaagcagtatcagcaatcattgagaaactcacccacagcaataatgtctgtgtattaccaggctttttatctgcacgtttagggttaacagataaaatccagcattttattgataaaacaggtttaccttatgccactatgtttatggataaaagcatattaagtgaatctaacgcgcaatatgttggtatgtatgacggacaattaatgacaccagaggtcagagaatttgttgaaagtagtgaatatatattagggatcggtacattaatgactgactttaatacaggcagcttcactgctaatatgaaatcagaacaattaatcagtattatgccagattatgttgaaattgattctgtgatctactcctgcgtttatatgacagatattctttctgaattaacccaacgactaccaaataaaacttatcataaaataacagcgaaaggattaggtgaagcggttgcatctgataatgataaaattacagcacaatatctctatcctcgtttagaaaaattctttaagcctaatgatattattattgcagaaacaggaacctcatccatgggattaggcttcgctttattacctgaaggtgcacaatttcataaccaaacactatggggctctattggttgggcaacaccggctgcattaggcgctgcattagcggcaccagaaaaacgtattattttaattaccggcgaaggctctcatcagttaacagtacaagaaattagtcaatttgttcgtttcggtttaaaacctattattctagtattaaataacgatggttatttaatagagagattattatgtgattaccccgaagcttattataatgatttagctcagtggaactatcatcagttaccgcaagcctttggtgcaacagattggtatagtgaaaaagtaactacagcaagtggactagataatgcgttaaataaagccgcactaacaaatagcgcatcttatattgaggtagtcacagagcgatatgaggcctctgaattagcgcaaaaattaaaagaatcaaaaagttcattatattcattctaa

SEQ ID NO: 313631 - DNA, 276 bp, Proteus mirabilis
atggaaatatggtttaagcaatttgagtcacatggacgtcagattctagttaaaaaagcacataaccccgaagagtcaaaagtcggggtgcaatattgttggcctgaaaaaattcttgaggtcgattttgggctgtgggtggattacgacgaggatgatgaggaaagttgtgataaagcagaagatgcacgcaacaacctattcgacaccatcgatcaggaagtggtagataccgtggtgagggaattaattcaaaaactcaagctcgatgattag

SEQ ID NO: 313632 - DNA, 486 bp, Proteus mirabilis
atgagtgaagctgaagagatgggagcttacgagccagaatacgatgaatatgaagaagggttatccgatgggtactggactcagcgttgtggcactgcaattcacatcgcaaaaatgactaattctcacattcgaaaagttatctgtttatgtgaaaagaaatcattaaattcgaatttttcatgcgatgaagagaaatggaataattgggttcagctattaactgaagaattacagcgtaggtgtttaaataacacagtgataaaaacccagcgacatgaaaggaaaaagaaaaaagctagcaaaaccataaaagcaatcctacagaatacaacactaaaaaaattgcagttagagtgccattgtggagcagaatacacagccaaaacatcagacttgaaacgaggctgggctttaacttgcagtaagagatgtgcggcaattaggcgagagtttgggtcaaaaatgcctaaattaaaggaataa

SEQ ID NO: 313633 - DNA, 462 bp, Proteus mirabilis; identical to SEQ ID NO: 298454

SEQ ID NO: 313634 - DNA, 858 bp, Proteus mirabilis
  misc_feature (823)..(832): n is a, c, g, or t
atggcgcaacaagcaattaaaagagcaataacgtattcggtcgtaataggtacacttctctcagggcataatgttattgcctcagaaagtgaaacgccaccgctattcacatcagaaacacctgcattagtacccgcattcacagaagacgtggcaacacaagatacattaaattcaccatcagtgagtaagcaggaagttagcactaaactacaatcttggttaccaagcgaatataaaccactttactttaagcaactcgtggatgtttatcaaagcaatgacttagcactgatttggcaagatgaacaaattacaaaacaactagagcagcaactggcagaggttgccttaactggaattcaaccacaatttggacgttggttaacgctattagaaacagcacaattaacgccagaagcacgagatattattttatctgacgcttttttaggttatatcagctttgttgaacagattaatcaatcaggaacaacactgttatatcgcgctgcgatacaagcattaccggcaccgactgtgcaagctgtcgagcatttccaactcaatctacaacaaaataccttagggcgctttgtcgtctcctttgcaccctcacacccttactatccattaatgaaagaggaagtgcgcaaacagcttcatcaagaggttatttggcccgtcatggaagggaaaaattcattaaaaccaaaccaatcggctgaagaagttattgcattaagacaaatattgcgtaacttaaatttactgcctcaattggctgaaaatgagcaagaagtagcaacaacgatttatgatnnnnnnnnnnaacaacgatttatggtgagcctttaa

SEQ ID NO: 313635 - DNA, 324 bp, Proteus mirabilis
atgattaagtcggttattgccggtgcggtagctatggcagtggtgtcttttggtgtaaatgctgctccaactattccacaggggcagggtaaagtaacttttaacggaactgttgttgatgctccatgcagcatttctcagaaatcagctgatcagtctattgattttggacagctttcaaaaagcttccttgaggcaggaggtacatccaagccaatggatttagatattgagttagtaaattgcgatattacagcttttaaacaaggtcaagcactgatgaatcccctaatgatttttatcaaaatcattaagttaaggtag

SEQ ID NO: 313636 - DNA, 651 bp, Proteus mirabilis
atgattttatgtatagctgaaaaaccttctgtggcaaaagatattgccgaagtaattggtgcaaaacaacgcaacaacggcttttatgaaggaaatggctattgggtaacctggacttttggccatctgtgtacattgaatgaaccccatgattacaaagaaaattggaaatactggaaattggaagatctgccaattgtacctaaaaaatttggcattaaactaattgataacgatggagtaaaaaggcaatttgctgttattgaaaaattggtagcatcttgttctgaagtcatcaattgcggggatgccgggcaggaaggggagttgatacaaagatgggtattggcacctggtcaagaaagcgggccatacccaccaagtggccaagacgggcgcggtcaccctgatccagcgttttggatcggcgctcaatctgaatgttcacttccacatgctgtttctcgacggtgtgtatgtcgagcaatcccacggctcagcgcgtttccgctgggtcaaggcgccgaccagcccagagctcacccagctgacgcacaccatcgcccaccgggtgggtcgctatctggaacggcaaggcctgctggaacgggatgtcgaaaacagctatctggcctcggatgcggtggatga

SEQ ID NO: 313637 - DNA, 507 bp, Proteus mirabilis
atgaaactatcattaattgttgccatggataaaaattttggcattggtaaagacaacgatttgttatggaaattgccggctgatatgaaattctttaaagaaacttcaacaggtcatgtagtaataaccggacgtaaaaattatgaatctattcctgagaaatttagacccttgccaaatcgtgaaaatgccgttttaactcaccaaatcggctatcaagcaccaggagctcatgtctttttttcacttactgaatgtttagagttctataaaaatgaaaccgaaagaactgttttcatcattggtgggggacaaatttatgcagaagttatgcagcgaaacatccttcaagaaatgtatatcacacaagtagatggagtgtttgacgcagatactttttttcctaaattttctgaatctgagtggaatagtgaaactgtactgaaacagggtattgatgaaaaacacgcttttgcttttgaaataaaaaaatatacacgtaaataa

SEQ ID NO: 313638 - DNA, 186 bp, Proteus mirabilis
atgacaattaaagactctcttactcacgaatctctcgttcgtgataatcaccctatattacccgacgatgggttagaccatacacagtgtcatattgaccgtctccatgcgtcagcaagagcgagaacaaaagcaccttatcaacctaaggttaaaccacaaaaacgacgaggtaattatgtttag

SEQ ID NO: 313639 - DNA, 303 bp, Proteus mirabilis
  misc_feature (288)..(297): n is a, c, g, or t
atgcgcgaaagaatcaagcaagctagacttgcaaaaaacatgacccaagctgagttagctgagttggtaggagtgtcaccacaatcagtacagcagtgggagaccagtactgagccaagaaaaaacagagttattaaaattgctgaaatacttgaagttgataccaattggttgttattcggaataactgatattggtgaaagaaacaaagtcagtagtattcaaataaatcaagatattgaagtttcagataaaaatacctacaaggtggagatgctggatatccannnnnnnnnnagctag

SEQ ID NO: 313640 - DNA, 357 bp, Proteus mirabilis
atgaataaatataccgaactatctgacttcgagattaataaaaaggttgctagtcatgttttgaatggatactacattgcttcagaagaaaagcaagaagtgtatttagcaacaatggatggcggagattttcttcccatagcctactttgacccttgcaacagtccagccaacgcaatgacaattattaaagataacctcatatctataactcatgatggaatagcgtgggacgttagctgtgctaaatgcccagagttaagcgtgtggaatgggttggaaaactacaacgataatttttatcgcaaggctatggaattatttctattaatgaaggatgcggagaatgaaggctga

SEQ ID NO: 313641 - DNA, 210 bp, Proteus mirabilis
atggaaacaatcacagtaactagcccattatttccaccattggaagagctagagccttacttacaagatatatggaagagaaaatggctaaccaataatggttactatcatcaacgccttgaagaggcactatgcaaatacctaaatgtaccttacattagtttatattcaaacggaacattagcgctaattgcagcaataaacgtctga

SEQ ID NO: 313642 - DNA, 252 bp, Proteus mirabilis
atggttacattaagcaaaaaagatggcgctattatacctttcggtgcgatggttgttgatgaagagcgttccgtaagtggtattgttggcgataatgggaatgtttttatctctggtttagcacctgttggtaggctaaaagcaaaatggggaaaaatggctgatcaacaatgtatattcgattaccaaattaatgagaagtcatcaaaagaaaaaggtatctattttatttcttccacatgccaatattaa

SEQ ID NO: 313643 - DNA, 267 bp, Proteus mirabilis; identical to SEQ ID NO: 299164

SEQ ID NO: 313644 - DNA, 462 bp, Proteus mirabilis
atgaaacactggaaactttacattgtcgttgtgatggtggggattgttgctggtggttgtgcgctgattaatgcacaagcgaaaagaattaacacactgacagaaaacaacaaagaactgactaccgcactcgaagagcagaaggatatcaatattgactatcaagcacgcatagagcgactaaatcaacttgatacaaggcacacacaggagcttgttaatgcaaagaatgaaattagtcgcttgcgtgatattagtgagcgtaatcctgaacgggtgtacatccgagccagttgtccgaaagacgaaaccaattcaacctccggcatggatgatgcaaccaccgccagacctactgactccgctgtcagaaattattggctactcagagagcgaattgcagagtcagagcaaatgattaaagggttacagaattatcttagagctgaatgtataaaataa

SEQ ID NO: 313645 - DNA, 141 bp, Proteus mirabilis
gtggtagagctggcagaaaaaattaaagcggatttaattgtcgttggctctcgtcgtcctagcatttcaactcatttattaggctctaatgcatcaggaattgtggcttacgccaaacaatctgtgttagttgtgcgttaa

SEQ ID NO: 313646 - DNA, 4458 bp, Proteus mirabilis
atgattgaacgaggaaaatttcgctcattaacattgatcaactggaatgggttttttgctcgtacttttgatttagatgaattagtcacgactttatccggtggtaacggagcgggtaaatccaccaccatggcggcttttattaccgcgatgatccccgatctgactttacttcattttagaaataccactgaagccggttcaaccagtggctctcgtgataaaggattatatgggaaattacgcccgggagtttgttacgctgttttagatgtgattaattcccgccatttacgagctgtcgttggcgtacgcttacaacaagttgccggacgagataaaaaggttgatatcaaaccttttatgatccaagggctacctattgctgaaaatccaacagaaattttgacgcaagctgtcgatggacgccaagcacgtgttctaccacttaatgaattaaaagaaaaagtagaagcaatagaaggcgttgtttttagacaatttaactcgattactgatttccactctgtactctttgatttaggggttattccgaaacgtttacgctcagcaagcgatcgggcaaaattctatcgtcttattgaagcttcattatatggtggtatttcaagtgccatcactcgctctttacgcgactatttattacctgaaaatagcggagtaagaaaagccttccaagatatggaaggggcattacgtgaaaaccggatgaccttagaagctattcgggtcactcaatccgatcgtgatctgtttaaacatttagttaccgaagcgacctcttatgttgcagcggactatatgcgtcatgctaatgaaagacgagtacaccttgatcaggctctatctttacgtaaagagttgtgggatcagcgtaaagcgattaacaatgaagcttatcgctttattgaaatgggcaaagagttagaagagcaacaagcgttatcggctgatttggaaacagattatcaagccgccagtgatagacttaatcttgtacaaaatgcggtacgccaacaagaaaaaatcgatcgctatgttgcggatgttgaagaaatcacattccgtttagaagagcaaagtgaagttgttgaagaagcaacatcaaaaaaagaagagttggaagcgcgagttggatctgcggaagaagaagttgatgaactgaaaagtcaattggcagattatcaacaagcgttagatgttcaacaaacccgagctattcaatatcgtcaggcggtacaagcattagagcgtgcgaaagcacaatgtggcattgatgatttagatgaaaccaatgccgagctatgggctgaacgtattcaagcaaaaattcaatccatcacgcattcattactttctatggagcagaaactcggtgtttctgatgcggccaaaacgcaatttgatcaagcctataaattgatcacctcgattgttggggaagttgagcgtcaaaatgcgtggagtgcggctaaaagcgcattacgtgaatggtcatcacatcgccatcaagccgatcgtgttcaccctattcggatgcaattagctgaattagagcaacgtttacagcaaagaaataatgctgaacgtcaacttgcagagtttaataaacagtatggcaaaaatgttgagcctgatgatctatttactctacaagaagagctagaagcaaagattgaagagctgagcgattatgttagtgattctggcgaacagcgtatgcaaatgcgccaagagcttgatcaactaaagcaacaaattgaaaaattaagaaaacaagcgccagtttggtttgctgcacaagatgctttaacgcaactgtgtgaacaaacgcatcaatcttttgaaacaagcaatcaagttactgaatatatgcaacagttacttgagaaagagcgtgaagccacggttttgcgtgatgaaaccgctgctcgcaaacagcaaattgaagctcaaattgaacgattaagtcagcctagtggggctgaagatggccgattaattactttagcagaacgctttaacggggttttattatcggagatttacgatgatatcaccttagatgatgcgccttatttctcagcattatatggacctgcgcgccatgcgattgtggtacaagatctcggtgcgatcgaagagcagttagcttctttagaagattgcccggaagatctctattttattgaaggtgatccgcaatcctttgatgatagcgtatttaatgcccaagagatggaaaaagcggtacttattaaaagttctgataggcagtggcgctattcacgttatccagaaattccattatttggccgtgcagcacgagaaaaccagctagaaatattatcccgtcaacgagatgagctgtcagagctgtatgccacacaggcctttgatgtgcagaaaattcaacgtgcacaccatgcatttagccaatttgttgggcaacatatttcagtggcatttgatgccgatcctgaagaagatattcgccaattaaatcaacgtcgtaatgaattagagcgcgagttatcacaatatgaagagggcactcagcaacaacgtcagcattatgcgcaagccaaagagtcgctcaatttattaaataaactcattcctcaagtcaatttattattggacgaaacattaattgatcgtgttgaagagctacgtgaagagctttataacgcagaagagtcgatgcgttatttacagcgtcatgagaaagcattaactgcgttagagcctatagcctcgattttacaaagcgacccacaagagcatgatcaattaacacaagattatcaatacgcaaaagaagagcagcaacgttatcaacaacaagcatttttgctggtggaagtggttcagcgtcgtccacattttagttatagcgatgcggttgaaattgtcagtgaaaataacgatcttaatgaaaaattacgtcgtcgtttagaaatggctgaaacagagcgagcgacagcgagagagttatatcgtcaacagcaggcacaatgtgatcagtttaatcaagtactagcctcactaaaaagttcttttgataccaaatcagaactattaagagagcttgagcaagagatgaaagagactggcttgcaaattgatgcgggtgcagaagcgcgagccaaagagttacgtgatcaacgttatgctgcggtgagtgctaaccgtacgcgtattagccaacttgagcgtgatattgcgcttagtgaagctgaacgtgaaaatatggcgaagaaaattcgcaaattagaacgtgattatggccaaatgcgtgaacacgtcgtcagcgctaaagccagttggtgtgctgttatgcgcttagtgaaagaaaatggtatggagcgccgtttacatcgtcgtgactttgcctatctttcagcggatgagttacgttcaatgtcggataaggcgctaggtgcgttacgtcaggctgtggcggataatgaatatttacgggatgcattacgtcgctctgaagatgcaaaataccctgatcgcaaagtccaattctttattgcggtttaccagcatttaagagaacgtattcgacaagatattatcaaaaccgatgatccggttgatgctatcgaacagatggaaattgaattagcacgcttaaccgaagagctaaccagtcgtgaacaaaaactggcgatcagctctcgcagtgtggcaaatattattcgtaaaactatccaacgtgaacaaaatcgcattcgcatgctaaatcagggcttacaagcggtttcctttggtcaggttcgtggtgtacggttaaacgttaatattcgtgaaagccatcaaatcttactggatgtattatcggaagaagaagatagccaatatcaagatctatttaaaaaccaaaacctaaccttctctgaagcgatggcaaaactgtatcaacgcttaaatccacaggctgattttggtcagcgtatgccacaaacggtgggtgaagagctacttgattaccgtaactatcttgagatggaagttgaagttaatcgtgggccagaaggttggttaaaagcagaaagtggtgcgctatcaacaggtgaagccattggtacaggtatgtctatcttagtgatggtggttcaaagttgggaagaagaatcacgacgcttaagaggaaaagatatttcgccttgtcgtttgctcttccttgatgaagccgcacgtttagatgcgaaatctatcgcaaccctatttgaactgtgtgaacgacttgatatgcaacttatcattgctgcaccagaaaatattagtccagaaaaaggcacaacttataaattagtgcgtaaagtctttaatggaagcgagcatgttcatgtggtcggattaaaaggctttgggcaacaaagtgaaaaagataaacatttatccgaaaatattgcagatagttga

SEQ ID NO: 313647 - DNA, 300 bp, Proteus mirabilis
gtgagtgttaagaactctccttatacgactattgcaagccaatatcctcttaatgataaagagagtttaaaacattattttaatatgttatttgataatgatataaagacagtttatgttttagcctcgaataaggatattaaatgggacttctcaaaacctgatagtgaatatgataaaagcaattctaagcagaaagggtttaaatactttagagaggatttttattcagataatatagaatctcgccactttaataagtgggatttcagtcgttttaaaatacaaagtatatattaa

SEQ ID NO: 313648 - DNA, 462 bp, Proteus mirabilis; identical to SEQ ID NO: 298454

SEQ ID NO: 313649 - DNA, 1341 bp, Proteus mirabilis
atgcatcaatctgatgtagcggatcgctcacttttttcccttagctggcctatttttattgatatttttcttcatcttgccacgctattgattaacacttacatgataagtcatgtctctactgcctatttagctgcaatgggcgtaggtaaccaagtttttgatctttttatcaccatatttaactttattagcgtgggatgtagcgttgttattgctcaatatttaggcgccggtaagcgcgataaagccagtcaagctattcatatttctatcgcctttaactttttgctgggctttagtagtgccattattattctcttttttggctacaacattctaaatgtaatgaatacgccagagcatttagtacaagatggctataactatctccatattttggggatttgtcttattcctgaagcaatttcaattatcttagcagcctgtttgcgggtttatggtaaatcgaaagcggcgatgtatgtgacgttaattgccaatattgtcactgttatcggcaatatgattgtactatatggtttctttgggcttccacaatacggtttagtgggtgttgcatggtcaacggttgtcggtcgtattattgccgttgtcttattatgtggtcttttattctatggattaagaattaagttcgatataagactattagtgatttggtctaaaaatatgttagctaaaattctacatattggtttacctgctgcaggtgaaaacctagtgtggattctacattatatgaccgcctctgcctttataggattaatgggagaagttcctctcgccgcacaaacactctatttccaactatcattattcttaatgttatttggcattgcgattagcattggtaatgaaatattagtcggtcatttagttggtgcaaaacgatttgatgatgcatttacacggggttttaaaagcttaaaagcaggtgtgctatttactattggtgtggtgattatttattggtttatgcgtgatcctattttgtattctatcaccgaagatcaacgcattatcgaccaactgttgcctttatttattttatcggtctttttggagcctgggcgtacatttaatattgttatggttaatgcgttacgtgcagccggagatgccaaattcccactcattacagccgtttgttttatgtggggagttgctattcctattggctatttccttggtataaaaatggaaatgggtttaattgggatttggataggttttctttgcgatgagtggctacgaggcttaacaaatgcatggcgttggcgctctcgtaaatggcaagctaagcgcttagatatttga

SEQ ID NO: 313650 - DNA, 1341 bp, Proteus mirabilis; identical to SEQ ID NO: 313649

SEQ ID NO: 313651 - DNA, 576 bp, Proteus mirabilis
  misc_feature (517)..(526): n is a, c, g, or t
atgtctagttctcaactgaaaaaacaatatattggcgaacatcaattatctccagaaacgttaatgatgagctatggatacgatccattgttatcggaaggctctgtcaaacctcctgtatttttaacatcgacatttatttttaaaagtgcagaagaagggaaaaatttttttgatacggtaagtggaagaaaaccccttccagaaggagaaaaagcgggtttagtctattctcgttttaaccaacctaatagtgagatcgttgaggatagattagcagtttatgaaaacacagcatcatgtgtcctcttttcatcgggaatgtcagctattacaacgacattaatggcttttacacaacctggcgatgttattttacattctcaaccactttatggtggaacagaaacattaatagccaaaacattcgctaagttcggtattcaagcaacaccatttacagatggtttaaatttagcacatatccaatcgcaagctgaaatggctagccaaaaannnnnnnnnnaaagggagagttgcggtgatatttgccgaaactcccgccaatccaactaa

SEQ ID NO: 313652 - DNA, 687 bp, Proteus mirabilis
atgggtatttacagtgctacattaggttcgtgcaattggctatcgagcagatttaatagatttgaagtatctgcctgtataaccgacgatttaatcgtagcggatttaactgatatatgctcccatctatcaatggggggaactggattagcaaataacctgagcagagaactagccgttttctctgcaagcttatataaaaatgttaataaacgcaaagaaccagatggtaaaactagtgttcaaataatttctgcacctgagcatcaccctatagtaaagcaagcttgcaatatagttaaaaacaatatgtttatttgtagtcatagagttagctatgcgggagatagacctataatattaccgctgaaaactgtgaaagcgcacgataagaatgtatctattgatattgcttatggaagatcaagtggggatctaaaatcaacagaacttaaggaattaaaacaaaaccttcagtctttaggttttaatattataacagcagataatcctcaagtacatgctaagtttttttcttgggacaatgacaatattgtagtcacaagtcttaactggttgtcatcttcttcgaagggtgatatttataatgaacttggtttccttattacacttcctgacattggatgtgaagtgaaagaaaaattccatgaaatgtatccagaataa

SEQ ID NO: 313653 - DNA, 246 bp, Proteus mirabilis
  misc_feature (228)..(237): n is a, c, g, or t
atgcatcttttcaactcaataagcaatgcaaaaagtagattaattatacattccacatttatcaatgaagaatgtattactgatgtatttgataatttaatagaagcagcacaacgatcagtccaagttgatattttatggggccaaacagaaccagaggaacaaaataaacttgaatcttataaaaatgtcatagcaaaatttgacgaattaaataaaaaaatagcnnnnnnnnnnattccatag

SEQ ID NO: 313654 - DNA, 207 bp, Proteus mirabilis; identical to SEQ ID NO: 295825

SEQ ID NO: 313655 - DNA, 810 bp, Proteus mirabilis
atgttgatctcttcttccgttaaccaaatggcgcaattacagccttgtcgatattcaggctttattttatcaatagtatttcattttactttagtcattagttatttctatatcacgcaacaacgcccggtgataatccatcaacctgcaccggctgttatgcttagcttaagtgaaaacgtccaagcggtgaataaagaaaaacagattgtcggtgttgatcagcaaatggctgtcgccagccaaaaaaaacagcagcaagagattgcggagaaacaacccaatcttattattaatgaaaatgcagatattttgcttgaaaagccgaaaaaagtgctacaaaaccagacctcagttaaggttgccccttcaattgcaccaaccaaaccttcacctattgtcagtgaaaatgtatcgagtttatccgcgccctcaacaagccattctgttgcgaaacaacaggctaacgatgtttctgcaaattatgatagtgatgcaaataaagaagcagatgccttggcattatggcaagctaaggccaaaggtcatttaaatcgttataaagcttatcctgaagaagcgaaaagaaaagggcgtacgggagcacctaaagtgcgttttattgttgatggacaaggttatgtcatagcctgcgaattgattaatagcagtggtgtgcgctcactagataaagaggcacaaagtgttattaagcgtgctcagccattaccaaagcccccagaagaactgctttttaatggtcaaataacaattgaaatggcaattgaattttccacattgactttataa

SEQ ID NO: 313656 - DNA, 354 bp, Proteus mirabilis; identical to SEQ ID NO: 305322

SEQ ID NO: 313657 - DNA, 2127 bp, Proteus mirabilis
atgtcaacagatgaagcaaataacacaccaaaacctcgtttaatattagatgaaccagttttatcccattcttctggaataatgatctcagcagcagagcaacgtgctcgtatacaaagacatgtcgaacttcttgatatgttagaacaagggttactgaaaacgggtttagtttttacttgccaagtagctggattagctgacgatacttttcaagtcactcaatttgatttaaacgaaggactttctgagctatttacactcactattcaagtcgtgagtactcaaagtgatattgatttttcatattatttgggaggggcatcatcacttacagtaagaagaaacggtaaaaaaattcgtacggtacaaggtctattatcgagtgcagaacaaagtaatactgatggtattaaaacttggtatcagttagagatccgtcctgaaatgtgggtgatgacacttaatcaagatagtcgcatttttcagcataaaacagtacctgaaatcttaaaacatttacttgatgaagcacatatcaaatatgataacaggctctaccaacctgaacttcatcaacctcgtcattatgttactcaaaaacgtgaatcagcttatgatttttggtgtcgtttagcttttgaagagggaattaacttttggtttgaggaaggcccgaagcttttttacagcgataatcatttaggcatgacggcggggatcactttaacttataacccacagtctgaaacagatattaccgacagtactgcaacgaaatggcgttatatagaacgtttatgcagtgatgtccgtatagataaagactataaccaaatacgtccttcctaccccttatcgcaacaaacaacagggaaaaatcatcaacaacaccctatatttgaaagttatggtcgctttcaagaagatgcacagggccagccatttaatcaactgcgttatgaacaatctcaaaaccatcgtcaaacgggctatgcacaaactaattgttttgctcttatgcctggtaagatatttaccttaactaatcatccgtgtacaagaatgaatgaatgttggcaagtagttagcgttactcatcatggtgtacagcctttaggagataacagtgaaggacaaggcactcaactttctaatcacgttacctttattccgagtatgcaagagtggcgaccaccatttcattataaaccattagctgatggtgatgaattagctacagttgttggtccagatggagaagaaatttataccaatgaacaaggtgctgtaaaagtttattttcattgggatagaagaggaacacctgatcatagtggatcgtgctggcttcgggttgcgcagggatggagtggcaatggttttggctttatagctatcccgcgtgtagggcaggaagtgattgtttcctatttaaatggcgatattgacagacctattattacgggatgtacttacaatggccgtaatacaccaccgcttgatttaccgaaagaaaaaaccaaaaccacatttcgtagtaaaactcataaaggtactggatttaatgaactaagatttgaagatgcgggtggccgtgaagaagtgtatttgcatgcacaaaatgatttaaatattcatgtgcaacatgatagtcattggcataccgaacatgatgttaggcaacggatagataatcaaagagtaactgaaatagctggtgatgagcattttattttgaagggaacacaaaaatcattaattgaaggtaatgtttcattacaaatcaaaggcgcgaagcattgcaaagtaaatgatgcattaatagctgaaagcggtaagaaaactcattttaaaagcggtggaaaaattattcttgaagctgtaagcgaaattaccttaaaagtaggaagtagttttatccgacttaccccaaatgcaatctttacttctggaaatttagatattggatcaagtggaccaggaataggtcaagatcctaacattcaactacctgatggtgtcactccttttgaacaacccctttttgcgattaaaaaatattgtgttttaacagcaaatgaagcaggtagtttattaataaagccagctaaggacgaaaattaa

SEQ ID NO: 313658 - DNA, 345 bp, Proteus mirabilis
  misc_feature (326)..(335): n is a, c, g, or t
atgaataatcaatcaaaaaaatatgacagaacatatcactatcctttttcaccaggcacaacaagcgatgatcgtattaatgccaattggtggcaagatatctgcaaaataaagcatcttattcatactgaaaaattagatggtgaaaataattgcttaaatcgaatgggggtttttgctcgctctcatgcgactccgacacaatctgcatggacagtacaactacgccagcgttggcaatccatcagaaatgatttaggtaatttagatatttttggtgaaaatctttatgccattcattctattgaataccaacatttggaagnnnnnnnnnngtcaggataa

SEQ ID NO: 313659 - DNA, 2283 bp, Proteus mirabilis
atgctagggctaaaacctcttaatatagattatcttgccgttatcattatattaagttgcttacctttacttattcaacgtgaaacactgagtttatccctgagttatacactgattatcgtagggatattgttatatttaattcctttttcatacttacgttttttgttgctattactctgtttttggtgctatgcaaacagtactgcctcctctttaatggtcaaaacctctcaacttgctgacaccattgccacaatagaaagcgcaattctagaatatcgtcgcttgccggatagcaatataatgattaaagttgctattcctaaacagcatctcttttctgctaaactctatgccaatatatattggcgtcatccgcctaaaaatgtcgtagtcgggcaaacatggctgtttaaaattcactttcgtgcagtacatggttatttaaatgagggaggatttgacagccaaaaatatgccgtttcagtaagagaaacattgtcaggaaaaatattatcagccacattaacgaattctcaccttcctatttatactcaatttattcactatctttcatcttattggcaagccacaaaaaatagtggtgaaatcacagcattagtgttaggtgataaacgaggtatttctgccgaaaataaaatactttatatgaaaacaggtatttcgcaccttattgtgatttcagggctgcatattggccttgctgctctgtttggttggctgatggcgagaggagtacaatatcttttcccaacgcaatggattaacccacaatttcctttggttattagtttaggttgtggtgttttttatgcggctttatcaggatgggggatccccgcaaccagagcgataataggcctaactatttgggttttactccattggcgtagtggactttttttaccttggcagtgggcgatttggagtgcggcagtgattttattgcttgatccgctcgccatattatccgctagtttttggttatccttttctgcggtatttgccatcattgtttggtattggctctatccattaaataaaagatttagccagcaaaaacgttggtttgttattagactcattcatttgcaactagggctattgatcatcttattaccttttcaatactacttatttggtggtggtaatctttttagtttgcttgttaatttatgggctgtgcctattatttcgtttattaccgtaccacttattatgtgtgggctatttactgcctttttacctgttctacaacctattatttggtcatgggttgatcagtctatcaattgggcatttttctgtgtgccttattttcttgcgtattggcaaccctgtggcgctgtcccctggttatttgcattaagcggtattatgactcttttagttatcaaaatgagctggtggcgtcatcatgtgattattttgatcactattgctacttttttatattgtgaactgtctttctctaaacgttatgattggcgaataaccatgttagatattggacatggtttagctattattattgaaaaagagggagaagcggttatctatgacacagggatacgctggaaaagtggtggcactattgctaaaaatgtcattattccctatctaacgcatcatcgattacagcctgttgccatgataattagccatgatcaccttgatcataccggtggtattgacgacttattacgtgcttatcccaagttaactatccgtagtagctttgacaatccccaacatttaccgtgcttacaagggggagtatggcaatggaaagaccttactttcaacgcgctctggccgctgacattatctcgctcacctaaaaataatgattcttgtgtaatttcattaacggatggtaacagtgttattttattaaccggcgatctggaaaaagagggggaagcgcaactactgagaaggaaaaaagcctatttaaaagcggatattttacaagttcctcatcatggtagccaaacatcatccacattggcgtttattcaagcaatatcaccaaaatatgcactagtttctgctgcacgttatagcccttggcgtttaccttctgataaagtacataaccgttataaaaaagaggccattgattggctaacaacatcgataaatgggcaaatttctatcgagtttaaacacggaaagattgatgtagtcacctatagacgagatattttacctcgttggtatcatcagtggtttggtgttttgacgtttcccgagtag

SEQ ID NO: 313660 - DNA, 252 bp, Proteus mirabilis
atgtcatccattgtggttatgatggtgatgggagttatcggctattttcttcaacagcgtaactttccaatctcaccgattatattagggatgattttaggaccgatgctagagaagaatttactttcttcgttgatgaaatcggacggagagctaattaattttgttaatagacctatttcaattgtattagccagtgttttcctattaattgtcgctatgcaaattaggagcgcatttaaaaccaaataa

SEQ ID NO: 313661 - DNA, 243 bp, Proteus mirabilis; identical to SEQ ID NO: 302180

SEQ ID NO: 313662 - DNA, 747 bp, Proteus mirabilis; identical to SEQ ID NO: 298907

SEQ ID NO: 313663 - DNA, 327 bp, Proteus mirabilis
atgaataaatacaccgaactatctgacttcgaggttaatttattagtagctcaatctgttttacctgaaacgcaatacgatgtaattaaacaaacaatggatattatccaattccttgttgatggctcgtttggttatcgctttttcgacccctgcaataacccgtcagacgcaatgccgattattattgagaatgaaatatcgatgattaaaagctcaggtggctggatgtgcggttcgggctggaatgtagctgaaaataaaaatcctctacgcgcatgtatggaagcgtttctgatgattaaggatgcggagaatgaggactga

SEQ ID NO: 313664 - DNA, 237 bp, Proteus mirabilis
atgaaaattaaattattaaacgatggcggatatagcggtcatgagggattcgcttttactaaaaaatttcctatcactgccaacctgatgagaatagacggaggattaagtgatggtcttgcatacgtatctggcaaggagatgattaatattggatgcgtatgtgaccgtaaagaagtttttaattccccatttcctttttatataggtctagagtgcgagataatcaatgaataa

SEQ ID NO: 313665 - DNA, 291 bp, Proteus mirabilis
atggaatttaaaggaacgcctgcaccatgggttgttaatgataatggattttactttgaaattagagattctgataaattattttgtataggtgatgttggtgcatcaaagcatgcatacgatgacggcgatcactttaaaaataaagttgcatatgccaacgcccatctaatcgcagcagcaccagagttgttagaggctttgattgaaatagtaggaaatcactacttatctgacaaagcgcaattaatggctacaaatgcaatcgcaagagccctcggtcagcagtaa

SEQ ID NO: 313666 - DNA, 441 bp, Proteus mirabilis
atggataaattattgaaaatcacatcagcaatccttttgtttattgttccatatatgctcactattccattttactttctgtttaaaaattatttaacccctgagctatctttcgctcttcatcgtgaagcattaggggcggcgataagttcttattcaggcacccttgtagctgttttaattgcggcattaacgtttttacttgggataaggaacagtaacttttctaagttgcaaaaatatgggtatatgctatcaatcgtgactttctatgcattaacctttgttgagcttggggcgttatttttcgttggcatacttttaatatcaaacttaaaccaactgccattgccgtctatctctatggttatcgccatcacatctttcttacatttatgcttattaactattcagttaattaatttatcaaataagaaataa

SEQ ID NO: 313667 - DNA, 846 bp, Proteus mirabilis
atgagagttagtttttgggcgtattatgcgcaagataacaaaaccaaagttaagagaaaaatagatttatcatcaatactggatggtgagataataaaaaaatctaatcattctttgcaatgtggtgattattatatatacatgcatagtattgatacaaaaacaattttattcacaaagacaaatgattcagacttaattaataaaataaataaaactaacaactccataaaagatattagagatagcttagctgatgatgagttattaggtttcccatcatttttatttataaatgacggtataattggatttgcctcttcatttcttggccctaaaattagagagttaccagaatttatgaaaggtaaaaagttattatctgaatcagaagaacttatagttgagcctctaatgagaggcgttacaaaagccgatgctcttaacatgagctttattggaaggacgactctaagaatagaatctggaaagtcacttacaaaaacgatactaagaaatattggagtagcaagcgtctcagatgaacttcttgatggtattgaaattattctaaagcccaaaagagcaaaaaatatcaaaggaatgactaaagaaattattagtagtagctacggagaagttgatggaatcagcataaaagcaaaagaaaccgcagcagatttacttactgaatactacttagatggcaaggggcatgtggggtgcaatctgccgaaaaaggcatctaatgcagaaatagctaatgaaatttacaccgcatttgctaaaatgaagccaatcatacttgagagttacgagaacataaataacgaactcttgccgtga

SEQ ID NO: 313668 - DNA, 453 bp, Proteus mirabilis
atgaatctaggcgaaacaatagtgtccgtgggcgttattctggcaatgatcatcactattgagtggcagagcggcagaattgataagctgaaaaattcaaatgctgaactaaccactcaattatcacaacaagtcgaaatcaacaaagactaccaagcccgtatcactcgattaaaccaactcgatgttcgtcactcacaggagttagccagtgcaaagaatgaaatcaacactcttcgtgatgctgttagctctggcaataagcgggtgtacgtcaaagccgagtgtcccaaagtcaaaaccactccctccaccagcttggcttatgcaaccaccgcccgacctactgacaccgctctccgaaattattggttactcagagagcgaattgcagagtcagaacagatgattaaagggttgcaggattatatcaaacaagaatgcatggaataa

SEQ ID NO: 313669 - DNA, 729 bp, Proteus mirabilis
gtgggtaattcagttgaatcaaatcaagaaatacaggatccaaataataattttaattctaaaaggaaagaatatgtagaaagagtagtatcttctttaccgcaatatgaacatgcgcaacagcctatagaatttaacagttatattacccctattcacagaacaagaaattcagctgatatggactatattgttgccgcccccattttcgatgaaattatagcctcattaactaaaaatagtgattctacagttcatcctccacaagcttctgttggattaaatatctcaggggctacaattgaacaaaaaaaagagatgttgcgttatttaaaggataaaaaatcaaaaattattgatttatcaaaaagagcaaacaatcaacatagacagtctttagaagtcttaaattctaatatagattattttatacaacatattgaaaacaatataaatagaggaaacgaaagcggtgaaattattattacaaggaatgattcaatcaaagaaccattaaatgaactctttctcaaaaaaaatatagcaagcttacatgagttaactgatatgaaaatgtcctttgatgatagcttattaaggctagattctacattaaatcaaactagtacagagttagctgacacaagaacagacttaactaacacaagaacagaacttagtgaattagacaaaacagtaaaaaaacatagagaggatgtagaagaataa

SEQ ID NO: 313670 - DNA, 513 bp, Proteus mirabilis
atgaatgataatgatattaataaagctattcgagagcaattaacaaaacaattaataaaaacagatatcaatgctgacgttattacaggatatcaaccggaagaaatcactgataataatattattatgttttttcctattaaggaggtgagccaaggttggcagaaaagaagttatgatgttcaaggtaataatgccaatcacactgaacaacaacttgttgagttaacttatcaagttcagagctttactaacaaacaatctgattttactgcaggtgatttaattagaacaacgcgaatgatcatccattcgctgccttttattgaatcaatgagaaaaaaaggaataggaatacaacgtgcgacagaaattaggcgtgcgccaataattaatgaaggaaatagctatgaacataatccttcatttgattttaatgtcacttttcccagctcgttatctctaaacactgcagctacacatttacttatatctaatctatctcgtatttaa

SEQ ID NO: 313671 - DNA, 327 bp, Proteus mirabilis
atgaaaaaatatctgaccattttatgcagtcttctcgtttccagttcgatatcatttgcttgggcgtcaacagcacagcaaaccacaggacagatttatgtacgaggagcgattgttgatccagcttgtgaaattaatttcacactcgatcaagctgagtaccaatgttacaaaaataacaaagtctttacatcaacccagtctattttccctacctcttttgaacaatcatcatcaattatactgcctcaagatatggggaaagctgaaattcgttggatggatggtgctgagaaaaatggcataattaatgtgcaatatttttaa

SEQ ID NO: 313672 - DNA, 573 bp, Proteus mirabilis
atggcaaaagctaatgaaattaagcgcggtatggctatcagttataacaataaattattattggtaaaagatatcgacatccaagcgccaagtgctcgcggtgcaagtactttgtataaaatgcgctttactgatattcgtacaggccaaaaagtagaagaacgttttaaaggggatgatatcctcgatactatcaacttaacacgccgtgcggtcagtttctcgtatatcgatggtgatgaatatgtctttatggacaatgaagattatacaccttacaccttcaaaaaagatcagattgaagaagagctgctgtttattccagaagaaggcttagctggaatgcaggtcttaactatggatggacaagttttagctttagagttaccgcaaactgttgatatggaaattatcgaaacagtaccgggcattaaaggtgcgtcagcgagcgctcgtactaagcctgctactttaccaacaggattagtcgttcaagttcctgagtacctctctacaggggataaaatccgtattcatattgctgaacgtcgctatatgggtcgtgctgattaa

SEQ ID NO: 313673 - DNA, 1242 bp, Proteus mirabilis
atgtcagaagtcacatccattgctaaacgcccatctatactcggtggtgcgatgattattgccggtacggcggtaggcgccggtatgttctccatccctattgtgacttccggtgtgtggtttaccggctctatctttttactcatttatacttggttttgcctatttatgtctggcttaatgatcttagaagttaatcttcactaccccctaggatcaagctttcatacaattaccaaagatttattaggtaaggggtggagtaccattaatggtctttctattgcttttgttctctatattttaacttatgcctatatttctgcaggtagttccatcattgtgcaaaattttgctaatgtggttagcttgccacaagccgttgcaggcttactatttgctcttgttgttgctttcttcgtttggttatcaacccgagccgttgatcgcttaagtaccatattaattggcggtatgattgtggcttttgtatttgctatcggtggattatttaccgaagtgaaaatgccagtattatttaatacaacagaaagccatgccagttatttaccttatgcactagccgcattaccttatttattaacctcctttggttatcacggcaatattcctggattagtcacctactaccgtaaagacggtaaagccgtgatgaaaagtctattaattggtaccttgatttcgctggctatctacattttatggcagtttgttgtacaaggtaatattcctcgtgaaggctttaaacaagtcattgctgaaggcggaaatattggtaacttactggcacaaatgcgtatcaatacagcaaatacttccgtttcattcttattagacttgttctcatatatggcattagcgagttcatttttaggcgtgtctttagggttatttgattatttagctgatttctttaaattctcaaatacagggacaggacgtttaaaatcggccatcgtaacttttgtaccacctactattttagcgattatttttcctgatggcttcttgtatgctattggctttgcaggacttgcagccacaatttgggcggcgattattccagcattaatggcaaaagccagtcgccaacgtcatcagcaacaaagctttaaagcacctggtggcacctttatgattatctttgtgatcttatttggtgcaattaatgcgattgcacacatattagcaaactttaatctcctacctatttaccgctga

SEQ ID NO: 313674 - DNA, 846 bp, Proteus mirabilis
atgaaatttgttggcgcacatgtcagtgctgcaggtggtgttgatcaggctgtattacgagctcatgagatcaaagcaacggcatttgctctttttactaaaaatcagcgccaatggaaagcagcccctttatcaactgaatcgattgataaatttaaaaaaaattgtgaaatctatggctatggtcctgcacaaattttaccacacgacagctatctgattaatttagggcatccagaagaagaagcccttgaaaaatcaagagccgcttttctcgatgagatgcaacgctgtgagcaattaggcattgaattacttaattttcacccaggtagccatttaaaaaaaatcgatgttgataaatgtctgcaacgcatcgctgaatcaattaatatcaccttagataaaactcaaaatgtaaccgcagtgattgaaaataccgctggacaaggcactaacttaggctatcgttttgaacatctcgccgctattatcgatggtgtagaagataaatctcgagtgggcgtttgtattgatacttgtcacacttttgctgcaggttatgatctacgtaccgttgaagactgtgaaaagacctttgctgaatttgataatattgtcggctttcaatatttaaaagccatgcacttaaatgatgctaaaagcgaattggctagtcgtgtcgatcgccatcatagtttaggcaaaggcaatattggcaaagtaccctttacttatattatgcaagatacccgttttgatgggatcccacttatcttagaaacaattaatcctgatatttggccagaagaaatagcttggttaaaatcacaacaaactcaataa

SEQ ID NO: 313675 - DNA, 1116 bp, Proteus mirabilis
atgcaaaatttacataagcaaggtttttctatgtcagagcaaagtcaaacaaccacattggctaaaaaatgttttattcctgtttatcgctggctccctggcttgctgctaacaggtatattaaccgccctcgctatttacgtaggtgatattccatggttttccagtatggggttaggtgctcttacactggctatcttatttggcattattgcgggtaatacggtttatcccatcgctaaaccttatagtgatgaaggcgttaagtttgccaaacactatttactacgtgcggggatcatcctatacggttttagactcacttttcagcaaattgcagatgtaggtgcaacaggattaattattgacgctattatgttgacctcaacttttctcattgcaatgtgggtggggaaaaaatattttggtcttgatgatcaaaccgtcatgttaattggtgctggtagtagtatttgtggtgcggctgcggtcatggcaacagagcctgttgtcaaagctcaggcgagccaagttgcggtggctgtatccactgtcgtaatttttggaactatcggtattttcctctacccatggtttttccatcttaacgcttttgcgggttggttaccttttagtgaagaaacttttggtatcttcgctggttcaaccatacatgaagtcgctcaagttgttgcggtgggtcattcaattagtccagatgcagaaaatgcagccgtaattagtaaaatgatccgcgtgatgatgctggcacctttcttaattatcctttctacttatattagtaaaaagggccgtaaaacagtaggtgcgacaacagaaaaaagtccgataactattccttggtttgctgtgttctttatcttaatggctggttttaattcatttaatttaattcctgccgctattgtgagctatatcgttactattgatactattttattggcaatggcgatggtagcactaggtttaacaacgcatattagtgcgatacgtcaagcgggtgtaaaaccactactgctagctttatttctctttttctggctaacgttaggtggtgctgctattaatatctttatccaatctgtgttgatgtga

SEQ ID NO: 313676 - DNA, 891 bp, Proteus mirabilis
atgcgtattacattgcgacaactggaagtatttactgaagtacttaaaagtggttctacaacacaggcttcacaacagttggcattatctcaatccgctgtgagtgcttctttaactgatctagaaactcagttaggagtacaacttttcgatagagtggggaagcgcttagtaactaatgaacatgggcgattattatatccaagggcactctctttacttgagcgagctacggaagtcgagcagttatttcaatccggaaatggtgcattacgtattgctgctagcaccactattggtaattatattttgccacaaatgttgggtaattttcatcgtaactaccccgatattccacttgaaatgagcattggtaatacggaagaagtcgtcaaatcagtcagtgagttccgtgttgatttaggcctgattgaaggggcttgccaaagctctgaattgatcagtcaaaaatggctactggatgaaatggtcatattttgttcccctgaacatcctttagctaaggcgaaaacagtgacattagccgatcttcaatccgcgccgtggatcttacgtgaaaatggttcagggacgcgagatgtactcaatcatctgctgtttgcttcattacccggatatcgaatcgaaatggaattaggtaattcagaagcgataaaacatgctgtaatgtatgaaatggggattagttgtttatctcgccgagtgatccaagatcaaatagagagtggctctttaaaagagataaaggtcgaaggtctaaaattacaacgtactttatatttggtctatcaccgccaaaaacatgtctctgatgccctcaaaaaattactttcatattgtaatgctgaacatttaatcgacaacgcttga

SEQ ID NO: 313677 - DNA, 1488 bp, Proteus mirabilis
atgtcagaacaacaaacagataccgcaaaatcgggtgcggtacgcactttgcgtcgagaattaaaggcgcgacatttagcgatgatcgctattggtggttcaattggtacagggctttttgtcgcatcaggtgcaactgttgctcaagcagggcctgggggcgcattactctcttacgcattaatagggcttatggtctatttccttatgaccagtcttggtgagttagcggcatttatgcctgtttccggatctttttcaacctatggctctaaatatgttgatgaaggatttggtttcgcactaggctggaactactggtacaactgggctgtgacgattgcagttgacttagttgccgcgcagctcgtgatgctgtattggttccctgatgtggatggttggatttggagtgcgttatttttagctattattttcttgcttaactatatttctgtaaagggatttggtgaagcggaatattggttttcattaattaaagtatcgaccgtgattatttttattgcggtgggtattgcgatgatcaccggtattatgaaaggcgctgaaaatgcaggttggcacaactgggaaatcggcgatgcgccttttgctggtggttttgccgccatgataggggtagcgatgattgttgggttctctttccaaggaactgaacttatcggtatcgcagcgggggagtcgaaagatcctgcgaaaaatattcctaaagcagtacgtaaagttttttggcgtattttactgttttatatcctagctatcttaattatcagtttaatcattccttataccgatcctaacttgctacgtaatgatgtgggtgacatcagtgtgagtccatttacactggtatttaaaaatgcagggttactttcagctgccgctatcatgaacgcagttattttaacggcggtgctttcggcagggaactccggtatgtatgcatctacgcgtatgttatttaccttagcaagagaaggtaaagcgccgaaattttttggtaaattatctaaaaacggtgttccacgtaatgcactttatgcaacaacagtggttgcgggtttatgctttttaagctcaatgtatggtaaccaaacggtttatttatggttattaaatacatcaggtatgacaggatttattgcttggttaggtattgcaatcagtcattaccgttttcgtcggggttatgtagcacaaggtcgtgatctgaatgaattgccatatcgttcaggcttcttccctgtaggacctatttttgcctttatcctctgtttaattattacattaggtcaaaactatcaggcatttttagaagatactattgactggtatggtgttgtggcaacctatattgggatcccattattcctgctgatttggtttacctataaaatagtgaagaaaacacgttttattcgttacagtgaaatgcagtttcctgagcatattgaaaacaaaaaatag

SEQ ID NO: 313678 - DNA, 303 bp, Proteus mirabilis
atgatccttgttccttatttcctggttggtgctttcttagttaaagttgccatagaacgcagtagccgaggattattactgatagcgatacctgcaagcctctatggtttatggttactttatgcatcaggtgtaattaatttattactttccgtcgttctctatgcacccggtgtattaatatttttatattcacgaaaacaatataaagataagcaatcattaaatactagtgaaaaaatactactgatgatggtattaattggtgcaattcctgcttgtggctatttagtatttaattaa

SEQ ID NO: 313679 - DNA, 501 bp, Proteus mirabilis
atgagtgaaacaatgacagcacctaaggtcgtattaacggtaggaaatagcatgatgggggatgatggagccggtcctctgttagcggatttaatggaagcaaacccgattgatggttggatggttatcaatgggggaagtgcgccagagaatgtttcttatcaaataagagcattacaaccgcaatgtgttgtcattgttgatgtggctgatattggtttaaaacctggtgaaataagggtaatagatcctgattatattgcagaaatgtttattatgagcacccataacatgccgttaaactttctgatagatcaattaaaggacgatatccccgatattactttcttggggatccagcccgatctggtgggattctattacccaatgaccgaagcggtaagaaacgctgttgataaagtttatcaaggcattaagtcttggcgagttgattactttcctgaacttgaagtctgtgatgaagatgatatcgaagaatag

SEQ ID NO: 313680 - DNA, 1212 bp, Proteus mirabilis
atgaagttaaccgttaaacaaatcgattctagtaagcctaaagaaaaagactataaactgtctgatggtggtggcctgtatctattggttaaaactaatggcggaaagtattggcggttaaaataccgaattgatggtaaagagaaacttttagctattggagtttatccaacggttacattagctgatgccagaagaaagcgtgatgatgcaaagagattactggcggatggaattgacccaaaccaacaacgcaaagaacaaaagcaagcttcaaagattgacagtgtaaacacctttaaaaatatcgctcttgaatggtatgagggcagaaaggatcgctggtctgttggttatcgtgatgacatgatggacgcatttgagaaagacgtctttccccatataggtaatcgcccgattgttgaaatcaaaccaatagaattacttgaagtgctttctattatggaaaagcgtggggcaaccgagaagctaaagaaagtgcgccaacgttgcggtgaggtgtggaagtacgcaattattactggtagggcagaatataaccctgcaccagatttagctagtgcctttgttccacataagcgtgaacactacgcccacctttcggtaagtgaattaccagagtttctttcttctattgataagtatatgggaagccagattgttagagtggcattaagggtacttatattaactggagttcgaccaggcgaattgagaaaggcggaatggtcagaaattaactttgatactggaatatgggaaatatcggctgaaaaaatgaagatgcgtcgaccccatattgtgccactatcagagcaggttattgatttgctgaaacagatacacccaatcagtggcagttatcaatatatattccctagtcgcactgattatagaaagcatatatcagatatggcactgaatacgatgattagacttatgggctatggtggtagagctacaggtcatggattcaggcacacaatgagtactatcctacatgagcaaggctataacacagcatggattgagacacagctagcgcacgttgataaaaactctattcgtggaacctataaccacgctcagtatattgataaccgtagagaaatgcttcaatggtatgctgattatatgggggcattagagaacggggataaagtcgttcacgataactttaagcatgtttaa

SEQ ID NO: 313681 - DNA, 1404 bp, Proteus mirabilis
atggggagtgagtggacacaagctaaactaggtgactatattgagtcttcactcggcaaaatgttagatcaaaataaaaacactggtgagtaccactgttatttaggtaatagcaatgtgcggtggggaacatttgagcttgataacctttcaaaaatgaaattcgaagcccatgagcatactcgctatggaataaaaaaaggtgacctaatcatttgtgaaggtggtgagccgggaagatgtgcaatttgggaagatgatatacccaatatgaaaattcaaaaggcattgcatagagttcgtactctacctggtttggattcagaatatttatactattggtttctattttcgactcgatctggctgtattgaacctttttttactggtacgacaataaagcaccttacagggaaggcattaaaggaaatacctatccgaatccctccaattgaatatcaacaatatggtgcgaaattattaagagggctagataaaaaaatcactcacaaccacaaaataaatcaaactttagagaaaatggctcagaccttatttaaatcatggtttgtggattttgatcctgtggttgataacgcactagatgcgggtttttttgaacaggatttagctttctctgatgaattactgcgtcgggttgaagtgcgcaaagcagtacgcgaaagtgataattttaaaccgttatcagaggatattcggcggttatttcctaatgcgtttgaagaatgtgctgagcctgcattagggcttggcggttggatgccgaaagggtggatgagtaaaagtatatctgatgctatttttattaatccgaaagtaaatttagctaaagatactgttgcgaaatttgttgatatgaaagcccttccaactagcggatattcaatagaagaagttagtgaaaagcctttttcgggaggaatgaaatttcagaataacgatatattattggctcgtataacaccgtgcttagaaaatggtaaaactggaatagtagatttcctgtcagaaaatgaagctggttttggttcaactgaattcattattcttcgtggtaataaaaacatacattactcatatattgcctgtttagctcgatatgaatcatttaggcaacacgttatacaaagtatggttggttcatcagggcgccagagagttcagaatgggtgctttaatgactataaaattgcagtgccctctggcgaagtaatgaatagatttgctgatatagtttcaccttcgtttaaaaagttaacacagaatacaaatgaaagccgttcattaactaaactccgagacacactcctcccaaaacttatctccggcgagctgtctctgagtgatataaaaatagatattccagaagaaacactcatctaa

SEQ ID NO: 313682 - DNA, 2922 bp, Proteus mirabilis
atgaaaaatatcgtaatacctacctcgttaagctgcttttttttacttttttcccattcaacatggtctgaaaccaatatttcacaaaccaaacaacgaattatcgaccaacgtaattattggttagatgagatcaaaaatggtgttatcacaactagccctcaaaaaggatcgagaaccgccgaattagatagaataatcagcaataattatcaagccattaccggcgaacgtagagaacttgccgaagcggataagtcacagtctcatacttatgtgtttaatacctatgctaatattttatttggtgataaggctaaatcgatcaactttagcgatattcaagcttatcaagatctcaataaattacatagcacaggcacctatgcttatgatacaaacaaaaaaagagtacgctcgatagattttatcttaaaagaactttttttacgtggtcgaccttatcaagtacttgataaagaaggtcattatcttgataattacaccactataacaggctcatcttatcccagtggtcatacgtggaacggatacaaacaagctgcagtgttatccatcttattccctgaaaagggcagtgaaatgtttgcccgagcaatagaatatggtgaaagtcgagttattgtcggagcacacttcgcaacagataccatcgcatccagaataggcaattattacctgctgtcacaaatgcttgcagatgatgacaccacccgcacttttgtagagcttgccaaagaagtccgccaaaatgttgctaaccaatgcaaaaatcaacattgcttaacgacctcgacaacaatcactaacgatgaaacaggttattacgcaaccaaagatccagagcctgcgccacgcattacccctaatgaaataccaacatctgccaacgctttactgcgtttacgctttgcctatttaactaaagagcaacgacaatctatcttagcgagtaccgcctacccgagtaattcattggctggctgggctgcaaacaaagatgatccaaacgccaattggggattaattaatctcccgaaagcctataatggccctagctatttctacaatcattttattgttaatcaaataactaatgaatttgactttgctgaatttggtcaacttgatgaatggaaaaatgatattaatgggcctggcaaattaatcaaacaaggcaatggcaccttgatcttatcaggcaataaccattttgctggcgttgaagttaatcaaggccatttactgctcactggtgaaaaccactatgcaaaaaattcttccattaatggtggtacattgcttcttgaaggaacactaaactctttactagatgtaaacaaaggagcattgctattaaatggtgggagcgttgattctcaagtcaatatcaataacaaagggatactttctggtaaaggaaaaattaataagctggctgtttattcaggaggcatcgtatcaccgggtcattcaataggtacaattaatatcgatgatactgttatttttaattctggtggcaactaccatgttgaaataaattcacaaggtgatagcgataaaataatcagtttgggtaccgcgacactgaatggtggaatggttaatgtatcgcttgaaaatagccaaaatctgctaacaaaagatgatgttcaaagtttatataacacaaaatataccattttaacggcagatcacggtgttaatggtcaatttactgatgtaaatccaaactatctttttttaggtaccacactgtcctacgataaaaattcagtaatactaaatgtcggaagaaataacaccgccttttcaagtgtggctaaaacaaaaaaccaactatcaatcgccaatgcgatagacgcattacccttgggacatcctatttatgaaagcattataagaatggatacagggaatgatgcccgctctgcctataatcaattaacaggtcaaattcatgcggatatcttatctaaccaactcaacaatagccggcaaataaaagaaacactcctctctcaggttaaaaatgcagaaataattaatagagagaaagaaagtacagataacaaaggtcatgtttgggctaaaattctctctaattgggaaaagacttccaatgatggcaatgcaaatagctatgatgcttccacttatggcgtactattaggtgcagatcaatgggttagtcacgataaaatgctgcttggtattgcaacagggatcaccaaaacctcactatctggttataacagtcacgcaaatagcgaaaattaccacttatcactctatggtggctatgattttgacacaatcgcgttacgtgctggtgcatctaatacctttcatcgtatccatacaacaaaatcggtcaactatggtgtacagtcagataaaaataaggcgaattacaatgggaacactagccaaatctttattgaagcagcttatcccatcaccctctcagatacacaattagagccttttgttaattttgaatatgccaaaacaaaaaacgccaccattaacgagcaaggtggacgagcagccttacaagcccattcgcaaactctagagtcaaccacctccactacagggctacgtttaaataaccaatggaaatttaacagtaaatcaacggtttctctctatggtgagctaggctggagacaccaatataacgatgtagaacgagggatccatttacgcttcacacaaacccagcctacatttatagcaaatagtgttgatgctgctcgagatgcactggtggtaaaagctggaacaactatccaaattaatgagacatcaaaagtctcaattggatatagcggattagcggcaagaaatcagcacgataatggtattgatataaaactctctatcgcgttctaa

SEQ ID NO: 313683 - DNA, 2514 bp, Proteus mirabilis
gtggcactatcatctgcgatgctctacaaagagatagagcaactctcgttgcgggatcagcaacgattgagaaaacgcttacgtggcgttgataaaataagtaaagaaacgtcgaaacaggcggtattaagcgagattgagcaggatattattgtcgcaaaacagcgtatattaaatcgacaagctcactgtcctaaaattgtttatccagaaaacttgcctgttagccagaaaaaggaggctatctacaatgcaatcaaagataaccaagtggttattattgcaggggaaacgggatcgggtaaaacaactcagatcccgaaaatttgtctcgaattagggcgaggcgtaaaaggttatattgggcatacgcagcctcgacgtttagctgcacgctctgtcgcagagcgaattgcccatgaattaaacacaacattaggtgagtctgtcggttataaagttcgttttagtgatcatgttggtgataacacgctggttaagttaatgactgacgggattttattagctgaactacaacaagataagctgttattacaatatgatactattattatcgatgaagcccatgagcgtagcttaaatattgactttattcttggttatttaaagcagcttttacccaaacgcccagatctaaaagtgattattacttctgccactatcgatcccgagcgtttttctaagcattttaatcaagctcctattattgaggtatctggccgaacttatccggttgaagtgcgctatcgtcctattggtggtgacgctttggatagtgataaggatatgactgagggcattattgatgcaattgacgagttaagtcgagaaagtgcgggtgatattcttatttttatgagcggtgagcgtgagataagggataccgcagaggcattaaataaattacaactgcgtcataccgaagttttacccctatttgctcgcctttctaatagtgaacaaaaccggatatttcagcctcataccggaagacgcatcatattagcaaccaatgttgccgaaacttctcttacggtaccgggtattaaatatgtgattgatacgggttatgctcgtattagtcgatatagttatcgaactaaagttcagcgcttacccatagagcctatctctcaagcttctgcggatcagagaaaagggcgttgcggtcgtgtttctgatggtatttgtattcgtctttactctgaagatgattttatttcccgtgcgcaatttaccgatcctgaaatactaagaaccaatcttgcttcggttattttacaaatgacctcgataggattaggggatattagcggatttccttttgtacaagcgcccgataaacgcaatatacaagatggtgtacgcttattagaagagctgggtgccttacaagagggtactgataataaaggtgcttatcgtttgacgccgatggggaaacaattagctcagcttcctatcgatccaagattagcgagaatggttcttgaagcgcgcaaatatggtgcagttagagaattaatggtgatcacatcggcgctttctattcaagatcctcgtgaaagaccgatggacaagcaacaagcatcagatgaaaaacatcgtcgtttccaagataaagattcagattttctttcattactcaatttatgggactatttaaaaactcagcagaaagaattgagtcattctcagtttcgaaaacactgtcgccaagagtttttaaactttatgcgagttagggaatggcaagatgtctatacgcaactacgtcaagttgttaaagagctaggctttccaattaatagtcaacccgccgcttttaaaagtattcatatggctttattaagtgggctattatcacatatcggacaaaaagatagcgataagcaggaatttactggcgcgagaaatgcgcgttttgctatttatcccggctctgggttgtttaaaaaaccgcccaaatggactatggtggcagaattagtagaaacatcacggttatgggggcgtattgctgcacgcattgaagcggagtggattgaacctatcgccacccacctagttaaacaccactatagtgagcctcattggtcaaaagcacagggtgcggtaatggctaatgaaaaagtcaccttatatggtttacctattgtggcctcgcgattagtaaattatggcaaaattgatccactattatgtcgagagctatttatccgccatgcgttggtagagggcgattggcaaactcggcatgctttcttccgtgaaaatttaaaattacgtaccgaggttgaagagttagagcataaatcacgtcgtcgcgatattttggtagatgatgaaacgctgtttacattctacgatcaacgaataccacaagatgttatctctacccgccattttgataaatggtggaaaatagcgcaaaagaattcacctgatttgctgagctttgaaaaaaagcatgcttatcaaagaagatgctaa

SEQ ID NO: 313684 - DNA, 180 bp, Proteus mirabilis
atgactcagtttatctcaccaacacaagaattacgccgtttaatccttgctgagtattgcgacagtatgatcatctcatttgtgagaaagaacgtcagcgcattacatctatttcacgcacaacaattacacactagaaaacgaagaacgtttccctgctcgcaaagtattgaggcgtaa

SEQ ID NO: 313685 - DNA, 186 bp, Proteus mirabilis
atgagatttgaaaaaaacagcttaattgctgatggattcgcacactttgaaattagccaagagtctattttaatttatcatagagtcgaaccaagaatagatagtcgcctgtttgctaaatgcatttctattaaacataaaaatttttttaagttagtaaaaaagaatgctaagagtttacgttaa

SEQ ID NO: 313686 - DNA, 207 bp, Proteus mirabilis
atgaataaacttattccattagatgctgctgtatataaggcacaacaaactagttcactgtttacggcgatattggcgcaggcgtctacagaatgctctaaagaacttttagatcttatttccattgcatgtgatttaaatagtgagattaggcagtcattacacgatgctttagttaatgtacctggaggtgaatgtcatgcctga

SEQ ID NO: 313687 - DNA, 321 bp, Proteus mirabilis
atgcctgatatttatgactaccttgtaaaagccgatttagactcaatgagctcagaagaattacgaaactgcagaaggatttattctgaaatgtgtgatgggctgctatcggtattacgtgcaatgggagaatgtgctttttgggtttgtacaaatgaatattaccatgaaaaccaagctaaaaatgatttacgacgtgtcggtgattcattgatgtatttaccttgtttgattgatgcgatgcgttttaatgagcatgaagcgaaatttaaaatctatcaacgtgagggatttccttatacggaggtaggcaatgactaa

SEQ ID NO: 313688 - DNA, 360 bp, Proteus mirabilis
  misc_feature (211)..(220): n is a, c, g, or t
atgaaagcgatatttgttgaattaccagcttttgaacgacatagagtaagctatttttccgatgatgagtttcgacattttcagtttatgctgttaaaagatccattatgtggtgatgttattcagcatactggcggtttacggaaagtgaggttttctgatccaaaaaggaacaaaggtaaacgcggtggtactcgaataatctattatnnnnnnnnnnattattggcattcggaaaaatctcaatttctattatttactatttacggtaaaaacattgctgatgatttaacaataactcaacgtgaacagctgagaacaatgttagaaatgattaaaaaaaggggggatcatgactaa

SEQ ID NO: 313689 - DNA, 702 bp, Proteus mirabilis
gtgggctatagtcatggagaagaaattgatagccaatcaagtatcagtggttattattctcgcgacttttctcaagctaacttatctgctaacgcaagttatgtaccacaacaatatcgtagtgttggtgcatcaattaacagtggtattacagttacaactcaaggtattgcgttgcatcgttcagctaatggtgatactcgtttaatgattgaaacaccaggggttggtgatgtacctctagatagtggcgttatcaaaactaatcactttggacttgcagttattcctaatgttaatagttatcgtaaatctacggtttctattaataccagtcagctacctgaaaatatagaaacgctagaatcaacaactgatattaccttgactaaaggggcgatagggtatcgcagtttatcagtaatgaaaggggaaaagttgtttgccattatatccctaaatgatggtaagaaaccgccttttggggcaagtgtacgtaatgcggataatcgtgagttgggtattgttggtgaagatggtgtgacatggctagtaggcatttcatcaaaagaaaaactatctgtttattgggcagggaaaaaacaatgtgagttgtcacttcctgaagatttagcatcgccaactagcatgttattgctaccttgctcttcaccgactatatcaaaaattacagaaaattaa

SEQ ID NO: 313690 - DNA, 399 bp, Proteus mirabilis
atgcgtattattgaaaatatttgctataaatttcatagtgtcgcaaggcaattacaatcaagacatagcgatagatctactcttgagattgaagatgaatatgatgttcaggatttattacatgctttattaaaattacattttgatgatattagagaagaggaatatacaccaagttacgcgggttcatcatcaagggttgattttttattaaaggatgaaaatattattattgaggtcaaaaaaacaagaaaaaatttaaaggcaaaagaggtcggtgaacaattaataatagataaagcccactacactgcacaccccaactgcaaatcattgatttgctttgtttatgaccctgatgcaagaatatccaatcccaatggggttgttcaagcatga

SEQ ID NO: 313691 - DNA, 228 bp, Proteus mirabilis
atgaatacagttaaattagatacctgtggacatttatgcccatttcctttaattgaagctaagaaagctattgcatcaatgaatacgggtgatgtactggttattgaatatgattgtgctcaagcaacagataatattcctcgctgggcggcagaagaggggcatgaagttactgagtttgaacagatctctgatgcacaatggcgtatgcagatcaaaaaaggctag

SEQ ID NO: 313692 - DNA, 1038 bp, Proteus mirabilis
atgataagtttatctcatctatctgggctttttcttggagtcctacttggttttgtcatgcaacgtgggcgcttttgtatggctggtggtctacgtgatctctatctttttcgtgataatagaatgcttatcgctattttgattgcgatatctattcaaagcgtagggttatttatcttctcttattttgagatagcgaagatccccaacagcgcttttccttggttagcgacgattatcggtggaattttatttggtattggcatgggatgtgcgggttcttgctctacaggagcctattatcgagcagcagaaggtttaataggaagtatattggctgtcattggttttattatatcgagttggttaattaggcaaccaatattaaaaaatttattccaacctattactgcacctaagtttgaaagtgggactattacccagacatttaatatccctccttatattgccattattgttttagtagtagtgacagccatactcgtttcccggcatattaagaaaagtgcatcaataaaaattccaaaaatgaaagctaaaaaaacaggtattgcccatatacttttcgaagcaagatggcatccttttgtttctgctatcgttataggaattattgcattattggcatggccatcgagtttagctgatggaaggattggtggtttaggtattagtgggcctagtgcgcaactctttactttagttacagagggcaatttaaaattttttaattgggccggatttttattgatgggtatttttataggtgcctttattgcagctaaaggaagtaatgaatttagactacgtaatcctggtataaaaactatctctaaaagctttgctggtggtttgcttatggggattgggagtggtttagctgggggctgtatgttaggtaatacattggtgaataccgcttggttttcttggcaaggatgggtatttattccatgtattattatcggtagttggattgtcagttattttacgattattcgatttcaaaaatattaa

SEQ ID NO: 313693 - DNA, 249 bp, Proteus mirabilis
atggatccatcacatcaaaaatactattctttacttatttctacccaatttacgtttattggcgctatagctagttgtatcactcttattaaagattattgccaaaatctagatgttctaacgtataagcttacctttctaaaaaaattaaaaagcaaattaaatcagttagatagtaatattacatcaataatattactaggtttaataatgttcacactctcttttataacaattaaaggaaattaa

SEQ ID NO: 313694 - DNA, 708 bp, Proteus mirabilis
atggatattcctcgtattttcactattagcgaaagtgagcatcgtattcataaccctttcacaccagagaaatatgccaccttaggtcgagtattacgaatgaaagaaaactggcaaattcttgatctcggaagtggctctggtgaaatgctatgtacttgggctcacgattacaatattacaggtattggcatcgatataagcccactgtttactttacaagcaaaatctagagcagaagagttaggtgtcagccatcgagtacattttatccatcatgatgcctcagattatattagtgataaaaaatgtgatatagcagcatgcataggagcaacttggattgctggtggtgtaattgaaactatcgagctactagcaaaaagtattaaaacaggtgggcttattcttatcggagaaccatattggcggcaaattccaacaacacaagagatagcacaagcttgtggtgcttcatccatatcagattttttaactttatctgagcttgttatctcttttgacaatcaaggatacgatctagtcgaaatggtactggcagatcaagagggttgggatagatatgaagctgctaaatggatgactatgcgccgttggcttgacaaaaatagtgccgatgattttgctcaagaaattcgaacagaattgactatagcccctaaacgtcatgttagttttacacgataa

SEQ ID NO: 313695 - DNA, 531 bp, Proteus mirabilis
atgaataaaatgcttcttgctgcgatgatcgcaggtattttttcatcaacagtttatgctgcttctgataataccattcgctttcaaggtgaagtttctgatgaaacttgtactgtaactgttaatggtaattccacacttccagttgttttattaccaacagtaccagtcactgcattagatactgctggtaaaacagcaggtcagacaccatttactatcactgtaagtggttgtactggttctaaaccaaccgatacaaatattaaaactatttttattgctaataatctgacaaaagaaggccgtattggtaatacagcatcagataacaatgttagcttagaaattattgatcctgcaaaaacaggtaccaaaattgatttaactggtgttggtaacgaaggtttagtgttaaaagcaaacgaaaaatcagcatcttatgattatgctgtacgttattatgcggatgacattgcaacagcaggtaaagtagaaggtagcgtgcagtactctatctcttatcaataa

SEQ ID NO: 313696 - DNA, 1833 bp, Proteus mirabilis
atgaacgacttttatattgaacgaattcaaattgaaggtggatttttggatggcctagatatacgtctaaaaacaggactcaacactatcattggtgcaagaggtacaggaaaatctactctggtggaacttatccgcttttgtctagggatcaagggccacacatcagactcaacagcaaaatcgttaagtcacgcacgagctgtcctcaaagatgggcaagttagcatcactctttccaacgaaaatgaaagttatagtttttcaagaagcgcagattttgacacaacacctgccataccacataaactaaagttaccgctaattttttctcaaacagaggtagagacaatcggattactaccatcaggccgactaaacataattgataattttatcagctcccttaaagatgttaaggagcaagagttactagctgtctctcaaatacaatcttattcatcggaattagtaaacctcacattaaaaataaccgaaaacgaggataagactttagtcttgccacaattaatggcaaaacttaaagatctacaagatgaagaacaaaaggtcatagcagtatcagagcaagccgctgaaaagtcgaaagagttaaatcagcttaccaatgagtatgtttccagatccagagtgattgatgcagcaaaggaaactctcaaagctaaccaagatttagctaactcaattcattctagtattagctcgaaaaacttcattttaccagaagcaattcgaggtatacctaagtttattgatgctcaagacatacaatctaaagcaatctcctccataatcgctgagcttgaaaaaataaaagcaattgatgatatatatatacaagaaattgatcaacttgagcaatatcaagcagagttgacaaaaaaagggcaagttatcagaaaagaagttgatcagtacaaagatggtgctggtgagctatctcgcaaaatgcagaatttgagaaaagaaatatcgcagattgaatctgttaaaacggttaatctggaaataaaaaaccgagctaatcagattcgtaaaaagcgggatcaagcactagatgaactagaaaaggctagaagtagagtcacgcagctgcggcaagatgtttgtgaccaaattaacaaggttcttcagccaaaaatcagggttaagcttgaagaacttagccaattggaagaatatgaggaggttcttgttaatgctatgaaaggtagcgggattaggtataacgaccttgctccaattatcagcatggcaattcccccaagggttttacttgagattgcagagcgagacgacgttaatgaatttacatctttggtgtcaatatctaaagatcgagcctctaaggttcttaatgccttgaagtcatctgttgataaaatcgctactgttaaactcgaggacgaaattaattttgaactcctcgatggttctgaatataaaggatttcaagagctatcaacaggtcagcgctgcacagtaattctacccattatcttggaacaccaagatactgtgttgattgttgaccaaccagaagaccacattgacaacgcatttattgtggacactcttatagcctcaattcaacgtcgagcgcaatcggcccaaattattgtcaccactcacaatgcgaacatccctgttctcggacaagcatctgaggttatccatctaaattctgacggaacaaggggttatgtggtgaacaaaggggagctatatagcccgcatatagtggaggcgatttctaaagttatggagggtggtaaagaagccttcaaacggagagccaacttctatggctaa

SEQ ID NO: 313697 - DNA, 900 bp, Proteus mirabilis
atggctaactctcctgaagaagctcttgaactattaaagtctggttcaataggagatcgcttcaaagcggctaggtatttcattacaaataagcatcctgagcataaacctacacttgttgaaaagagaaaagttgagcgcgttagacatataaaaatggctctaaaccaagcaataagcggaattgatatagtcgaacaaagaacgaacttggatattaatgattttgactcgtctactgaagatgaacttaaaaggtatctaaaagcacaggccattcaagagttttcaggaaccattatccatgagctttcaaagaaaattggtttgttagaaataaatctaagggatgaatttttagagtttgcgggaagtgctactgagaaaagttttaaaaatttgaaagctgtatttcaagggatagagaatcttcagaggtcagcaacaactcctaaaacttcagaagttgatttatcccagctaatccaagatttattataccaagagggtaacactgaggatattcgttttaatttcgaaggtgcgcagccatgtataatcagaacagactcatctattctaagtttagcattatcaaacgctattagaaatagtattgaggctgtgaggctagtccctaactacactgagttgaacaatattgtgatttgttggggaaaaaatgatcatgatgtctgggtgtcaataattgataatggagttggcctccaaggcgatcccaaagaagcatttaaagtcggtagcaccaacaaagatggtcatatcggttttggtctcggaatccttgaacaatgcatggaaacgcttgggggcttagctgagctttcaagcgtagaaagcggtggtgcccagttagttttgagatggaatattgaataa

SEQ ID NO: 313698 - DNA, 1437 bp, Proteus mirabilis
atgaacagtagaaactgtcacatattatgcatcgaggatgaggaagacgtaagaattactcttcattccgagcttatgaaaatatctaacagagttgaagtgacgtttgcaacaagtagagatgaggctgtttcaatattagaacaaggagcgttttttgattacataacgctggaccttaccataccagctatttcaggtagctttgacaaatcgcctcaaaatggtttggctgtcttaagcattgccaaggagttatgtccaggaactcctgtattaatcctcacagggactagcactcttcgcatgatcggtcaatttttagaaacatctaataatgttgatatttggtcagagggacgtagccgtcctacagtatcgcatcttactaaagccgatttggtggatttcgctaaagaaatagaaccacgtatttcagctgttcttgagttaaatgaagtcgaactctcattttcgtttgatagcttaccacttccgcatgaccgcttaattagaattttagccaagcgggttggagcgatcaaagttgatattgccgtcattggcggtggctactctgaagcaaaggtatactccttagtattatctgatatacgaggtatcgaattaatccgttgtgttgccaagtgcggaaagcgttcagaaattgatatagattcactaaattttgatacgcatgtagtaagactagagccagaggccacaccaagaaaagtaactcatctaaggtatggcgcaagtgattcgtgtgccgttttttatagtctagcctctaactatccgttgtcttttttttctgcttgtagcgataaattggtcacggaaagtattagaaaatccctatgtagcattttgtcgaactggcacaaaagatctgttcaagaacgtaaaacaattcgcgacatccgaagaactttattaagcgatgataatttccacaggatcactaaacaatattcaatctgtgatgcaaatgaattcgaagatcgatctctacagtgtaaaatttcatgtattcatggggacttacatggtgaaaatgttttagtaagtcaggaaaaagatggtagcactttgattgattatggtgacgttatgcaagggtgctctattttagatcctttgaccctagagtgtagctttctatttcatgaaaagtcaccgtataaaaattggccgactctagaggctataaagcactggaattcgttagaggattatttaatagactgtccttatagtgatgaaattaggttctgtcgtgaatggattcaagaaattggggttaacaataatcgtgagctggcagcttgcttatattcctacgctttacggcaactaaagtatgatgacacagataaagaaaaagcactggcattaatacataaatcctttgaattgtttgataagtcttaa

SEQ ID NO: 313699 - DNA, 492 bp, Proteus mirabilis
atgttgagcattaaagatttaaaaaaacatctaaagtatgataaatccactgggttatttacccggttagtatccgctaacaataaaaccaaagtaggcgacattgctggattttatgactacaaaggctacttgagaattatggtaaaaggtaaagcatactctgcacataggctggcttggttttactgttatggcgaatggccaactggtcaaatagatcacataaaccagataaaggatgacaatagaatttgcaatcttagggatgtcaaccaaacgttaaataaattaaataccaccatgtattccaataatagaactggagttaaaggtgtcgttcataacaatagaaaaggaaagccatataaagcatttataaggttcaataattcacttatatatcttggcggatatgatgaaatacctcatgcagctacagccagagaaatagcggactattttatcttgaaatatggcaaaccttgttga

SEQ ID NO: 313700 - DNA, 612 bp, Proteus mirabilis; identical to SEQ ID NO: 294728

SEQ ID NO: 313701 - DNA, 804 bp, Proteus mirabilis
atgttaagttttgaacagctttccattgatattgcgcagtttcgttggttaggaaagcgcacttggcagcctttattaaaatctatttctcttgatattaaacctggcaaaatgctggctttagtggggggcagcggtgaaggtaaaagtttactcctgcaaagtgcattgggactactacctgctaatatgcgaacccgaggcacaattaaacttaatgggcatccgttaaccgagcgagagcttattgcttatcgtggtaatactttttgctatattcctcaaggtgtaacagcgcttaatccgttaattagcattggtgaacaactgggccgttcagcgcggttaagtggtgctgatatcacctatgaagatattaaacaccaatttggtttatatcacctctctagctcgttagtgaaaacttaccccgcaaaattatcggggggaatggctaaacgagtactcgcctgcaacgcaacattatctaatgcacaatatatactggctgatgagataacatcatggcttgatgatgaacacgcttgtttattgctagagcatttaaaagagttatgtcatcaaggtaaatcagtcctatgggtcacccatgatttagctttggctgctcgttatgccgataccattgctgtgttgaggcaaggggagctaaatgagatagtcgctgctaaagcgctttatcatcatggtgggagtgagtggctaaaaacattgtggaatgcactgcctgaacagcagtttttagatctacaagagggggcttgcaacccatacccatattga

SEQ ID NO: 313702 - DNA, 813 bp, Proteus mirabilis; identical to SEQ ID NO: 294726

SEQ ID NO: 313703 - DNA, 978 bp, Proteus mirabilis
ttgtcagtaatacgtcaaacagtaggatttttcctgcgattattatgcctgctgctggtaacaacagcaggtgtttttattttattaagtttttcgccgattgatccgatcaaggcctatatcggtagtgatttgctaaacgttccgcctgagcagtatccgctgatagcggctcgctgggggatggatcagccactatggatgcgtttttggctctggtttagccagataatccaaggtgattttggttattccatgctctataacatgccggttattgatgttattcgccaacgggcagggccttcgtttatcctgcttttttctgcgtggctattttcaggtgtaataggggtgttaatggggttagtggcaggacgatatcttaatcgttggcctgataggatcatctcaaccctctcttatttgctggcctcattaccgactttttgggttggattgctgttgttatcgctgttttcggtaacgttacactgggcacctatttgctgtgcatggccgatgggcagtagtgctgaagcagccacattgggccaacgtttttcgcatcttattttacctatgatagcgttaggattattaggtacaggtaatatcgcactgcatactcgcgcaaaagttgctgaagtgatgggcagtgaatttattcattttgctaaagcccaaggtgataaaggttgggctatgatgctttttcatgttctacgtcatgccattactcccgcactttgcttacagtttgcatcaattggtgaattgttaggtggttcattattggcggagaaggtttttgcttatccgggattagggcaagcgacagtagatgccggattgcgtggggatatccccctattaatggggattgttgtatttagcacaattctcattttctttggaaacagtatctctaactacttgttacgacgaattaataaaggaattttgcgcgacttatga

SEQ ID NO: 313704 - DNA, 1584 bp, Proteus mirabilis
atgtctattcggtttagttggcgaaaatcgtttattgctttatcctgcttagccgcacttagtgttcctgttactacttcagcacaaaccttaaaattagccattggtgaagagccgacagaaggttttgatcccatgttagggtggagccatggtagctacttactgctacacagcccattattaaagcaaaatgcggatctgacttggtatagcaatatgctcagtgattatcagcctagtgcagagggcacaacatggaagctgacgttaaaaccagatttgaaattttctgatggttcccctttaaccgcaaaagatgttgcctttacctataacaatgctgcggcaagtggcggtaaagtggatatgggaaactttctttctgcaactgcagatgatgatttacatgtcactattgctttaaaagcgcctcaaagtacttttgttaatgtattaggctcgctaggcattgtttcagctgataaatatgatgaaaaaacctatgcacaaaagccgattggtgccggtccttatcgtatggtcagttttcaaccgggtcagcaactcatcgttgaggcaaacccttattatgcgggtaagaaaaatgatttcgaaaagcttatctttgtttttcttgatgaagatgccgcttttgctgccgctcaaagtggacaactaggggttgttcgtattcctcctgccaccgcagccattgctaaaaatttgcctaatgtaaaattgtgggaaagagccagtgttgaaaatcgtggtatcgtctttcctatggtgaaatcaggtgagaaaaatgcacaagggtatgatatcggtaatgatatcactgcagatatcgccatccgtaaagcgattaactatgcccttaaccgccaattactggcagagcaagtattagatggatatgcagttcctgcttataccggcgtaaaaggattaccttgggatcaaaccgaggccgcatttaaagatggtgatattgaaaaagccaaacaaattcttgatgatgcgggttggaaactcaataaaaatggcattcgagaaaaagacggtttagaagcgaaattgacactctggtacaccagtggtgatgcaactcgtcgtgatttagcagaatcaattcgtgcgttagtgcaacctcttggcattcaaatggatcttaagtcaggaagctgggataccgtagagcgttatatgcactcaaacccgactttgtttggttggggaagtcttgatccgatggagctctatcatcactatagtatgaatgccgcaggtgtgggttactataatcctgggtattataaaaatcctgccgttgaaaaacatttacaagcagcattagatgcaccgacatggcaacaagcggtaccacattggcaagcggtagagtgggatggtaaaaatggcgtcggtatcaaaggtgatgctgcttgggcttggttaatgaatattcagcatacttacttaaccgatccttgtgttgatttaggcactggcgctccggaaattcacggttcatggtcattattaaatagcgtagatacttggaagtggacttgtcagtaa

SEQ ID NO: 313705 - DNA, 522 bp, Proteus mirabilis
  misc_feature (13)..(22): n is a, c, g, or t
atggctaaatgtnnnnnnnnnnatgttacatggctaaatatttatcgacgtcagtttttattggagcatggttattactttgagccgggtttgcatcaccaagatattccttggacgacagaagtgttattaacggcgaaacgggtaaaatatatcgatgagcgttattacgactattttattcattctggctccgtgtcgcatacgacacccgatgatcgtattcatgtaagaacaatttataactatatgaaaatacttgagatgctggatgctattaatcaacgccatgctgagatagcaaaaacgatcaatgcttgttattggcaaatagccaaagaaggtttaggtattattcattctattgatgcgattagttcaccagaaaccaaaaaacagatagttaaggtattttttgagcggggaatttgggcattaatttggaaaaatgcgaaagattttagattaaaatggcgtttagggcggcgttattttcgactgaaaaaaatattagcagaataa

SEQ ID NO: 313706 - DNA, 537 bp, Proteus mirabilis
  misc_feature (513)..(522): n is a, c, g, or t
atgtcctcttcttttccccaattaagtattgtggtggcggtttttaatggtgaaaaatttttaccacagttttttaattgtttacatgcacaacaactggaaaactgggaacttattttagttgatgatggctctactgataactctcgtcagatcttagataaatgggaaaaacactttcccaatgtcactattttaacacaagaaaaccaaggtgtttccgttgcgcgtaatacaggatttgctgttgcaaagggggaatacgttgcttttcctgatattgatgatgtgatagataaacgcatgtatccccgattacttgaaattgccaaggccgataatttggatgtggcaacctgtaatgggaattatgtttatgatgataaaaaccgaccaacacgccctatctttccttcaacgcgtttaacaaccacagaggtattaaccgggcctcaatggcttgaacgtgctcttgaatcgaaaaagttcttacatgttacatggctaaatgtnnnnnnnnnnatgttacatggctaa

SEQ ID NO: 313707 - DNA, 513 bp, Proteus mirabilis
atgcgtgtaccggcattacgtgcttatgaatcagcaccagatcccaaaatttgtatctcttatggggcttgtggttgtggtggtgggatattccacgatctctattgtgtatggggtgggagtgaaaccatcgttcctattgatgtgtggatacctggttgtcctccgacacctgcagcaactatttatggttttgctgtggcattaggcttattagatcaaaaactaaaaggtcaaaatcacactgaagtggataatgagcaagcgtcactgttactgccgtcgatccctcttgatactcgcgtaatgatagagcgtgaagctcgtcgtcttgctggttattatcaagggcgacaaattagtgatcatttcctcactttacttgatggtgccacagtacaagaagtcagtgggcgtgttgatgaatggttacgccaagcgaatgatcctcgtttagcggaaattgtaaaacgactggtgcattcattaaaccaaggaggtgttcatgtctga

SEQ ID NO: 313708 - DNA, 303 bp, Proteus mirabilis
  misc_feature (247)..(256): n is a, c, g, or t
atgagtctaccagaaattcccatcaatcatcatgtcagccaacctatcacattaagtgatcaggtgaaaaagctgaaaaaaacgttattgaaagatattcaacgttccgcgtatgtttatcgtgttgactgtggtggttgtaatggttgtgagattgaaattttctctgcaattacacctgtttttgatgccgagcgatttggtatcaaggtggttgcttcacctcgccatgctgatattttgttannnnnnnnnnggtgccgtaacacgccaaatgcgtgtaccggcattacgtgcttatga

SEQ ID NO: 313709 - DNA, 555 bp, Proteus mirabilis; identical to SEQ ID NO: 300531

SEQ ID NO: 313710 - DNA, 1734 bp, Proteus mirabilis
gtgagctatcaaaattatgtcagtagaaaagagggaaacgaactcggtgcgggttatgttgctaaagttcgagaaaaattcccatcagctattcttgatgaagagcgacaaaccgctgatcaattgacgataacagttaaaacgggatcactgcctgaagtggtggagtatctatattacggtttaggaggctggttacctgttttatttggtaacgatgaacgtagtttaaatggtgattatgccgtctattacgccttatcgatggaagagggtgaaaagtgctggatagtcgttaaagcacacgttagtcctattacacttgaatttccttctgttaccccgcgagttcctgcagcagtatggggagagcgtgaaattcgtgatatgtatggtcttattcctgtgggattaccggatgagcgtcgtttagtgcttccagatgattggcctgaagatatgtatccgttacgtaaagatgctatggattatcgccaacgtccaacgccaaccacagaaacagaaacttatccgtttgtgaacgaaggcaaacaagatgcgcgtgtcgttcctatcggccctatgcatattacgtctgatgaaccgggacatttccgtttatttgttgacggtgaaaatattgttgatgctgactatcgcatgttctatgtacaccgtggtatggaaaaattggcagaaacccgtatgggctataatgaagtgactttcctatcagaccgtgtctgtgggatttgtggctttacacatagcgtggcatataccacttctgttgaaaatgcgttaggtattgaagtgcctcgtcgtgctcatactatccgttctattttattagaagttgaacgtctacatagtcatttattaaatatcggtttagcaagtcactttaccggatttgataccggtttcatgcaatttttccgtattcgtgaaaaatccatgcagattgctgaaatgctgacgggagcacgtaaaacctacggcttaaacttaattggtggtattcgccgcgatattttaaaagatcaacgtattaaaactatccaattagtcagagaaatgcgcaaagaagtcactgaattagtcgacatcttactttctgcgccaaatatggaacagcgtaccgttggggtcgggattttagataagaaagtcgcgcgtgatttcagtccggtaggcccgatgatcagagccagtggttttaaacgtgatgtacgctttgatcacccatttgcagattatggcaacttaccattaactctatttagttatgaaggtggggatgttttctcacgtgtgatggtgcgtattaaggaagtgcttgattctatggcaatgattgaatatgccttagataatctgccagaaggaccgttattaactgaaggctttacctaccaaccttataaatttgcacttggttttaccgaagctccacgaggtgaagatattcactggagtatgttgggtgataatcaaaaattattccgttggcgttgtcgtgcggccacttacgctaactggccagtattacgttatatgttacaaggaaatacggtttctgatgcaccattaattatcggtagcctcgatccttgttactcctgtactgacagggtaacgcttgtcgatgtgaaaaaacgtaaatcgaaaacagtttcttataaagaaattgaacgttatagcatcgaacgtaaaaattcgccgctcaagtga

SEQ ID NO: 313711 - DNA, 1569 bp, Proteus mirabilis
atgaatcaaacaaccatgttaacaatcttaatgtttgcaccgctggtattttcgatattggcatttttaagcccattattgaaagcagcggcacgtcctatcgttacaggcattcatactataggtatttttgtcttagtcattgccgcgttaggcactgttgctgatgtgatgtcccatggcgaaatactggcagtagcgaaatgggttcatgttgatagtttaggggcactatttctagccattttaggcatcattggttttttaaccggcctgtattctattggttatatgaatcatgaagtggatgagggcgaaatttctgttcgtactttatgtaactactatggtttcttccacctcttccttttcaccatgttattagcgatcaccagtaataatttgatcttgatgtgggccgcgattgaagccacaacattaagctctgcttttttagtagggatttatggtcaacgctcttcattagaagctgcatggaagtacattattatctgtagtgtcggtgtcgcatttggtctttttggcacaattttagtttatgccaatgcagcaagctttatgcctgatcctgatcaggccatcttctggacagaagtgttgaaatatacacatcagttagatccaacactgatgcatttagcttttgtatttattttgatcggtttcggtaccaaaaccgggttattcccaatgcatgcatggttaccagatgctcacagtgaagcgccaagccctgttagtgcgctgttatctgcggtgttattaaactgtgcgctgttaatcattattcgttactacattattattgatgcagcaataggcactgaattcactcgtaacctattgttaatctttggcttcctctctgttgctatcgccgcgttctttattctgatccagcgcgatatgaaacgtttattagcgtactccagtgtggaaaacatggggttaattgcagtggctctgggtattggtggcccgattgggattttggcggctttattccacacgttaaaccacagcttagcaaaagcattgctgttctgcggctctggtaacgtgttactgaaatacggtacacgggatctaaatgtcgtgaaaggtatgtttaaagtaatgccattaagtgctgcattatttgctggcggtgctttggcattagggggcatgccaccatttaatgtctttatcagtgaatttatgattgttgttgcaggcttagcagctaagcatatgggattaacaattctattattattgttattaaccgtagtattaggtggattagttcgtatggtagctaaaacggtatttggtccaaaaccggatgtggttgccaaaggtgaattaggtctgttaaccacactaccgatgatcattttgattgcgcttatgttgttaatgggaacacatattcctaagccagtcagtgagttattggagaacgcagccaatatcgtgatgaatatcgatgagagtggatcaccaaattatacatggccaacaacgttaatcagcaatccatcaatatcggttcaggagaagtaa

SEQ ID NO: 313712 - DNA, 453 bp, Proteus mirabilis; identical to SEQ ID NO: 296873

SEQ ID NO: 313713 - DNA, 228 bp, Proteus mirabilis; identical to SEQ ID NO: 303321

SEQ ID NO: 313714 - DNA, 477 bp, Proteus mirabilis
gtgcgctctcgtgtcactaatttagtggaattaaaacccgatataactcatgaaaagttatgccaagcgattactgacagtttttttgactattatggtgagcgtgttgaagctgaaattatttcaccacaaaaattacctgatttaccgggttttgcagaaacatttgcaaaacaaagtagttgggagtggaattttggtcaagcgcctgcgttttcacatctattagataatcgctttaaatggggtggtgttgagctgcactttgatattgaacgcggtacgattattagaagccaaatttataccgacagtttagatcccgcaccattagaaaagctatcgcagatgttagttggacagcgttatgcttctagttcgatgaaaagactattagcgcaattaatagagcagtacccaaataaccaatcagagcttgaagtgctgcaacagtggcttgttcatgcgctttcttaa

SEQ ID NO: 313715 - DNA, 885 bp, Proteus mirabilis; identical to SEQ ID NO: 304298

SEQ ID NO: 313716 - DNA, 423 bp, Proteus mirabilis
atgtggcgtaaattgggtgcatggttatggctagcgactcaaaatttagaggattttccgtctacgtcgaagaagatgctaaatatgattgagtggtggttgtgtttagtgatgccacctgaagaaattgaagaaatcgcccgatttaaaaaacttacaccagaacaaaaagccatgctgctatcagcaaccaaaaccccccgttgttatacagagggcgttgtcctcgcaagtcgtattgaagcgctatttcgtgccgttcctccgagtttataccttgcattgggtatgactgagaaagaggaaaaagcagagcgaaaagcattgatggtagagcatggtattagtgagctagaggcagctaaacggatagctgtaaggttggatgaggtgagggggattgttgataatgggtatcattaa

SEQ ID NO: 313717 - DNA, 507 bp, Proteus mirabilis
  misc_feature (486)..(495): n is a, c, g, or t
atggttactattgaaccgacattacgtcggcgtgtggcgaaagcaacagcattaccagaaagcctcgatcccttattacggcaaatttatgccaatcgaggtattacctctgaaactcagctcgagcgctcgttaaagggcttattgcattatcaagatttaaacggtattgatgttgctatctctttattagttgaggcattaaagctgcaatcgcggatcgttattgtaggggattttgatgccgatggggcaaccagtacagctcttgctattaaagcgttacggcaaatgggatttcagcaagtaagttaccatattcctaatcgttttgatgacggttatggacttagccctcaagtggttcatgatgtggcgaagaaaggcgtagatctgattattacggttgataatgggatctcctcttttgaaggtgttgatgttgctcatgaatatggtatccgtgtattggttactgatcaccannnnnnnnnntcctcaagctga

SEQ ID NO: 313718 - DNA, 330 bp, Proteus mirabilis
  misc_feature (306)..(315): n is a, c, g, or t
atgaaaaaaatattatttgcagcacttctgaccagtattacactttctgcaacagcggctgataaagagactattcgttttgctactgaggcaacttatcctccatttgaaatgattgatgcaaacaatcaaatcgttggttttgatgtagatttagcaaatgccatgtgtgaaaaaattaatgctgaatgtacttttaccaatcaatcatttgatagcttaattcctagcttaaaattccgtcgttttgacgcattaatggcggggattgatattacgcctgagcgtcaaaaacaggtagatttnnnnnnnnnngtcaaaaacaggtag

SEQ ID NO: 313719 - DNA, 660 bp, Proteus mirabilis
atgcagaaaaaaacatcgccacagatcctttgccaaaaaatcgctgatattattcgccaaaaaattactatcggcgaattacctccaggagagaggctttcagaagctactttaagcgagcagcttgaaatatctcgtaatacattaagagaagtatttcgtatattaacccaagaaggcctattaacctataaacctaatcgtggtgtgtttgtttctgtaccagatatggcatcaattatggatatttatcgcgtaagaaggctgattgaatgtgatgctttacgacatgcctatccaatgcatccagccatttcccgcatgcaagataacgttaatcaagcaaaaatgtttcaacaacaaaaagattggaatagcgttggaacctgtaatatgcattttcataccgctatcgtcgagctttctgatagccctaggttatttaaacaatatcaacttattttagcagaattacgattagcctttggtttactcaatgatccccagttattacatgctccttatattgagaagaatgagcatattttaacgctattgataaatgggaaagcgcaagaagcggcaatcgaaatggaaagttatttagaaatatccgagcgaaccgtattagccgctttttctcgccacaacatctgttaa

SEQ ID NO: 313720 - DNA, 1251 bp, Proteus mirabilis
atggctacacaagatcctgtgaatacaacatcaccatcatttataaaaaataggcgttcatcattaattgcagcgatttttttaatggctacatctgcaattggtccaggttttattacgcaaacagctacctttacagcgacgatgggagcagcctttgcatttgggatattagcttctatcgtcattgactttgttgtgcaacaaagtatttggcgagtcattaccgtgactaacatgcgcgcttctgatattgcgaataaggcaattcccggtagtggatacttattagctgtattggttatctttggtggtttggtattcaatgtcggtaatattgctggggctggtttagggcttaatgccatggtaggactggatcctaaatggggtggggttttaagtgctttactggcgatttatatcttctcttcacgcaaagcgagtcattttattgatcgcatgatcattgttcttggcatcgtgatgattttattaacactttttgtaatgtttgcgtccaatcctcctataggtgaagcattaaaacaaacagtactgcctaatacgattaattttgccactataacaaccatcgtcggaggtacggttggtggttatatttgttatgcaggagcacatcgtctgctcgataaaggtacaacaggtattgaaaatatcgatgcggtatctagcgcggcaactaaagggatattagtggttggattaatgcgttatatcctatttttagcaattttaggtgttgtcgcaagtggagtgacactagatatttccagccatgcggctaatcctgcttctcaagcattccaacatgcagcgggcttaactggactacgaatttttggtcttattttatgggcagctgcgttgactagtgtgattggtgctgcttatacgtctatgtcgtttataaccgtgtttaaaaagggtattacagagcgtcaacgcaatattgctaccattatttttatcgctatttcattggcaatttatatggttatgggaacagctcctgctgccttattagtctttgctggtggcttcaacggattgattttacctattggtatgacgttatttatttttgttgcatggcgtcgtcaagatcttatgaatggctataaatatccaatgtggttgcaatggtcggcaattttagtctgcgctttgacttggtatatggggatcatgtctgttggcgctattttcaattacctcaatattgcttaa

SEQ ID NO: 313721 - DNA, 447 bp, Proteus mirabilis
ttgtggaacaacttagatgtatccgacatgatattgataaagaaagtgttttcttacaaaaagtcaaagagcgatacacacaattattacctaactatccccgttttgaaattgctgaaagtttttttaattcagtctattgccgtctatttcatcatcgagagcttaataaaaaaaacttattcgttttttcatcacaacctgcgtatcgttttgcgcaagcccctcgccctttatcaagaacgtttgttatacaaagtgatttacccgcattattgcaagatattttatcgcgcctacctttgcgtttaccgtggcaaaataaatcgcgagatattcaatttatttgccaaacgctctatgcgcaatttagccatgaggaattacaaaatgcagtatttcacattgctaatgagctattttaccgtaataaagcggcatggatga

SEQ ID NO: 313722 - DNA, 723 bp, Proteus mirabilis
  misc_feature (696)..(705): n is a, c, g, or t
atgttaattccttattcaccccacacaatatggaagaccatttgtgcgactttgctattaagcttggcgtttttctcacaagcagagcaggacgattctgtggaatttaacattcatatgctagacgcggaagatcgcgataatgtcgacctttcacgtttttctacctcaaattatatcattccgggtatgtactatttagatattcgtctaaatggtcgcgactttcctcgccaaaatattaattatattgaagtagcagataatcattccgtggcttgtatcgaccctactcttttaaaaaagttaacaatcaaccaagaaaaccaaaaatatatcaaacaaatatcaccagattgttttgatattagccaattacccggtatctcgattaaaaatgatggtggtgtacttgatatcacgttaccgcgctcattaatgaaatatgaagaatctgattggacacctccggagctttgggatagcggggtctctgggcttatttttgattatacattaacaggaacgtcaactcgacctaataaaggcaataataacaataccttaactggttatggtcaagcgggattaaacttgggtgaatggcgtttaagagctgaatatcaaggcaattattcttctgaatattcatctaacaatcgttttgattggaaccaaatttatgcctataagccnnnnnnnnnnatctcgcagccaaactaa

SEQ ID NO: 313723 - DNA, 867 bp, Proteus mirabilis
  misc_feature (831)..(840): n is a, c, g, or t
atgatgcagatgtatttccaaacatttaagcgtgttttattaggcatgttagaaaaaccgatgtggatgttattattggtttctctttgcattatgagtttagtctacgctaaacctgtattgtgggatctgcctgtggcggtgatcaatcaagatcatagccccgccagttatgcccttatccgctcattagatgccacacctaaattaagcttaaagggatatgataatttagatgaagctcgtcatgacatgataatgcgtgaactgtttgccattattatcattccaacagattttgaaaaaaaactgcttaatggcaaaaatgttaccgttcctgtgtatggagatgcgaccaaccgccttgctagtggacaaattcagcaagaattaatgcaggcgtatcagcaattattagataactataacggccgtatcttacaaaatgcgggttttagtgcgacacagtcaaaaatattattaaaaccgatccaaagtgaaactatcgccatgtataaccctggggtcagttttgccgccattattttcccaggcttgttagtgatgttattgcaacactcattattaattgcttgtgtacgagtgagtatcgccgtcagaggaacgccaaaagggaagcctccgttagcggtatatttaggcgcgctatctgcacttataccgatttggctctttttatcttcggtgttctttgcactatggccgtgggtattaggctatcgtcaagaagcaccactttatcaaatttggatgttgaccttcccattcttattagcggtattaggattaggtaagttgatcaccgaatgnnnnnnnnnnccgaatgctggcgcagtgttgagatga

SEQ ID NO: 313724 - DNA, 459 bp, Proteus mirabilis
  misc_feature (415)..(424): n is a, c, g, or t
atgaaatttactcctcaacataaaatggatgctgcattaatggcaggcgcatccttaaacacacccaataatcattcaatacaagagcaacatcatcgtttaaaagatgatgctaccgttagtgcttatatgagccagaattatatttctgtttctgtcgcagattcggttgaacatgtaaaagcacagctggttaatgatttaaaagatgaattaattccgacttatctgtatgtcgtagataaagataattatcttaacggtattttgccggttaaatcattactacttgctgataatgggctttttgtttcggatattatgcgccaaacatttttctcagtttcaccggagcaaagccgacatgatgtttatcagttaattagccaaagtggtttagacagtgtacctgtgnnnnnnnnnnggtttagaccgtgtacctgtgatgcattttggtaa

SEQ ID NO: 313725 - DNA, 624 bp, Proteus mirabilis
ttgattgcagcggacaatgaccaccgggccgagaaggagctacggccagacggcaagccccgcgaaaatgttggcttgaagaaggcacaagaggcggcggccaaccataagggtgtggcactggtgccgcccttcgccgatggggacaagggttccgattggaacgactacgcccagcagcacggcgacgaggcggcgcgtaaagagcttgagcggcaggtggcgcaggcaagaaccgaagcggccatgaacgccgagcgcatgatggtgattgcgcgcgagcgtgaagccgaggcccgcaacgaccccacgacgagcgccgacgacgcccttgtggcacaggaaagggccgctgcgaatgatctaatggcccgcgccgtagcaggtggcctcaaggcccgcgccgaggctagggacgcccttgtggcaaacgccacaggcgcgccgcgtcccgtggccgctgtcaatgccacgatgggccgcaccaaagccgagcaggccgacgaattgaaggagcagcggataacggttttcgacggacaaaacgtgtccacgaaaccggagcagcagaaggcctcacagccgcgccgtgctcgagcgcggggatatgacgcagacctttaa

SEQ ID NO: 313726 - DNA, 216 bp, Proteus mirabilis
atgctaaaagcaatggcggcaccttactctcaagttcaatttatgcctactggaggaattagtctaaacaatgttagtgattacctcgctatcgggcaagttatcgcatgtggtggcagttggattgctactactgaggcaattgataatcaagacaaacagactattgctcgcaatattcaaaatatccattcattacttaagaataaaggataa

SEQ ID NO: 313727 - DNA, 534 bp, Proteus mirabilis
  misc_feature (482)..(491): n is a, c, g, or t
atgtctagttctcaactgaaaaaacaatatattggcgaacatcaattatctccagaaacgttaatgatgagctatggatacgatccattgttatcggaaggctctgtcaaacctcctgtatttttaacatcgacatttatttttaaaagtgcagaagaagggaaaaatttttttgatacggtaagtggaagaaaaccccttccagaaggagaaaaagcgggtttagtctattctcgttttaaccaacctaatagtgagatcgttgaggatagattagcagtttatgaaaacacagcatcatgtgtcctcttttcatcgggaatgtcagctattacaacgacattaatggcttttacacaacctggcgatgttattttacattctcaaccactttatggtggaacagaaacattaatagccaaaacattcgctaagttcggtattcaagcaacaccatttacagatggtttaaatttagcacnnnnnnnnnncccgccaatccaactaattcactggttgatattcaagcgttaa

SEQ ID NO: 313728 - DNA, 315 bp, Proteus mirabilis
atgagtaataaatcgtatcttttaacggacgaagttggtattggtacatcacttgcttggggactaaaacgtactgatattcgtttaacagagacgaaaggtgagttggcttatggtttaaattacccagatgtaaaaaataaatactatagccttgaacagctattagcattaattgaagcaaaccaatataaaggggtagcgattgttttagtcagacctgatagaaagcagattttgactaaattgactacattaaaggaaaagccgatagtagaaaaagagggcgatttaacgctggtgttctttaattag

SEQ ID NO: 313729 - DNA, 1197 bp, Proteus mirabilis
atgttagtttctggcaattggtcagtgccttatcttcttgatattcgttattttgaaaaacctgttttaggatattggatcaattgtattgctcaatggctatttggtgaaagccattttgcagtgcgtattgttgtagtaacatcaaccttattaacaggatggcttatttataaagcggcaatggtagtttggcgcaatagcgctcttgcttttaatgctatgaccgtttttttatcttcttttctggtattagcaataggtacttataatatattagatcctattgtgacgctgtttgtgaccgctgcaatgtactcatttttagttgcgttatcgaccccgaataaaaagggcaaaataattgcttatatgggtattggctttttttgcgcacttggttttttaacaaaaggctttattgcggttgttttacctgcattagtttttttagtcatggcaattagtcaagctcgctttaaagaagtggtttgctattcctctattgcactgttagctctcgctattaccgctggaccttgggtgattactgttgcattacaagcaccggattattggaattattttttctgggttgaacatgtacagcgttttattgctaaagagtctgctcgctcacaaccaacgtggttctatatcccgatagttatattgggtgtattgccttggctaggttttttatttggtgcattaaaatcagctttctctttaaaaaaaggtacactctattttctgctgtggtttactctcttttttgcttttttctcagcctcaaaaggaaaactattaacctatatgctaccgtgctttgtgccattatctattttaattgcacactatatcgaagagttaaaagatagacctgatgagaaaattagcaaagtgaatgcatctatcaatattgcttttgggctaatgggtatatcagccgttatctattctttatacagtgccaaatttgcgctttatgatacgaatgaaacgttaaaaatagtgttagcaataagtgggtttttattttggagtgtgattggtgcgggggcgctgtttagacaaacacagtttttaacgatgttttgctctatcggactaagtttagttattggctatgcaatcccagaaaagatagaaagtaggagtacaccagaaaatattatccaacgttattatgagtaa

SEQ ID NO: 313730 - DNA, 387 bp, Proteus mirabilis; identical to SEQ ID NO: 299205

SEQ ID NO: 313731 - DNA, 615 bp, Proteus mirabilis
atgacttatacagttgctcttacaggtggtattggtagtggtaaaacaaccatcgctaatggttttgcctcactcggcgtccctcttgtggatgcggatgtcattgcccgattagtggtagagccagattcaccgggattaaaagccttacagcaacacttcggtgacacaattttattgcctgatggcaagttaaatagagcgcaattacgtcatattatttttcaaaatcaacaagaaaaagcgtgggtaaaccagttactccatccacttatacaacaagagacgcaaaaacaaattcaacaaattcgcgccccttattttatttgggttgttcctttattagttgaaaataaactaacacatttagccgatcgtattcttgtggttgatgtgactgaagaagaacaaattaccagaactatgcaacgtgatggtgtaagccgagatcatgtactcaaaattttacaagcccaagctaaaagagaacaacgattagccgttgctgatgatattattgaaaatcacgataatagcttaaatcaagatgaacaaataaaacaacttcatcagcattacttagaattagctcaaaaaagcaatacaggacaatag

SEQ ID NO: 313732 - DNA, 1158 bp, Proteus mirabilis; identical to SEQ ID NO: 297263

SEQ ID NO: 313733 - DNA, 438 bp, Proteus mirabilis
  misc_feature (385)..(394): n is a, c, g, or t
atgtcatcaaaatcctactttaccaatgaatcagaatacttaaatgagctgactgagcaagttgccaaagaaaaaccgcaacttgttaatttgctttcgcacaatgttaaagatcctgatacttcgcggattatggatgggctatcttatttatcgggtaatttacgccagcaaatagatagacaatttcctgagttaactaacagtttagccaatatgctttggccaaactacgcgcgccctgtgccaagcatgacgattgttgaatatcatcctaattatgctcagtgccaacacgcaacaaaaatttcagcaggacaaccttttagtgccactccactttatgtgcaaagtgaggaaacaaaccacgagacgttatttcaannnnnnnnnnaaaaatcagtaacattttgcagcaaacaaccgccattgaaataa

SEQ ID NO: 313734 - DNA, 657 bp, Proteus mirabilis
atgaatcgcattttaacgttagtttttgtggcatttgcttttgtgttatcaggatgtgcagagccagtcaaaacagactataccgcctttaaagcaagtaaaccaaaaagcattttagtgctgttacctaaaaatcagactccagaagtagaagctgcccatagttttttatctcaagtgacttatcctttggcggaagctggctattatgtttttcctgtcgccgttgttgaagagacctttaaacaaaatggtttgtcaacgggaagcgatatccaagcggtgagtcctagtaagttacgtgagatttttggtgcggattctgtgctctatttggatgtcacccaatatggtacttcttatcaagtgatcgccagtgagacgcgtgtcagtgccagtgctaaattggttgatttacgtaatggtgccttactgtggagtggacatgccagtgcatcgagtgcagaaggggatacagcatcgaatggtttggtgggcatgttagtttctgcagtagtgactcaaattgttgatactattgcagataaaagtcacgaaattgcaggagtagcaagtgtgcgtttactctctgctggacatgccaatgggatcttatatggtcctcgctctccccactatgaaaaagagggacaataa

SEQ ID NO: 313735 - DNA, 246 bp, Proteus mirabilis
atgaatactggttcgacagaaaatgataccaatgctcgagtagcattattgcgttctacaggtgaacttgttccacttaatggtgagcgagaacaacgtacattttattcggaggttgccggtgaacgtggtagattagtattttcattaaaatatgatagacctgaatcgattgatgctgttaccgcaggtgctttcaaggctaccttatctcttgatgcttacatcactgataatatccaataa

SEQ ID NO: 313736 - DNA, 339 bp, Proteus mirabilis
  misc_feature (301)..(310): n is a, c, g, or t
atgaaaaaatcattattttcactattaattctatctacacttgctttatcaacacaagctattgcacaacagattcaccttggtggttataatatagatatccaaggcagagtaattgacgagaaactaacttgtgtcgttcaagatgttgctccaattcaattggatgatgcttacgttgattctttactgcttactcctgaaaaacaatttagtgtggatttttctggctgtactaatcaagaaagagcaagaaaagtcaaaatagttgttgcacgacaaaacactactcatttaatgnnnnnnnnnntgttgcacgacaacacgctactcatttaa

SEQ ID NO: 313737 - DNA, 1692 bp, Proteus mirabilis
atgaatacacctacaacattatcctcagcaaataggctgagcttacctgtagaaggtatgacatgtgcttcatgtgtcggacgtgttgaacgagcattaaagacagtacctgaaataaaagatgctgtcgtgaatcttgcaacagaacgtgctgatattacatttagcagtacccccaatcctgtacttgctgtaagcgcgattgaaagctctggctataaagttcctgaagagatcactgaattagctattgaagaaatgacctgcgcttcctgtgtcgggcgtgttgagaaagcattagctcaaattcctggtgtattagaagccaccgtgaatcttgccactgagcgtgctcgtgtgcgtcatttatccggcgtagtatctattactgatttagaagtggcggttgtccatgccggttataaaccacggcggctatcagataatccagccaatactcgtgatttaagtgaagagcgtcgtgaaaaagaagcccgctcgttacgccgagcattacttattgccactatcttcacattaccagtgttcgttattgagatgggctcacattttatccccggagtccatcattgggtaacgcaaacattagggcaacagctcaactggtatattcaatttgttcttgccaccatagtgatgtttggccctggcttacgctttttcaaaaaaggaatacccgcattattacgcggtgctcctgatatgaactcattagtatcagtcggtacagtagccgcttatgggtattctgtcgtttcaacctttataccccaagtcttacctgcaggtacggcaaatatctattttgaggctgctgtcgtgattgttaccttgatcttattagggcgaaatcttgaggcaaaagccaaaggaaatacctcacaagcgattaagcgtttagtgggtcttcaagccaaaacagcacgtgtttcacgtcatggtgaaatactagaaattccattagatcaagttatgatgggcgatatcgttgttgttcgtcctggtgaaaaaatccctgttgatggtgaggttgtagaaggccattcttatgttgatgaaagcatgataaccggtgaacccgttcctgtagcaaaagagataggggctgaggttgtcggtggcaccatcaataaaacaggcgcttttagttttaaagtgaccaaagtgggtgccaatacgatactcgcacaaattattcgcttagttgaggaagctcaaggttcaaaattaccaatccaagcgcttgttgataaagttaccatgtggtttgtgcccgcagtaatgataggtgcaacgatcacattctttatttggctcgcatttggtcctgagcctgcactaacctttgcgctcatcaatgctgttgcggtactcattattgcttgtccgtgtgcaatgggattagcgacaccaacatcaattatggttggcacaggacgagctgctgaattaggaatacttttccgtaaaggtgaagctttgcaagccttacgtgatgttagtgtggtcgcactcgacaaaactggtacattgacaaaaggccgccctgagctaactgatctgatcccagcagaaaaatttgaatataacgagatattaagtcttgtcgcttcaattgaaacttattcagaacaccctattgcacaagcaattgttaatgcagcaaactag

SEQ ID NO: 313738 - DNA, 372 bp, Proteus mirabilis
atggcaaagttaaacaaacgcgaattgcagtatttagcaccagcggtgttgtatggttggcgtattgaaaaatttcacttttacaaacaaggtcgttgggatggggattacctaatgcctgtctctattgggaaagtggcacaacgacttacggagttaggttatttcgacaaagttgatgataaatattatgacaatgcgttctttttaagagcaactgaaaaagccaaaaaacttaaatgtaaagcatgtagaaatggttgggttttaagtgaagatgatgattgcgacgatagagaacaatgctctgcatgtagtggaatcggtttggttaactcgcagggcgcaatgaagaggaatgaatatgagtaa

SEQ ID NO: 313739 - DNA, 795 bp, Proteus mirabilis
atgaaactaaaaaataacagcttaaatgctggtggattcgctcaccctgaaaaccaagtggctaatacttttgataatttaattcctgttattaataacaatattaacggtaaagaaattcaaacagtaagtagccgtaaattacactcattcctgaaagttggccgtgattatacgagttggattaaaggacgaattaaacaatatggctttgttgagaatattgattatatcgttgtagaaaatttgagctcaccaaaacgggggagcgcaaaatttagacagcaacttgaacatgattacattgtcagcctcaacatgggtaaagagttatctatggttgagcgcaatgaccaaggaaagctagcccgtcattatttcattgaatgcgaggaacgattacgcaggatcgcccctgaagaacataaagccgctatacagaactggcgtaaaaaccgcgtcgcagcttgtgaagaccataaaagcatggctgaggctatgaaaggctatattgagcgtacaggtgatagccagaaaggctttgcatatagcaatgaatcgcgatttatcaataagctggtgttaggcattgacccgataaagtgggctaaaaacaaagggatcaaatctaaagaagtcagggataacatgagcacagagcagttaaaactattggcctacttagagactcgtaattgtgctttccttgacttagatacacctacagcgcagagaaaggcgcaattaactgagttggcgcaacgttggttagttcagcgtttggaggctaactaa

SEQ ID NO: 313740 - DNA, 531 bp, Proteus mirabilis
atgatgataagctataaaaaaacaatgcgttttttattgtatttaagcttcggtttattttcaaacccagtactatcatttacttgtaaagtcgcttcaacgggacaaattgtcggtgatggtgctgctaatatacgcgttaatttaacgcctcgagttgaagtaaaccagaatttggtagtggatttatctcaacaaattctttgtaaaaatgattcttatggtggacctagagatccaatagacgttgaccatgttaatttagttagtggaacgacttttggaggcgcgctgaataattttgacggctctttattatggtataacagttattatcctattcctctttattacgatacaaaagttattaatattaaagacagaaattttatcccactaaatcttagattgtatttgaaaagtattggtgctgcgggagggaagcaaataaataagggggatttaattgcaaaaatagaaatgtacaaaattgcagattgggatggtgggcaccctcgttttattaaatga

SEQ ID NO: 313741 - DNA, 240 bp, Proteus mirabilis; identical to SEQ ID NO: 311574

SEQ ID NO: 313742 - DNA, 333 bp, Proteus mirabilis
gtgacccactttatccaaagcattactaatatagtcaaatattatttaaatatagagtacgacataggatcgttaaattatcgtcgttttgtgacacaccttcgctatttctccatccgattattttcacaacctgaaaatgatcacgaacctttagaaaatgagttactcgatataataaaagacaagtaccatcaaccttatatgtgctgtttgaaaataagtaaatttattaaagataaatataattgcaccttagatgacaatgaaattttatatctaataatccatattgcaaaaattgcagaggataataaaaagatgaataaataa

SEQ ID NO: 313743 - DNA, 351 bp, Proteus mirabilis; identical to SEQ ID NO: 305514

SEQ ID NO: 313744 - DNA, 1173 bp, Proteus mirabilis
atggcacaagattatcatcacggtgtgcgcgttattgaaattaacgaaggcacccgccccattcgcactatcagcaccgctattgttggcgtggtttgcaccgctgatgatgcggacgaaaaaacctttcctttaaacaaacccgtcttactgaccgatgtatcacagggtatcggtaaagcagggaaaaccggcaccttagccagtaccttaaaagccattgcagatcaggctaaacccatcactattgtagtacgtgttgcacaaggtgaagaagaagcagaaaccaccactaatattattggtggcaccaccgacgaagggctaaaaacagggttgcaagcgctgttagcatcacaagcacaacacggtattaagcctcgtattattggcgtgcccggtcacgacacattagcggttgccaatgagattgcggtgatttgtcaaaagctccgcgcctttggctatgtttcggcttacgactgtaaaaatatcagcgaagcaatcaagtaccgtgacaactttggtcagcgtgaattgatggtgatttttcctgattttacctcatgggatagcaccaccaacagcgaatcaaccgcttatgccacagcgcgggcgttgggtctgcgtgccaagttagacaatgatatcggttggcataaaacgctatccaatatcactgttaatggtgtgacgggtatttctaaagatatctattgggatttacaagatcccacgactgatgccggtttactgaatgaaaaaggggtgacgacacttattcgtcgtgatggttttcgtttttggggttcgcgtacctgttcggatgatccactgtttgcctttgaatcttatacccgaacggcgcaagtcctcgctgacactatggcagaagggcagatgtgggcaattgataaaccgttaacgccatctttagcgcgggatatcgttgaaaccatcaatgcaaaattacgttcactggtcagtcagggttatttgttaggtggtgaatgttggtatgacccaacatcaaatagcaaagaagcactgaaagacggcaagctcacactggattataactatacacccgtgccaccaatggaaaatctgatgttacgtcagcgtattaccgataaatacctgatggatttcggcaacaaaatcaaggggtaa

SEQ ID NO: 313745 - DNA, 1497 bp, Proteus mirabilis
atgtttttatttaaaaaagctgttatcgctttgtcaattaatatcgcattagtttcttcggctctggcctgcacaacgttattagcagggagtgaagcaactaatgatggctctttgattgtagctcgtagcgcagatagtgatgctttaaaagcacaacattttgttattcatccagctaaaagcaatcagactggcatttatagtactcaagcccatcatggcgctaataactttacttatccactacctaaacactcattacgttataccactgtacctaattggaaaactcaattgcatggtgcaacgggttttaatgagctaggcgttggggtgagtggtacagaatccatttttgcctcacctaaagcattggcgttcgatccttatgttgaagatacggggatcactgaagatgatattccagatattttactctcaagggcaaaaactgcccgtgaagcaattgaattactgggaaacatcatcgaaacacaaggtgcgggagaagggtttggggttgccgtcgttgataaaaatgagttgtggtacctagaaacaggtacaggtcatcaatggatggcgcaaaaactaccaaaagataaatattttgcgacgggtaatcaagggcgtttacaggcttaccatacagatagtaatgataatttaggttctaaaaacttagttgagtttgcaatagaaaaaggactttatgatcctgccactgatggcgaatttaatttttctaaagcctatacgcgtgatgatgaacgtgatctcacttataattacccgagggtttgggttatccagcaacaatttaacccttctctgaaacagaatgtggcagatggtcgtcaatttgcacctatgctgacaccggagaaaaaagtatcagtagaagacgccaaagcgatgttacgcaaccattttgacggtacagaacatgatccttataccaatggattgaatggcaatgaaccatggcgaccaataagtgtgtttcgtacttatgaatctcatgtgatgcaagtaagacctgaattaccgcaagagattggtgaagtgacttatgttggtttgggaatggctgatctaaccgcttttgttccttattacagtggattaaaagcatatccgcaacactatgctattggaacagataaagcagataatgactctatctattggaaatatcgtaagttacaaacattagtaatgacagattatcctcaatttgctcctattgttaaaaaagcataccaagaatgggaagctaaaacagcattagaacaaaaagaaatggaggctaactatttgtcaatgagtaaaaagaataaagcagcagcggataacatgctgaatgaatttaacttacgtgtaatggctgatgcagagcaattaactgaaaacttaactaatcaactctttactcttaaaactaaaaatatacaagacgagatcttttttgctaatcaatctaaaaaagattaa

SEQ ID NO: 313746 - DNA, 297 bp, Proteus mirabilis
  misc_feature (267)..(276): n is a, c, g, or t
atgtatcacgatcttcaaggaaaagttgctgtagtaacaggttcgtcacgaggaattggtgcagcagtagtgacgagattagctcaagaaggaatgaacgttgttatcaactatcactctgatgaaaatgaagctcaagcattagccgatagcttaaataaacatggtaaaggtaaagcgattatttttggcggtgacattagtgatgaaaaaattgctcataactttatttataaagcgattgaccactttggtcagctcgatctnnnnnnnnnngctcgatcttctgatcaataa

SEQ ID NO: 313747 - DNA, 1044 bp, Proteus mirabilis
atgtttcttgattgggaagttcaatattctgcgactatagatcatattataaaaatgaaatctatctaccaagattgtattgaacggttttactggatagcactccctatcaccactgaaagtggcatttctcaatatgaacctacatggacagcatgggagtctggtaaaaaatgggtaagacaaccgccagaagatgcgataactgaccctcactttttccctttttatcacccaaatatgctttttgaagattttacccctgcatttaaccagtggatcacaggtaatcatcgcagttcgattatcctgctaggcataagagcggatgaatctttaaaccgatttattgccattagtaataatcgaaagttacgttatgccgatgatattccttggacaacggcatcagcagaaggcttttattatatggcctaccctatttatgattggcatgttaaagatatctggacttatatagcgcgtttcaatttaccctataaccctatttatgatctgatgcaccaagcgggcgttagtttaagtcaaatgcgtatttgtgaaccttttgggccagagcaacgcaagggactatggttatatcatgtgctagagcctgaaacatggagtcttgcttgtgaacgagtgagtggagctgatgccggaatgttatatacgaatcctcgtaataaatcaggtttctatgggcgacatcaaattagcaaaccttcccatcatacgtggaaatcttatgctcactttttattagccagtttaccagagaaaacagcagaacattatcgtaataaaatagcggtctatcttcgctggtatgccgaacgagattacccaaatggcatacctgatgcacaagaaggtgatactagcactaaacagataccttcttggcgacgaatttgtaagaccatcttgcgtaacgatttttggtgtagaacattagcatttagtcctactaaatcacactgttatgatcgatatttcaaacggatacaaggaaaacgaaaagactggcaacttatttag

SEQ ID NO: 313748 - DNA, 552 bp, Proteus mirabilis
atgcgtgatggttcaaaattttatgccaacattagcactagtccaggttcttctgtagattctaaaacattattaagttcaatggataatgtgaatattaaagcacttaaagcctgtgacgttatcccccaaacgtctaccaatattcagtttccgactcaaatcgcgaaaaattatgcaacacccactaaattagcagataatttagctagtatcagtgtcaattgtccttatgctaataaaaatatctatctcaccctgagcccttttaataatttagtctcaggcagtgaaacagggatggagctatccaccaatggctctgaaaatatcaccacactgccttatgtggtggcttctttaaaatctgcacaatcaagtatttgtcaagccaatgcacaagaggccttgcgactcgtcggtagtaataaactagcacaacaaaatatgaagagttttacgcaaaatataatttttaacctttgtgctaatggcaatatcaaagccaataaatatacaggggctattaatgtagcaattttaattgaatag

SEQ ID NO: 313749 - DNA, 534 bp, Proteus mirabilis
  misc_feature (497)..(506): n is a, c, g, or t
atgataaaaaaaatagggggatacggtttatcgttattcttgataccaatagtattccttcattccgctaatgcgttagagttatccgttcctattggctcaacaggttatttaggggaggtcactccgccagttggttcaacaacgaaaaattatgggatggtaaggtcagtgcttgaggcgaatacaccttatataaattttcggtgggagccttatcaattagtggtacaaccaatacctttttaccctgaaattggacgagcgggtgtggctatctacaataaaagcaatcccaaaggggcctttattgttttagcacccagtggatatggtacattgcgttataaaagagctaatggcacatatgagaatgcttcattttcatttagtcgttcccaaaccaccgctatgacaaatatgtataataatttttcctctaattctaatgaattaagttggggtcttttgcccagacaaggcaatagtgatttttnnnnnnnnnntattcctcgtatgccatcgggccattag

SEQ ID NO: 313750 - DNA, 165 bp, Proteus mirabilis; identical to SEQ ID NO: 312990

SEQ ID NO: 313751 - DNA, 123 bp, Proteus mirabilis; identical to SEQ ID NO: 299922

SEQ ID NO: 313752 - DNA, 1269 bp, Proteus mirabilis
atgcaacttatagccgtagccgttattatcgtaacggtctatttgctaataaaaaaatatgaaacccgtatggtattgatcggtgccggcttattgttatgtattttaagtctgacaccgcttgatgctttcactgcatttagtgatcgcatggtttcatcatcattaattcaagctatctgttcaagtatgggttttgcctacgtgatgaaatacaccaagtgcgatatgcacttagtccatgttttatcaaaagtcctgactcgtcttggtttctttcttattccagcaacagtgatcgtcacttattttattaatattgcgatcccatcagcagccggatgtgcagcggccgttggtgcaacacttattccgttattaatcgcggcacgtattcaccccgcaatcgcaggtggtgcggtgttatgtggtactatcggttccatgttaagccctggtatgtcacataacgcttttgtggcgaatatggccaatatggaagtcgtcgatttaattgctcgccatagcccatatagtttaatggcaggagcaatagcagcagtttcactcgctgttgtcgctttagtgaaaaaagagtttaaagtttcttctgtagccacagatgtcgccaactcatcttctcaagcaacaccagaagcagtacgccctaattatttatatgcaactgcgccttttatcccattaattctattaatactgcctttcttcgaaacatttagtacttttaaactatctgtgccagcagcaatgttaattggtgccatttatgcactgatcatcacattaaccaatccggctcaaattactaaagagttctttaaagggatgggtaatgcttatggggatgtactggggatcattatcgcagcagccgtatttgcagccggtctaaaagcatcaggtctgattgatgcctttatcaacttcttaactcactcacctgaatttgcccgttggggtggtacattagggccattcttaatggggattattactggctctggtgatgctgcagcatttgctttcaacgaaaccgtcacaccacacgctgcacaatttggttatgaaattcctgacatgggtatggcagcagcattatcaggcgcattaggtcgtacaatgtcaccattagcaggggcagccattgtttgtgctggtcttgccaatatcaaccctatggaaatcgcaaaacgtactgcaccgggtatgattatcggcgtcatcgctgttgcgttattcatgttataa

SEQ ID NO: 313753 - DNA, 1266 bp, Proteus mirabilis
atgtcagtttcactagaacaattaattaaatggcgtcgcgaatttcaccaataccctgaaattggctggtctgaatttttaaccactgccaaaatcgtcaaagtgctacgtggcttaggattagaagttaaagtcggccctgaagttattaaccaagactttgcttttggacgccgtcgtcaagtggttgaaaaaggattggcggtagcaagaaaacaccatgttgacgaagcactgcttgatgaaatgcaagagcttacgggttgtgtcgctattttcgatagtggcaaaccagggcctactgttgcactacgttttgatattgactgtgttggggtaacagaaacaacagagactcaacatcgtccacaggtagaaaatttcgcctcttgtcatccaggcgaaatgcatgcttgtggtcatgatggtcatattactattggtttaggggttgctcactggttagtcgacaataaagataaagtgagcggtaaagtaaaaattttattccaacccgctgaagaaggcgttcgtggtgcaagagcaatggcagaaagtggcattgctgatgatgcaaattacttcttaggctcacacttaggctttatcgccaatagtggtgaaatcgttcttaatccaacacattttttatgtaccactaaatatgatttccgttttaaaggtacgccttctcatgcgggggcagagccagagctaggtcgtaacgcattagcaggtgcttgccatgctgcaacacaaatgctggggatctctcgccatggtaaggggatgtctcgtattaatattggggtattaaaagctggtgaaggtcgtaacgtcactcctgccaatgccgaaatgcaaatcgaagtgcgtggtgagaatgaagagatcaatagctttatggctgccaatgctgtacgtatggcagaaggtgccgcacatagcttccaattagaaatggaaagcgaagtgatgggggaagcggttgatttaaccaatgaccaagaactgattgatgtgatggccaaagtggtgggtaaacacccagaactcactgcgatcccaacccgtccattcggcggaagtgaagatgcaacggtgttagcaaaacgagtacaacgctgtggtggtaaatctctttactttattgttggtgccgatagaacagccggacatcaccaagcaggctttgattttgatgaacaacaactgatgactgcggtaaatctttacacgggttgtttagaagaattactgaaataa

SEQ ID NO: 313754 - DNA, 1026 bp, Proteus mirabilis
atgctatttcaagtaggagagatcgctaaaaagacgggattaacagtccgtactctccatcattatgaagagataggtttattgcaaccgactgcaagaaccgatgcaggttatcgactctatgatatgaaaagcatagagcgattaacgcaaattcaaatgctacgtcaaattggcgtcaaactgaaagacatcggtcatattcttaatggtcatagtgcagagatagcttgtttaattgaagagcgcattagccaattaaccacgcaaatgcaacaaattgccaaattgcgttatcagctagagcatgttcaacaacaaatacaaacaggcactccatttacgcaacatgactggttttctttattggagatgatgtctatgtacgataaatattttacttattctgaattagcgcagttacccctctatactgcgcacacactaaaaagccaagcatggcaacagcgtatttcaaccgtcaataatttgattaaacaaggtaaatctgccgattcaaatgaagcgatgcaagtttcaagagagtggatgatagctttagagcaagatacagggggaaatcccgacttttttgtccgtttaaataaaatgcatatttctgatgataagtttgcgacggctaccggtattactaaacagatgatagattttgttgctaaaggctttagcgaatatcaattatctgtttttaaacctcatctgactccggaacaatttgccgtagtacatcagcactattttgatgctggcagtgtctggcctgagcttatttctggattatataatgcactcacttgcggagaaaaagcagattcagagcaggtgcaaaacctcgctaagatgtggctaaatatgttcaatcagtttacacagggtgatagtgatattcaggccaagatccgtaccatttatcaaactgatcatgaaatcgctaaaggtacatggatgacacctgagattggtcaatatttatttacggctattagtttgctagtgcaaaaatag

SEQ ID NO: 313755 - DNA, 510 bp, Proteus mirabilis
atggagattaaggatatgtctccgcgccgtccgcatttattgcgtgcgcattatgattggatccttgaaaacgagttaaccccccacttagtggtagatgttaatgtcgtgggtgttcaagtccctatggaatatgcgcacgatggtcaaatcgtactaaatatttctccttttgcggtaagtcatcttgaattgatgccgcatcaggtactatttagtgcaagctttggtggtgtacctcgtaaagtgcgcgtacctatggcggctgtaatagcaatatatgcgcgagaaaatggtgcgggtatgatgtttgagccagagccagcctatgaggaaggttatacaccatcattggtggatgatgagcagcaagacggcagttcagcttcggccactgaaggactgtctttagtgaaagatgagacacaggctgaaaacccatcttctccagatgatgatcctgagcctcctcgcccaacaggtcgcccatcattgcgtgtagtgaaataa

SEQ ID NO: 313756 - DNA, 642 bp, Proteus mirabilis; identical to SEQ ID NO: 293966

SEQ ID NO: 313757 - DNA, 393 bp, Proteus mirabilis; identical to SEQ ID NO: 293965

SEQ ID NO: 313758 - DNA, 429 bp, Proteus mirabilis; identical to SEQ ID NO: 293964

SEQ ID NO: 313759 - DNA, 1119 bp, Proteus mirabilis
atgaccgttagcacgccattatcactttatgaaaccgcgttacagcaggaggattatcaacctgatgaggttcagcgacaaaccgttctccatctgcaacagttataccatgcattattaaaccggacatcaccagaaaaaagttctattactcagcggttgttaggaaagtttcgtgcgaaaaaaagcacaattgtccctgagcgtggtgtttatatgtggggaggggttgggcgaggtaaaacctggttgatggatatgttctatcaaagcttacccacagaacgaaaactgcgtctgcactttcaccgctttatgttacgggtgcaagatgaattaaaaggcttacaagggcaagaaaatccactggatatcattgctgacggctttaaagcgcaaaccgatgtactctgttttgatgagttctttgtttcagatattactgatgcgatgattttaggaacattacttgaagcgttatttgccagaggtattactttagtggcgacatctaatattccccctgatgatctctatcgcaatggactacaacgagcacgttttttacctgctatagaacaaataaaaaaccattgtgaaattttgaatgttgatgcggggattgattatcgcttaagaacattaactcaagcccatctatttttatctccattaacagagtataaccgccagcagatggataaaatttttactcagcttgccagcagtagtgaagttgtattcgcgcccacattaaccattaatcatcgtccaatggtaatgagaaaagtggctaatggtgtactggcggttaactttgatacgttatgtgtacaagcgcggagtcaacttgattatattgaattatcaaagcactatcacactgtgttgctttatgaaatggtgcagatggggagtagaaatgaagatgttgcccgtcgtttcttagcattggttgatgagttctatgagcgtaaggtgaaactaattattaatgctgatgttgagatgagcgagatttatcaagggcaatttttatgttttgaataccaacgttgtttatcgcgtttgcaagaaatgcaaagtgaagagtatctttcacagcctcatctcgcttaa

SEQ ID NO: 313760 - DNA, 405 bp, Proteus mirabilis
atggtttgggtttatgcactgattggattagttgttggtcttattatcggcgcactggcaatgcgttatggtaataaaaccatgcgccaacaagatgctataaaagcagaattagatactaaaaaagaagaacttgatacatatcgcaacgagcttgtcagccactttgctcgaagtgctgaactactggacaatatggcgaaagactaccgccaactttatcaacacatggcaaaaagctccaatgagttaatgccagacatgcctgttcaagataatccatttaattatcggttaagtgaatcagaggcagccaatgatcaatccccgatcaaaatgccgccacgggattattccgaaggggcatctggattatttagacctaccgataaaaaagatgattaa

SEQ ID NO: 313761 - DNA, 1392 bp, Proteus mirabilis
atgttgactaaaaaaagaaaattactacttagcgcattagcgatgagtgttggtttatcactctctactctcccggcaaccagtatggccgctctgccttcggtaatgccatctggagaacaactacctagcttggctccaatgctagaaaaagtcttgcccgctgtggtcagtgtgcatgtttctggaactcgagtacaaagccagcaggttccagaagagtttaaatttttctttggtccaaattttccttcacaacaacaaagcatccgcccttttgaaggcttaggttcaggggtgattattgatgctgaaaaaggttatgtattaaccaataatcacgttgttgatggagccgataaaattcaactccaaattaatgatggccgtgaatttgacgccaaattaattggtagcgatccacaaacagatatcgccctgctacaaattgagaaacccaataacttaaccgccattaaaatgactgactcagataaattacgtgttggtgactttgcggttgctgtgggtaatccatttggtttaggtcaaaccgcgacttccggtattatttcagccttaggtcgtagtggtttaaatctggaagggttagaaaactttattcaaactgatgcatcaattaaccgtggtaactctggtggtgctttagttaatctcaatggtgaacttatcggtattaataccgcaattttagcaccaggtggtggcaatattggtattggtttcgcgatcccaagtaatatggcgcgtgatctcagccaacaactgattacacatggtgaagtaaaacgcggtattttaggtattcgcggcactgaaatgaatgctgatttagcgaaatcctttaaaattgatgcccaacgcggtgcttttgtcagtgaagtattggcggactcttccgcagctaaagccggtataaaaccaggtgatgtccttatttctattgatggtaaacgcattaatagctttgctgaattaagagcaaaagttggtacaacaccaccaggtaaagagatcctgattggtttgatccgccaaggaaaaccaatggatgtcaaagttacactagagaaacaatcagcagatgcaacgcgagcggataacttctctcccgcacttcaaggggcaacgctcagtaactatgttaacaaacaagttaaagcggttgctgtagattctgtggagaaaggctcagcggcagcagcatcggggttacaaaaaggcgaccttattattggtatcaacaatatgccaattggctccttaggtgacttacgtaaaaccatcgatgctaaaccaccggttcttgcattaaacattaaacgtggcaacgaagaaatttatcttctgttacgtaacagctcgcgttaa

SEQ ID NO: 313762 - DNA, 1071 bp, Proteus mirabilis
atgttaagcaagctactgcgatctaccttgattggtgttttaacagctgccattcttttggttgcggtaccttctatccgccctatctttattgaacacctgattaatggtgattttcttaatgccccatttagctataacaaagccgtgcgccgtgcggcacctgcggtagttaatgtctacagcagcacaatgggaagcttttctcaagaagggcgcgagcttacctcgctaggtgcgggggtgattatggatccgcggggctatattcttaccaatcagcacgttattaataatgcagatcaaattattgtggctttacaaaatggtgatctctatgaagggttattgattggctcagatcccttaaccgatcttgcagtattaaaagttgatgcagaaaaattacctaccatccccatcaatagtaagcgtatttctcatgtgggtgacgtcgttttagccattggtaacccatttaatattgggcaaactatcacacaaggtattattagtgccacaggacgtgtcggcttaagcccaacacgttaccaaaacttccttcaaaccgatgcgtcaattaatgaaggtaattcagggggggcactgattaatactgaaggtgagttagtgggtattaataccatgacctttgattcaggcacctacaatggctatcgccccagtgcggaaggacttggttttgctattccaacacaattagccgtaaaaattatgaataagcttatccgtgatgggcgagttattcgtggttttattggtattaccgcgaaagagctacctaaaattcgctcttcaaataccgatattaaacagatccaaggattacgtatcttccgcattacccccaatagtcctgctgataaagcgggaatgaaaattggcgatatcattttaagtatcgaccatgctccggctaaatcagctatggagatgatggactatattgcagaaacacgtcctggtaccgttttaccggtaaccttattacgtgatggtaatgaaataaatgttgatgtcacaatttcagaatatcagccagagtcatag

SEQ ID NO: 313763 - DNA, 1050 bp, Proteus mirabilis
atgcaggtcacaaggaaacaagagcgtgttattcgtcaagcacttgatcattggcaacaatctggtgagctatcagcacaacagcatcaacaactagaaagtacattacaacgccttccctttgattggaaaagattgagtcgctatgctttttggatagctattgcctgcttaattattgctgccgttaacctttttagtgataccgcattaattcattatcttatcgaattatttagtgtctctgagattatgcgtgtggtatttcctgcgcttattgctggtatgttttatttttggggctttaaacgccaacgcaaagaaatactatggcattacagtactgagtttattctctttttagggatattatttacggcggtttttctttggcaactcggtgagttgttagatgatggtagtggtaatattgcgccacttcttttaatgggttgcattatttatgctgtgattggctttatcagtcgctcttcattagtgtggttatttttcttattaatgttgggcaattggtttggtgctaaaacgggttatatgtccggttggggcgcttattggctaggcatgaattatcctattcgttttgtgttatttggctctatattattagctggatgctattttttgcaaaatattttaatgcgccgtcgcttattttttatgacaaagataatgggactgtcttatctctttattgcgttgtggatcatgtctatttttggtaattacgatccggatacgtggtattacatttcaagtgtgcagttattaccttgggctttattatttgctgttgttgctgtcatttgtatttatatcagtttaaaaaccgatgatggcatgttgagaggctttggactaacattccttggtatcaatctttatacccgcttttttgaatatttctggaatagcttacatagtgcaattttcttttttattttggctatttcactgatttttattggacgtaaagcagaaaaaatttggcatgccattgaaaatagccgcatggtaaataagcaataa

SEQ ID NO: 313764 - DNA, 1263 bp, Proteus mirabilis
atggataaatttagagtacaagggcctacctgcttatccggtgaggtcactatttcaggcgcaaaaaatgctgcactaccaattctgttcgctgctatccttgccgaagagccagtagaattaaccaatgttcctaagctaaaagatattgataccaccattaagttacttaatcgtttaggtactaaagtcgaacgcaacggctctgtttttgttgatgctcgtcatatcaacgaattttgtgccccctatgaattagttaaaacgatgcgtgcctctatttgggcattagggccattagttgcacgtttcggacgtggtcaggtttctttgccgggtggttgtgcgattggtgcgcgcccagttgatctgcatattacaggtttagagcagcttggtgcggaaattacgctggatgaaggttatgtgaaagcgcgtgttgatggtcgcttaaaaggggcacatattgtaatggataaagtgagcgtaggtgccactattaccattatgactgccgctgttttagcagaaggtaaaaccattattgaaaacgcggcgagagagccagaaattgaagataccgcgaattttcttaataccttaggcgcaaaaatcagtggtgcaggcaccgatagcattactattgaaggggttgaacgccttggtggaggcacctatcaaattttaccagaccgtattgaaacggggacattcttagtcgcggcggcggtttctcgtggtcgtgttgtttgtcgcaatgctaaaccagatacgcttgatgcggtattagctaaattacgtgaagcgggtgctgatattgaaacgggcgaagactggataagccttgatatgcatggtaaacgtcctaaagcggtcactctgcgtacggcaccacatcctggttttccaaccgatatgcaagctcagtttagtcttttaaatcttgtggctgatggagcaggaatgatcactgaaacgatttttgaaaatcgttttatgcatattcctgaacttatccgtatgggggctcatgctgaaatcgaaagcaatactgtactttgccatggtgttgataagctttcaggcgctcaagtgatggctaccgatttacgtgcttctgccagcttagtattagccggttgcattgcggaaggtacgacgattgttgatcgtatctatcatatagaccgtggctatgaaaatatcgaagccaaattacagggtttaggggctaaaatcgaacgtctacattctaatgactaa

SEQ ID NO: 313765 - DNA, 255 bp, Proteus mirabilis; identical to SEQ ID NO: 293852

SEQ ID NO: 313766 - DNA, 294 bp, Proteus mirabilis
atgtcagcttcgttaaattggcaaaaagagggtgaaatactctctttccaaggaacgctagatagagaaacgttattgccagtttggcaacaacgtaaagcgttattagctgatattaatatcatcgatatttctcaacttgatcatattgactcaaccggattagcactttttgtccatctaaaggccaaaatggaagcacttgatcgtcaatgtgttattcaaggtgttagtgagcgctttcaaacgctaatcacactctatgatcttgatgaaattatgaatattgcttaa

SEQ ID NO: 313767 - DNA, 630 bp, Proteus mirabilis
atgtttaaacgcttattaatggtcgcattattggtgataacaccttttgcgatggcggtcgataaaaccaatccttatgcattgatggaagatgccgcgcaaaaaacctttgataaattaaaaactgagcaaccagaaattcgtaaaaatccagaactgttacgtgagattgttcaacaagagttgttaccttatgtgcatatcaaatatgccggagcattagtgttggggccttattatcgtaatgcaacgccggctcagcgtgatgcttactttgccgcttttaaagattatcttgcacaagtgtatggccaagcattagcaatgtatgaagggcaagaatatcgcattgaacctgccaaaccttttgcggataaatcaaacctgactattcgtgtcactattattgataaaaatggtcgaccaccagtacgccttgattttcaatggcgcaagaacagtaaaacgggtgaatggcaagcctatgatatgattgccgaaggcgttagcatgatcaccaccaaacaaaatgagtggtctgatattttaagtgcgaaaggggttgatggtttaactaagcaattagaaattagtgccaaaacaccgattacattagatgagaaaaaatag

SEQ ID NO: 313768 - DNA, 537 bp, Proteus mirabilis
atgcaaagtaaaaaaattgaagtttgggttggtttatttgttgttattgcactgatagcggttgtctttttaagcttaaaagtggctgatattaaagaagtgggtaatcaacctacttatcgtgtctacgcaagttttggtaatattggtggtttaaaagagcgttcaccggttaaaatcggtggggtggtaattggtcgcgttgcctctattaccttaaaagaagagatggaaggtaactatcgtcctgaagttgctctcgatattttaaacatttatgaccatattcctgacagcagttctctttctattcgcacatcaggtttattaggtgaacagtttttggccttaaatctcggcttttatgatgaagatttaggttctgattttctaaaggatggtggcagaattaccaatacccattcagccatggtgcttgaagatttgattggtcagttcctttataaaaccggtgacggagatggaaaaacaacctctgactcaaaaacgcaaaccgaacaaccagcattaccttaa

SEQ ID NO: 313769 - DNA, 780 bp, Proteus mirabilis; identical to SEQ ID NO: 293848

SEQ ID NO: 313770 - DNA, 813 bp, Proteus mirabilis; identical to SEQ ID NO: 293847

SEQ ID NO: 313771 - DNA, 981 bp, Proteus mirabilis
atgttgattactttgtctcttctcattgttgggttgatgttattagtctatgcatcagaccgactggtgtatggtgcaagtgtgtttgctcaatcattaaagctccctcctgccgttatcggtattgttattgtgggaatgggcacttcattgccggagctttttgttgcaaccgacgcggccatccacaatttacccgagatagcgataggtacagcaataggatcttcattaacgaatctgctactgattgctgggattggagcgatgatttatcccatgaatatccaatctgcggtactaaaaaaagaacttcctttgatgattatagtcatcttattagcaggactggtggtttctaatggtcatctagggttgagagaaggctgtttactttttttcatcggcttcgcctctctttttctaatgataaaaatgctccataaaaccttaacacaagtgcgccatgtgttaccgctagagacactttcacgttttgaattacaaactaatccacgtaattctgttgccctattttgggtggtaattgcattactgataatccctgttgcaacaagaatgatcattgataatgtttttatcatcatgcaacagtatcatctcagcggttttttagttggactaaccttgctatctattggcaccagtttacctgaattagcaacgaccgttgtggcagccttaagacgtgaaaatgaactggctctaggcaatattattggcgctaatatttttaatctcacctttgtgctaggcatgcccgcattactctctcctagcacatttaatatgcaagcattctattttagttttactgtgctggtggtcgcgggcctacttttctcactcttttcattggggcgcaaacagcggctaaaccgtggaaaggggattttcttattagtttgttttattgtttatattacggtgttgtgcgttgcacattctctcttaacctaa

SEQ ID NO: 313772 - DNA, 987 bp, Proteus mirabilis
atggtacaaaaaatgaccggatttgattttcagcaagcaggtaaaaaggttcttcaaattgaacaagaaggattagctgagttagcacaatatatcaatgacgatttttctcttgcctgtgaaaaaatctttcactgtcagggaagagtgattgttatgggcatgggaaaatcaggtcatattgggcataaaattgccgccacctttgccagtaccggcaccccttctttttttgttcaccccggtgaagccagtcatggcgatttaggtatggtgacagaaaaagacattgtgctggcaatttcaaattcaggtgaagccagtgaaattctcgcccttatccctgtcctcaagcgtaaacagatccttttaatttgtatgacacgctcacctcaaagtacaatggggaaagctgctgatattcatctttgtataaaagtccctaaagaagcttgtccgttaggtttagcccctaccaccagcacgacggcaacactggtgatgggagatgccttagctatcgctttattgcgcgctcgaggttttacggcggaagactttgcactatcgcatcccggtggtgcattggggcgtaaattattgcttcatgtcagtgatttaatgaataaagatgatgatattccacgcgtcagcaaagaagcgacattacgcgaagcactggtagagatcacccgtaaaaaattaggtatgaccgttatctgtgatgataatatgttgattaacggtatttttactgatggtgatttgcgtcgtatctttgatttaggtattgatcttaataatgccaaaatatcagatgtaatgacgaaaggcggaattcggatttccccagatagcttagcggtagaagcgcttaatttaatgcaagcaaaacatatcacttcactgttagtcactgaaccagatagtgatattttattaggtgttttacatatgcacgatttattgcaagctggggttgtttaa

SEQ ID NO: 313773 - DNA, 558 bp, Proteus mirabilis; identical to SEQ ID NO: 293844

SEQ ID NO: 313774 - DNA, 579 bp, Proteus mirabilis; identical to SEQ ID NO: 293843

SEQ ID NO: 313775 - DNA, 534 bp, Proteus mirabilis
atgaatcgaaaaatccgtaatacactaattatcagtacgttattctcaataagtgtcccagttatggcacttaaagatgatacacaacaacctattgttgttaattccgagaaacagtcacttaatttagaaaaaaacattaccactttcacacaaaatgttgtggtaaaacaaggctctattgatataagagctgataaagtagtggttacacgtcctggtggcgattctaaaaaaatcgtgattgaagcttttggtaaccctgtgacattctatcagttacaagatgatggtaaaccaatcaaaggtcgtggtgataaaatgacctatgagatggacaaagagctggtgaccttaacaggtaaggcttatcttgaacaattagacagtaatatcaccggtgataaaatcacttatctcgtaccgacacaacaaatggaagcatttagcggtaagggaaaacaagtcaccaccgttttactcccttctcagttacaagagaaaggtcccggtgttaacaacaaaggtaagtaa

SEQ ID NO: 313776 - DNA, 726 bp, Proteus mirabilis
atggcgctgttaaaagctgaaaatttagcaaaagcatacaaagggcgcaccgttgtcggtgatgtgagcctcaatgttaactccggtgagattgttggcttacttggccctaacggtgctgggaaaaccaccaccttttatatggtggtaggtattgtcgcccgtgatgcgggtagcattactatcgacgatgaagatattaccttactcccgttacatgaacgtgcacgtaagggtattggttatttgccacaagaagcctctatttttagacgcttaagcgtttatgacaatatcatgggaattttagaaatacgccatgatttaacggccgaacaacgaaaagatcgtgcagaagagctacttgaagagtttaatgtcagtcacttacgtaatagtttagggcaatctttatcagggggtgaacgccgtcgtgtagagatagcacgggcgctagcggcaaatcctaaatttattttattggatgagccttttgccggtgttgaccctatttccgttttagatattaagaaaattatccaacatctacgcgattatggcttgggcgtattaattaccgaccataatgtacgcgaaaccttagatgtgtgtgaacgtgcttatatcgtcagtcaaggacaccttattgcccatggttcaccagaagaaattttggcaaatgagcaagttaaacgtgtttacttaggtgaaggcttccgcctgtga

SEQ ID NO: 313777 - DNA, 1476 bp, Proteus mirabilis
atgaaacaaagtctgcaacttcgtcttagtcagcaattggccatgacgccacagctccaacaggctattcgtttgttgcaactttctacgcttgaattacaacaagaaattcaacaagcccttgaatctaacccattgcttgaacaagaagacgatcaagcggatgtaacgcattctgatagctcatcaacacaagagagtgatgatagtacaccagacaatgagcgtgataatgaggtgttagataccctagatgcactagagcaaaaggagatgcctgacgatcttcctctcgatacccaatgggaagaaatttacaccgcaggcaccccttcaggcaccagtaatgattatgcggctgatgaattaccactctatcaaggtgaaaccacggcttcactgcaagattacctaacttggcaagctgacctaacaccttttactgatactgatcgtgctatcgcgacaagcattattgatgctgtcgatgaaacaggatatttaacagtttcaacagatgacattcttgccggaatgggtgatgatgagttagagcttgatgagattgaagcggtattaaagcgtattcaacgctttgatcccgtaggtgtcgctgccagagacttaaaagagtgtctgttaattcaattgtcgacatttccaactaatacaccttatttgaaagagactcaacttgttattgagcactatttagcgttattaggtaatcgtgattttcgccaattaatgcgtcacactaagctacgtgaagagacattaaaagtagtaattgagaccattcaatctcttgatccaaaaccgggtttaagtattgatacagaggaatcacagtatgttattcctgatgtactggtaaaaaaatcaggagaacactggcaagttgagttaaatacggatagcattccccgcctacgcataaatgagacttatgcagcgcttgggcaatcagctcaaaacgaaagcgatgggaaatttattcgtgacaatttacaagaggctaaatggctgataaaaagcttagaaagccgtaatgagacattattaaaagtcgctcattgcattgttgacacacagcaggcgtttttcgaattcggtgaagagcatatgaaaccccttgttttggccgatattgcagaacaggttgagatgcacgagtccaccatttctcgcgttacaacgcaaaaatatttgcattgtcctcggggaattttcgaattgaagtattttttctcaagccacgtaaatactgataacggaggtgaagcctcttcaacagcaattcgggctttagtgaagaaactaatcgcagcagaaaacccagcgaaaccactaagtgatagtaaactggcaaatatgctcgccgagcttggtatacaggttgctcgacgaactgttgcgaaatatagagagtcattatccatcccgccttcaaatcaacgtaaagagttggtttga

SEQ ID NO: 313778 - DNA, 288 bp, Proteus mirabilis; identical to SEQ ID NO: 293839

SEQ ID NO: 313779 - DNA, 450 bp, Proteus mirabilis; identical to SEQ ID NO: 293838

SEQ ID NO: 313780 - DNA, 855 bp, Proteus mirabilis
atggtgctgatgatagtcagcggacgctctggttcaggtaagtcagtcgctttgcgtgcgcttgaggacatgggattttattgcgttgataacttacctgtcgatctgttaccggagcttgcgaaaacactggctgagcgtgatgctgccgctgccgcagtcagtattgacgtacgtaatatgccagaatcaccggagattttcgaaaaggcgctggaaagtttacccgcggaatattctccacaactgttatttttagatgctgatagaaatacgctgatccgccgttatagtgatactcgacgcttacaccctctttcaacgaaaaacctctcgctagaaatggcgattgatacagagagtgatctgctcgaacctttacgatcacgggctgacctgattattgatacctcagagatgtcagtgcatgaattagccgaaatgctacgtacacgcttactcggtaaacgtgaacgcgaattgaccatggtatttgagtctttcggttttaaacatggtattcctatcgatgctgattatgtctttgatgtacgatttttacctaatccccactgggatcccaaattacgcccaatgacggggttagatcgtccagtcgcagccttcctcgatcgccataccgaagtgcataactttatttatcaaacaagaagttatctagaactttggctaccgatgttagagacgaataatcgtagttacctaactgttgctattggttgtactggcggcaaacatcgttctgtttacgtggctgaacaactggctgactatttccgctctagagggaaaaacgtacaatcacgccatagaacacttgaaaagcgcaaatga

SEQ ID NO: 313781 - DNA, 273 bp, Proteus mirabilis
atgacccaatatcgacgcgtagcgataaaaaaccgtttaggcatgcatgcaaggcctgccatgaaattgtttgatttggtcaatacatttcaatcaacggtgacgttacgtaaccatgaaggcgttgaggcgcaagcagatagtgtgattgcgatgttgatgttagattccgaacaaggcagtcacatcgatatagaagccagtggctgtgatgaaaaagaagcgattgatgcgattattgcattatttgaatcagggtttgatgaagattaa

SEQ ID NO: 313782 - DNA, 411 bp, Proteus mirabilis
atgacaaagccaacaattatcatcaatgaacttgatgcagaacgtttagattcattactagagcaacctgcctttgcagacagcccaattgcagaagctttaaatgaagagttagatcgtgctgacattgttacaccagctgatatccctgctaacatcgtcaccatgaacagcaaagtccgttttatggacttaaaaaataatgaagagcgtattcgtactttagtttaccctgcttcattaaaagatagtgcgactgaattatcagtcatggcgccaatgggggcggcactattaggtttagctatcaatgatgagatcagttggcagcttcctaatggccttgaaactaaggtcaaagtattagaaattctctaccaacctgaagctgctggtgaattacaccgttaa

SEQ ID NO: 313783 - DNA, 1329 bp, Proteus mirabilis
atgaataatacagatcaggtaaaacagctggaagaggcagtttctcttgcactggagatcgcctcaaaacagtgtgacggtgcagaagttgcaattaataaatcaacaggcataagcgttagtacacgctatggtgaagtagaaaatgttgaatttaatagcgatggtgccttagggatcaccgtctatcagcaacaacgtaaagggagtgcatcttctacagatttaagtcctgatgcgattaaacgtgcagtacaagcggcggtagatattgcgcgctacacttctgttgatccttatgcagggcctgctgataaagccctgttagccttcgatgccccttttcttgatctctaccacccaacagacataacagcagataaagcgattgagctggcgtctcgagcggagcaagctgcattagacagtgatagccgtatcgtcaataccgaagggggaagctttaatagtcatagtggaactcgcgtctttggtaacagccttggtttattaaaaagctactcttcatctcgttattcaatgtcgagttgcgttatcgctcgtgagggtgaggatatggagcgcgattatgcctataccattagtcgccgttttgaggcattacaatctcctgaatgggtaggacaagagtgtgcacgccgtaccttatctcgtctagctccccgtaaattatccaccatgaaggcgcctgttctcttctcagcggaagtagcaacggggatcttcggtcatttagtggcagccatcagtggtagcatgatctaccgtgagtcatcttgtttgttagatagcttaggaaaacagattttccctcaatggttaaatattcaagagcgtccacatattgtgggaggattagcatcaacgccttttgatagtgaaggggtacgcacatcagatgcagatattattaaagatggggtactgcaagagtggctccttactagctattccgcaagaaaattagggttaaaaagcaatggacatgcggggggcattcataactggcgtatcccagggcaaggtctctcctttgatgagttgttaaaagagatgggcacagggcttgtggtcactgagttaatgggacaaggggttagcacggtgacaggggattattcccgtggtgcgagcggtttctgggtcgaaaatggtgaaattcagtatccagtgagtgaagtgactattgccggtaacttgaaagagatgtgggcgaatattgccacaataggtgatgatattgaaacacgcagtaatattcagtgtggatcactactattaccagaaatgagtatcgcaggtcagtag

SEQ ID NO: 313784 - DNA, 561 bp, Proteus mirabilis
atggcaaagcagccagaagagtggcactacctcaatcctgaatttgacaatacaccgttagaagaggaagaagaggaagagatcatttgggtcagcaaaagtgaaattaaacgtgatgctgaagcgttaaagaaattaggcaccgaacttgttgagttaagtgctcaagagcttgaacgtgttcctcttgatgaaaaactactcgcttcaattaaattggcgcaaaaggtacaacgcgaagcgcgtcgtcgccaaattcaatatatcggtaagttactccgtaatgttgatgaagagccgatccgccaagcactagataaactaaaaaatcgccataatcagcaaattttagtgttacataaactagaagatctgcgtacacgtctgattgacggtggtaatgaagtgattgaggaagtggtagcgctttatcctatggccgatcgccagcaattacgcacacttattcgtaatgctaaaaaagagaaagaagccaataaaccgccaaaatcattccgcttattgtttcaatatctaaaagatctctcagagtcagcttaa

SEQ ID NO: 313785 - DNA, 282 bp, Proteus mirabilis
atgaaacagattatttttgatttcagcacattggcggatcgagatgctttttatcatcagtttgctcagcaatttcaattagatgaagcattcggtaataatcttgatgcgttatgggatgtattaacaggagaaattgaattgcctgttaatattgttttcagacatgcaccgcatcattcccgcaccttccagcccattattgagataatgcaagaagcgcaagagacgctgggtaaagagctatttcgctttcattgtgaacataaaaaagctaagtag

SEQ ID NO: 313786 - DNA, 507 bp, Proteus mirabilis
atgggcaaacgtctattccctgttcttattgttatggctgttttattttttgttctgtataaaggattagtacctgaaacgcagataccagcaacagcgcctcctacatcgacaacatctacatcgtcaaagagttcaatcagtcagcctgagtctcaacgtcctttagcaattgatgaaaagacacaagctgataaagtggctgattatttgcaacaacacgctcgcttacctgatttttatatcagcaaaaaagaggctcgagctaaaggttggaatgcgaaagcgggcaatttatgtgacgttttaccaggacgggcgattggtggtgatcgctttatgaaccgtgaaaaacagttacctgaagaagcagggcgccaatggtttgaagcagatgtcaattatcaatgtggacatcgtggtagcgatcgcctgctatattctaatgacggattaatttatttaaccaccgatcattaccgtaccatgcaaagagttgcaccttaa

SEQ ID NO: 313787 - DNA, 1446 bp, Proteus mirabilis
atgagtttagctgttgtcagcgaaagtctgttggaagcgaacaacctgagtttagatgatttagcatcgacactagagcagcttgcacagcgtcaaattgattatggtgatctttattttcaatcaagctaccacgaagcatggatattagatgatcagataattaaagatggctcttacaatattgaccaaggggttggcgttagagcgatttatggtgaaaaaacaggttttgcttatgcagaccaattaacactcaacgcacttaaccaaagtgctcatgctgcgcgtagtattgtgcaagcacaaggcaatgggcagatccatacactgggtgctattcaacatactccgttatacaacctaaatgatccattacaaagtttgtctcgtgaagaaaaaatagcactattacatgacgttgatcgtgtggcacgggctgaagataaacgtgttaaacaagtcaatgcctcattaacgggagtgtatgagcatgtgctagttgctgcaacggatggtactttagcggcggatgtgcgtcctcttgtacgtctttcagtaagcgtactggtcgaagatgacggtaaacgtgaacgtggttcgagtggtggcggtggtcgttttggttatgattattttctgactaaagaaaatggcgaaacccatgcagcgacttatgcccgtgaagcggtacgcatggcattagttaatttatcggctattgctgcaccagcaggtacaatgcctgtggttttaggcgccggatggcccggtgttttattacatgaagctgttggacatggtttagaaggtgattttaatcgtcgtcaaacatcggtattctctgggcgtattggcgataaggtaacttctgagttatgtactatcgtggatgatggttcaattgaaggccgacgaggctccgtggcgattgatgatgaaggcgtaccaggccaatacaacgtattaatcgaaaatggcatcttaaaaggctatatgcaagataagatgaatgcgcgtttaatgggggtaaaaccgacgggcaatgggcgtcgtgaatcctatgcacatttgccaatgccacgtatgaccaacacctatatgcttgcgggtaaatcttctcctgaagagatcatcgccagtgtcgatcgcggtatttatgcgccaaactttggtggtgggcaagttgatattacctccggtaagtttgttttctcaacttcagaagcctatttaattgaaaagggtaaaattactaaaccaattaaaggcgcaaccttgataggttcaggtattgaagcgatgcaacaagtttctatggtgggtaatgatctcgcattagataaaggtgtcggggtgtgtggcaaagaggggcaaagcttgccggtaggggttgggcaaccgacactgaaattggataagttaaccgttggtggtactgcttaa

SEQ ID NO: 313788 - DNA, 861 bp, Proteus mirabilis
atgaaaaaagttaatgtcgcacttttgcagctttgtagcggaaaaaatataaaaaataatctggcgcaaatagagcaacagattaagcaactccccgattcagtcaagcttgtattaacgcctgaaaatgcattacttttctccagcgcaaaagattatcataaacatgctgaaattcaggggaaagggccattacaagatgcgattgctaatatggcgcagcgctataaggtgtggatcttagtgggttcaatgccattgattagccgagattctcctgagcagatcaccagtagtagtttagtttttgatgatgaaggggtgatccgcgctcgttatgacaaaattcatatgtttgatgtgaacattgatgatgaacaaggcgaatataatgaatcagccatttatcaacgtggtgaacgcttgactgtagtggatacacctgtggggaaattaggtttaacgatttgttatgatttacgttttcccggtcttttccaagcattaagagaaaaaggtgctgaaattatttctgtaccggcagcctttactcgtttaacgggtaaagcgcactgggagccattgttacgcgcgcgggctattgaaaatcagtgtattattttggcaccggctcaagtcggtacccatgatgctcgtcgcacatggggtcatacaatggctgtggatggttgggggaaagtattgaaaaagaaccctgatgcggtcagtgccctaacgctcaatattcgagtcgatagtttagaaggtatgcgtgaacagatacgggttgtgaaacataatcgctttcgcccgaaactgacacacttaataaaaaaagttaaggataaaaaagaattatga

SEQ ID NO: 313789 - DNA, 3804 bp, Proteus mirabilis
atgaagcggctgtctaaatctttattattgataacccttttttgcctgattattttcgccgtagtattaagtggatttcgttattttctgcctcgtttagataattatcgccctgaaattgaaacctatttatctaaacagttcaatagcccagtcaccatgacacaggtgaaaggggaatggcaaaactttggccctgatatccaaattaccgggctgtatattgataataacagtgttgaagtgagtgctgaacagatcactttctcctttgatgtttggcgttcactgcttcattttcaactctattttcgtgaattaacctttgaacagttagctgtaaattataaaaaacctatttttactgggcaaaatggtgatattaccttcactgaacccgatgatatctcttccattttcttaaaacagtttgaccgatttaaattggttgatagccgtttcgtgtttttatcaccttctggtgacactagcacgctccatattcccgaattaatgtggctcaatcagaaaaaccgccatcgtgcgcaaggggaagttactttagataccccaataaatcactatggtggactaaaagtacgtcttgatctctatacgaaaaagcagggggcactggataaaggacaggtgtttgtcaccgctgatgaggttgatatttccccttggttaagccaatgggtgaaaagtaacagtggccttggtgaagcgaaagccagcctatctaattggatagagatcagcaatgggcggatcacgggtagccagttacaaatccatcaaggtgaaatggattggcgtaatgaagggcgcacacatgtattaaaggtagaagatttaattctacgtatgagacgccaagaaaatggctggcttgctgatatcccttatacccgaaaaataacgatggatggtgatgaatggccagatggttatttagcggtactttatcaacctaaagaaaaacagcaggatgaagcttggcgtatccgtgctaaaaatattgaattagaacggttatctgcgttattgcctttgttctcttttttaacgcctgatgtcgtgcgccaatggcagtatcgtcaattttctggcatggtcgactcatttgctcttgatttagcccccgatgattttaaacgtagtgccattgatatcagttggcaaaatgttgcttggaaacgctggcaagaaatcccttctgtggcacattttaatggtcatttaaagggcacattacagcaaggagtgcttaattttgcgcttaataacagtgaaattgatactgctgggctttttaaagcgccacttaatatagaaaaaggcactggtacggtttactggcagcatcagggagattctctgtcgttatggagtcaagggattgatataaaagccacctccgcttgggttgccggtgattttcgttatcaaaaacaaggagagcatcaacaactgtctattctttcgggagtgaatgtgaccgatgccggtgagacatggcgctatttacctgaaaaatatgttggtaaagatttaacacaatatctctctgacgcgattattgctggaaacgttaaaaacggtacgtttatttttcatggtgatccgcgggatttcccttttgaacaacataatggttggtttcaagtctatgccccagtaaaacaggcaaccttcaaatatgatagtgaatggccggcactgtttgatcttaatgttaatcttaattttaagaataacggcttatggatgtcctctgataatgttcaggttggtaaagccaccgctaaaaacttgacggcgattattgaggactataacaaagaaaaaattgttattgatgcagatattgaagccacgggcgatgatttaaaagagtattttctagcttcgcaaatggcaacgattggtcatacacttgaaatactaaaagtggctggaaaaattaacgggagtttgcatctcaacattccttttgatggcgagcaggtggtcgcttctggtcaggtaaacttaaacaataatgatgtcacattagcctttatggataccaccctagaaggtgttacgggacaatttcgttaccataatgataaattagagagtgatactttagccgcgaattggtttggtcaacctcttacattttcttttgctggtggtgatcaacgggatgcttatcaagttggtgttgatctaaaaggacaatgggatatcgggaaaattaagggattacctaatgatatacaacataaattaagcggttttttaccttggcatggcgcggtgagtgttaatattccagaaacagcggatgtcaattatcaagtggatctgaccggacaagtgaatgcgctacaaagtcagttagctgcgccaagtaccgatgactttaaaaacgcttcccccattgtgatttcagcaaaagggaatagtgaaaaacttaacgttagtgccgatgcacaagatcagtggtcattaaatagtgaatgggcgttaggtgaaccattacgtctattacaaggtaatttagtctcttcctcgctcacactacctcaattaaatgatcaatcacgattgactattgctttgcagggattgcaaggcgataaatggctacctactttaatggctttttcatcattagccccttctgaaaacgcgatacgtttccctaccaatattcatattagtctgcctgaacttaattttgctggtcagcaatggattgcgccacaaacagaaattatgcgtgctgatgatggtgtaaaattatccttctcagggagtgagttacgaggtgacttatttgtacccaatacggcacaaccttggcaggtgaatattacctatctctattttaatggcgctagcccaacggaagaaaataaatccttaaaaatggcaaatgagcctgacgtcaaaaaagcagttcaattttcacttaaagatattcctgctatcaatttcgcctgccaagagtgttgggtgaatggattattactagggaatattgaaggtgcaatacagcctcgtgacggagcattattgttaactgcaggtaagcttaaaaatagcagtggcgagctatctgtgagtggtgtgtggtcagaagatagtttaggcaacagtatcactaagctagcaggtaagctaatggcaccggaagtcgatgaaatggcggcttactttggttatatcattccgattgttcagtcaccacttacggcagatttctcactgcagtggcacaataccccttggaattttgatctaaaaacactcaatggtgaagtgaatgcttctcttggaaaagggcgtattgaaaaggtggatgttgggcaagcgggaaaattattacgtctagtcagttttgatgctctgctacgtaagttgcaattcgactttagagatacttttagtgataattttgagtatgattccattaaaggtgatctgacggttaaacaaggtgttttaaacgcgaaaagtgttgctgtagatggtgttattgccgatattgctataaaaggtcaagtggatctgttggcgcgtaaaatggacttacaagtagtggtaactcctgaaatatcagctacagtaggcgttgctaccgcatttgctattaaccccatcgctggtgctgctgtatttgcagcttcaaaagtactggggccactttggagtaagatttcagttatacgttatcatgttaccggaacggtagaacaacccaagattgacgaagtactgcgtcaacttaaggaggatcaggcgttatga

SEQ ID NO: 313790 - DNA, 1470 bp, Proteus mirabilis
atgacagcagagctattagtgaatgtgactccctctgaaacccgagtggcctatatcagcgggggcatactacaagagatccacgttgaaagagaagccaaacgaggtcttgtcggaaacatctacaaaggtcgggtaagtcgtgtattacctgggatgcaagctgcatttattgacattgggcttgagaaagccgcttttttacatgcttctgatattatgcctcacacggaatgtatcgcgggtgaagagcagaaaaaatttaatgttcgtgatattgcgcaacttgtacatcaaggtcaggacttgattgtacaagtagtgaaagatcctctaggtacaaaaggggcacgtcttacaacagatatcacattaccatcacgttacttggtgtttatgccgggggcttctcatgtgggtgtttcacaacgtattgaaagtgaagaagaacgtgagcgcttaaaacgcttggtagaagagtattgtgatgaaaatggtgggtttattattcgcactgccgctgaaggtgtcggcgaacatgaaataaaacaagatgctgcttttttaaagcgcctatggaataaaatcattgagcgtaaaaaaagaaataaaacgcgcattcaaatttatggtgagctcgctttagcacaacgtattttacgtgattttgcaggggctgaattagatagcattcgggttgactctaaattaacttatcatcaattacaggagtttattggtgaatatattcctgaattaaccgctaaacttgaattacaccaaggtaatcaacctattttcgatctctacggggttgaaagtgaaattcagcgcgcgttagagcgaaaggtcgagttaaaatcaggaggctatctgattatcgaccaaaccgaagcaatgacaacgattgatatcaatacgggcgcttttgttggtcatcgtaatttagaagagacgatttttaataccaatgttgaggcgagtcaagcgatagcgcgacaactgagattacgtaatttaggcggcattatcattattgattttattgatatgagtaatgaagatcatcgccgtagagtattagcttccttagaacaagcattgagcaaagatcgcgtgaaaacgaccatcaatggtttttcacaattaggtttggttgagatgacacgtaaacgaacccgtgaaagtctcgagcatgtactttgtgatgactgtcctacttgccaaggccgtggtacagtaaaatcagttgaaacggtatgttatgaaatattacgagaaattgttcgtgttcataaaaccatagacgcagatcgctttttggtttatgccgcccccgctgttgtggaagcactaaaaggtgatgaatcacatgctttagccgaagtggaaatttttgttgggaagcaagtcaaagtgcaaactgagctactctatagtcaggagcagtttgatgtggtgatgatgtaa

SEQ ID NO: 313791 - DNA, 588 bp, Proteus mirabilis
gtgatcactctttaccttgcatcgagttcccccagaaggcgagagcttctgtcactgttggatgttcaatttagcaccattacaccggcaattgatgaaatttggcaacaaggtgaagcaccggaagattatgttatccgtttggcgagggagaaatctcaagagggggtacgtcaagcgacaaatgactatccggtattaggctctgatactatcgtggttcaagcaggtcgtattctggaaaaaccacgagataaagcgcatgcagcacaaatgctaagtaatctttcaggtgcaacccaccaagtgatgacggcgattgctatttcagataaaacccgaacaataagccaattagttgtcacggatgtgacttttagaaagatgacagaaagtgaaattagtgcgtatattgaaacgggagagccaatggataaagctggcgcttacggtattcagggaaaaggaggccgttttgtacaacggattgagggtagctatcatgctgttgtcggcttaccgcttgttgaaaccgaagcattgatagctcaatttttgtctctagcgaatgataaggagatttcatga

SEQ ID NO: 313792 - DNA, 495 bp, Proteus mirabilis
gtgacaatcaatccttatcgtagccgtgggcgttggattatttggctctcgtttctaatagctttggtgttacaaattatgccttggcctgagcaactagaagtttatcgccctatttggccggtgttgtttctgatttattggataacgtcattacctcatcgtattagcgttggaacagcatttgttcttgggatgagcatggacttagtgcaagggacaacattaggggtgaatgcgttggcttataccctagtaagttatgttatcgcctttaaatatcaattattttgtaacttagcgttatggcaacagtcattagtggtaatgttagcgattggtgtggttgatcttactgtattttgggcagaatttttgctttctcccgtgacttttcacccacaagtattctggaatagcccagtcagtggtattctttggccatggctttattttttgcttcgcaaagtccgtcaccagttttcagttcattaa

SEQ ID NO: 313793 - DNA, 1047 bp, Proteus mirabilis
atgaagcctatttttagtcgggggccttccctgcaactaagattaataatcgctgtgattatcgcgatatcgttgttaattgctgataatcgcataggtgctttttcaaaagtccgtcagtatttggatactgctgtgagtcctttctattttcttgcaaatgggcctcgtcgtttccttgatcaactctctgaaacctttgcaactcgcgaacgtttacaatttgaaaatcaagcgctaagaaaagagcttcttgttcgcagtggtgaaagtcagctactggaacaatttaaacaagaaaatgcccgcttacgagaattacttggttcacctttacgtcaaaatgaacaaatgacggtaacacaagtgttgtctggtaatagtacgccttatcgagatcaagtggtgatagacaaaggcactaatgatggggtgtatgaaggtcagcctgttattagtgataaaggcgttgttggacaagttattgccgtaagtgagttaaccagccgagtactgttaatttgtgatacctctcatgcattaccggtacaagtattacgcaatgatattcgcgttattgcctcaggggctgggtgtgcggatgatctactgttagaggcactacctgcgaatatcgatattcgtgtaggggatgtgttagtcacctcaggattagggggacgctttcctgaaggttatcctgttggggttgtttcttcggtaaaagtcgataatcaacgtgcttattcggtgattaatgtgcgaccttctgctgaattacaacgtttacgttatctgttgctattatggaacgcctcagagaagaaacaagcgccaccgttaccttcagaggtttaccgtgctgccaatgaacgtttgatgcaattaatgccacaggtactgcctaactatgaacaagcggggccaccactgcctcgttctatgtcacaagagccaacggaaaatagcgccaccccaagtgatatagcaccagtagcaccaacggaaaacaataaacctcaacctaatacgaatcgaggtagatag

SEQ ID NO: 313794 - DNA, 1044 bp, Proteus mirabilis
atgtttaaaaaatttcgtggcatgttttccaacgatctgtctattgacttgggtaccgccaataccctgatttatgtcaaaggacaaggtattgttctcgatgaaccttctgtagttgcgatccgccaagatcgcgcaggtacatcaaaaagtgttgcagccgtcgggcatgaagccaaacagatgctagggcgtacacctgggaatatcgcagctattcgtccaatgaaagacggtgttatcgctgatttttatgtaaccgaaaaaatgcttcaacacttcataaaacaggttcataacaacagctttatgcgtccaagccctcgtgtattagtgtgtgtacctgttggtgcgacacaagttgagcgtagggctatccgcgagtcggcacttagtgcgggtgctcgcgaagtctttttaattgaagaacctatgtctgctgcaattggtgcaggtttaccggtatctgaagcgacgggttcaatggtcgttgatattggtggtgggactacagaagttgcggttatctcattaaatggtgtggtttattcctcttctgtacgtattgggggagaccgttttgatgaagctatcattaattatgtacgtcgtaactacggttcattgatcggtgaagcaaccgctgagcgtattaagcatgatattggctcggcttatccttcagacgaattaaatgagattgaagtacgtggacgtaatttagcagaaggggtaccacgtagctttactttaaattccaatgagatcctcgaagccttacaagagccattaacaggtattgtaagtgctgtgatggttgccttagaacagtgtccgccagagcttgcttctgatatttcagaacgaggtatggtcttaacgggtggtggggcactgttacgtaacctagaccgtttattaatggaagaaacaggtattcctgttattgtggctgaagatccgcttacctgtgtggctcgtggtggtggtaaagcattagaaatgatcgatatgcacggtggcgatctatttagcgaagattaa

SEQ ID NO: 313795 - DNA, 975 bp, Proteus mirabilis
atgaaagcattattagtcgaacaacacaacgataaacttagcgccggcgtccaacatatcgatgaatcacaactccctattcatgaggtcattgttgatgtccactactcgacactaaactacaaagatggcttagccataacaggtaaaggaaaaattctacgccaatttccaatggttcccggtatcgatttttcaggagtggttcaccatacagaagatccccgctttcatattggacaacatgtgttactaaccggttggggggtaggtgaaaaccactggggcggtttagcacaaaaagcgggcgttaaaggtgattggttaacggcgctgcctgaaggactgtcgttaaaaaatgccatgatcattggtaccgctggttttactgccatgctttgtgtgatggcgttagaacaaggtggcataacacccgatagtggtgagattttagttacaggtgccagcggtggtgtcggtagcaccgcaattagtttattaaccgcacttggctatcaggttaccgctctcagtggcagagccagcaatcacgattatttacgtcaactgggggccgagcatattatcacccgtgaagcatttgaggctgcgggtaaagcattagataaacagcgttgggcaggcgctattgataccgtaggtggacaaatccttgccaatatcttgtcacaaacacattacaatggcaccgttgccgcctgtggcttagcaggaggatatacgttacctactacagttatgccatttattttacgcaatgttcgtctgcaaggtatcgattccgtctattatccagcagaaaaacgcgctcaagtatggcaacgtttactgcagctattgcctgatacattttatcagcaaacagtaaccgaaattacactcgatgaggtgccacgctatgctcagatgataatggataatcaagtaacaggtagaaccttagttaagttgtaa

SEQ ID NO: 313796 - DNA, 444 bp, Proteus mirabilis; identical to SEQ ID NO: 293821

SEQ ID NO: 313797 - DNA, 471 bp, Proteus mirabilis; identical to SEQ ID NO: 293820

SEQ ID NO: 313798 - DNA, 1350 bp, Proteus mirabilis; identical to SEQ ID NO: 293819

SEQ ID NO: 313799 - DNA, 249 bp, Proteus mirabilis; identical to SEQ ID NO: 293818

SEQ ID NO: 313800 - DNA, 1452 bp, Proteus mirabilis; identical to SEQ ID NO: 293817

SEQ ID NO: 313801 - DNA, 882 bp, Proteus mirabilis
atgccttggatacaattaagactaaatgccacctcagaaaacgccgaagccattggtgatgagttggttgaaagtggcgcggtatcagtaacctttcaagatagccacgatacccctatttttgagccattaccgggagaaactcgcctctggggtgataccgatgttattggcttatatgatgcagaaaccgatatgagtatcatcgtggctatgttagaaaacacggcggtgctgggtaaaggatttgtacataaaatcgaacaattagaagataaagattgggagcgcgaatggatggataacttccaccctatgcgctttggcgaacgtttatggatttgcccaagctggcgtgaagtgcctgatcctaacgctgtaaatgtcatgctcgatccaggtctggcatttggtactggtactcacccaaccacctctttatgtctacaatggctcgatggtttagatctcgcaggtaaaaccgttatcgactttggttgtggctcaggtattttagccattgcagcattaaaactgggggctgcgaaagcgataggtatcgatatcgacccacaagctatccaagcaagtcgcgacaatgcgcaacgtaacggtgtcgctgatgcactgacgctataccttgctaaagaccaaccagacaatctcagtgccgatgtagtggtcgcaaatatcttagctggcccattacgtgaattagcacctattatcagcacactgccacgtcaaggggggcatttaggtctttccggtgttcttgccacacaagctgacagtgttgcacaagcttatcaagaacaatttactttagatcctgtggctgaaaaagaagagtggtgtcgtattaccggagtgaaaaaataa

SEQ ID NO: 313802 - DNA, 222 bp, Proteus mirabilis
atgaaaggaacaactattacatatctgatgttggcgtacgaaacagaacgagtaaaccgcaaactgaaatacgtaaaaaattccaatgttgatttcaatagaaagttacacaaaccatatcgcagtgagcgggtattaaatcggcttatgaaattggaggcggctgtatttttcaaaactattaaatctagccaacgggaggcatctaatgcagggaactaa

SEQ ID NO: 313803 - DNA, 240 bp, Proteus mirabilis
atgcagggaactaattgggttaagacgaaaagtgaattaccgaaacttcacgagcctgttttattaatctatcacggcatagtttacaacagtgttttctacttgcaatcgtacgattcagcaaatggatgggtatggtcttttgttgatgatgatgacgaattcattgcattgtatagcgcgagtcactggatgtaccttaaagatctgccactcccaccaatgccagagggtgaatga

SEQ ID NO: 313804 - DNA, 459 bp, Proteus mirabilis
atgaccaaattggtagatgaaaagacacttattgatgttggtctgttaagagaatggaacgggagatggaaatttaaattttcaattgatggtaagtttaagttcgcgagcaacaaacaatccgcaattgaacgtgcgtctgaggcgtacgtgaaagctcccaaagaaactcttctcactaaggacgagcgcatcatggcgcatgagcatgaattcatagaaagcatggataggatttatgggcgttactcaatttgtgagatagagagtttcattcataaatcatcgataaaagccgcaagcaacagggcgtcttcaggcagggaatttaacaatgatggtggaagaagaacgggggcagctgtgagctcagaatctgctcgggcatttgctgaggagaaaatgaggcttgagagatatcttgagcatagagttaacgcagggggatcttatgactaa

SEQ ID NO: 313805 - DNA, 210 bp, Proteus mirabilis
ttgaaatggttaatgttttttattccgcactacactaccgaagatgtcgtgttcgatgaaggtgaagatgaaatttatccagtgtgttgccttgatgacgtaagggagggcgaaaaattcccatgggtgggaacaatgcgctcacttagtttcatgaactttggttatttccccaaacttgtgggtgagctacgaccgttcaaaaaatag

SEQ ID NO: 313806 - DNA, 948 bp, Proteus mirabilis
atgaagcggccaagcaatcccatagaaatactcgttcatagcactgttaggatcgaatgtttaaaagatagcaagagtttttcgtctggaactgggtatttatttggtttcctagagcaagagagtggggaatcatgtccatgtattgtaacaaataagcatgttttagaaggttcagaagacgctatatttcatctaacaagacaggatgataacggagatcctgacctaggaaattatgatgctatagggataaaggaagtaaaaaattatgtaatataccaccccgataaaaacattgatctagcagttataccgataggtatgatattgaactcagcagaggctagcggtaaaaaatacgctttcacataccttaataaagattttatcatttctgatgaactacttggtgaactatctccaatggaagatattatcatgataggttatccgaatggtctttgggatactgtgcataatttacccatcataagaaagggggttacagcaacagatccaaaactaaacttaaatggcaagtctgagtttttgattgatgctgctgtttatcctggctctagtggctcacctgtgttattggcaaatattggccgatatatagataaacatgggaatatttgtatcggaaatagaatagccttattagggacagtgtatttagctcaccagtcaagtgtcaaaacgatatctaatgtcaaggatgaagaaaatagagttatcggaatgttccctaacaacttggggtatgtcataaaagcatctgagctactggctttcgatgatgcaatttcagattttatagaaaaacatagagatgctaaaggattgtgggacaagagtgataatgcaccacaatcaagaaattccccttgccactgcggcagtggtaaaagatataaagaatgtcacggcaaattaaactag

SEQ ID NO: 313807 - DNA, 414 bp, Proteus mirabilis
atgaccagtgtatcaacaattaacgtacctttccacggtgataacctttatctggttaattatgaaggtcagccattcgtggctatgcgcccattcattgaagggatggggttagattgggcttcacaatatactaagataaaacaaagatttaaaacctgtgttgtgaatatcacaatgcagcttccatgtgataatcaacgtcgcagtgttgtttgcttagctcttaaaaagttaactggttggcttcatacaataaacataaacaaagtaaaacctgaaatcagagagaaggttgccgcataccaagatagaagcgacgacgtactttatgaatattggactactggtgaggttaagaaaaaaacacaaatcaactgttcaggaacgcaacccattaaagaatgctgttaa

SEQ ID NO: 313808 - DNA, 324 bp, Proteus mirabilis
atgtcgaaacttacaaagagcatggaaaaactcgccctgctggctgacgacagttttaaaacagtccatgatcgcctccgcatcgccaggcgtttaagccagcatctgcacaagctgaatatccagattcaggatctccagcatctgaaatcgttacatatagaaagctacgtgatggcgcgacgggaagcaggcattacgccacgcacgctacaaaacgagatggctgccctgcgcaccatccttgctcaatctggacgtcaaaaatttgcccaatcggagcgcatcagcaataaaaggttgaacttccctaagtcctcatag

SEQ ID NO: 313809 - DNA, 1131 bp, Proteus mirabilis
atgaaaatatatttaaatgatgctggtaatggcgacagcatcatactcgcaacagaaaatacaacaattatgattgacggtggtacagcagcctcttacaacatttggaaaaaaaacgtatcagagatcaataaaattgatgctttatttgtaacacatattgataacgatcacgttaatggtctcattcgtatgtttgaagaaaaagctcatccagtcataaatgaaattttctacaatggcattgaacaggtaactaactctgaattttgtcaggatgattcaaataatgaggaatcaagtatacttgattctatgatatcaaatttctctgatgatgttgaaggtcaatcaaatatagggttttcggaaggaacatctctttcatttttattgagagaacttagttataatgtgaatgaaagatttgatggtaaggtaattaccaacacttcaaaaccaaatgtttttagtataggtgatgttactattgaaattataggaccatcgaatgaaaatatctactcaatcaagaataattggcttgaagttttgtctgaatacggggtgaaaagaaaactaatcaataaaaaatgcagtgtagcatttgagaaatatatcgattcattaagaggtgatcttgatgttgaagatatatgtgaggcttcagaagaatcaattgagaatttatcgaataaaccatttattgatgataattcgttaaataatatgagtagcatatcttttatagctgagtgcaacaagaaaaaaatacttcttctaggagatagtgatgctcgaaccatcttagaatggatggattgtagaggttatgaaacaattaatgtggatgcagtgaagttaccacatcatggtagtaaacataattataataaagaattattagaaaggattttatgcaataagtatttaattagtactaatggaagaaaacatagtcatccagatttagaaacactagctaggattgtaagatattcaaaaaaacaaccagtaaatatttttattaaccattcaatatcacatattgatgagtcatttaaagaaaaagtatcaaattatagtcctggctcaaatatattgacaggagagagagaggttttgttatga

SEQ ID NO: 313810 - DNA, 1437 bp, Proteus mirabilis
atgaaattaaataactatcctacaggaagtgtttatatatttcagtcacagaaggaggattctgttaggaggggaacctgttttagtataagtaataatgttgttataacggcaaaacatacgattgaggatggcggagaatatagcctttatttaaaacctgatgatttcatatcaggagataaggttaaattaaaaattattgatggatatgataactcagaatccgattttgttcttcttgaatgtatcgaaaatgagatttcgtcatttttaaatgccggaatagtcagcttctctgtcgatgaagaggtccaagtatatggatttcctgcggaaaagaatcaaattccagctggtttttcttcaagaatatgcagtgtaattgagaatataaaaacagctaagcatagctatgaaatagcacaggtacctactgtttcgaaatataaaggtatgtcgggatcacctgttttattcaatggttacgttgttggtatgttaattgttcagcaaggaaatagtactttacatgttctatctatttctgaaatatataataatatcggtgaggaggttaagggcctaaatctaaatacagcgctacgggaggaaatagagtatatacctcctgaacatccagacactccgtttgaaatttgtattgattgcaataaagctatacccaatataaaagggattaatatcggttttgagtatagtgaatggcgtaaaaatgaacttattgaatattcaaaagactggttgattgattattcattaactgcgcagcataagaaagctataggtaacagaccagctaaacaattacaagaggctataaagaaatatccaattgataatttaaatgctttgggtgatctttttttacatatggccattaggcaaagccataaaacaattcctgtagttaatggtgtctatgatatcaatggtaattcacttttttcttgctcacacgttgttattaatagtgggcaggttgaattatggcttggtgcttcatcaataaaaagtactatgaatgaagccataacttctgttatagaaaacattaacaatttaattacaattaatgaaataaaaaacagatttttaattataacatctgaaatagatgaagaatggccttttaaagaaaaactaaaaagactgtctgataatagaatttccattgagaaacgagtggataaaataataataccaatatttattgttaactcaagtgatataataaaaaactataatgaaaatgaatttttagaaaaattcaaatccaaaatagataaatgtcgggaattaattacgtctcattacagcaataaaattgtcaagttaattgatgttagagtgtttctatttcctgtggatgatatcacctcattgtataatgatttcaaaaaggaagtgcaataa

SEQ ID NO: 313811 - DNA, 2178 bp, Proteus mirabilis
atgaacattgtaaaatataatgagctaaaaaatcgtatagctgcagaggatagtgtttgggtagagataattttggaattaattaatgaatataataaacatgagaacaaatatttaatccaagatttagttttgcgtttattagataaaaaagattatttcagcgagcatgttaatctactaaatagattaatatgggagttgggattgtttccatatatagacgacaccaagatagattttaagactaaaattggaagggatgttttcttatccccgatagatgacgagactacattccatgttaagcaggcagagatttactatagaatagttaatggtgagaatattgttttaagtgctccaacaagctttggaaaaagtcttataatagatgctttaattagctctcggttattcaataatattgttgtagttgtacctacaatagcactgatggacgaacttaagaagaaatttcataagcacaatgatgtatataaaataataacccaatcaaatcaagctacttctggtaaaaatattttcatatacacacaggaaagggtaattgagcgtgactttgagtcaataaaaattgacttttttattattgatgagttttataagttggcgcctagcagtgatagtgattacagatgtgataggttaaatattgcttttcataaactatataatgtatgtaatagattctatatgttggggccaaatataaatggccttacaaatgggttggaggatgaccttaattgttcttttgttaagtttgattcatataaaacagtggctgctgatgaattttactacgaacttaagaccaaaggtaaagacgaagatgtagatatagaaagagataaatatttaaaaagtatacttagtgcacttgattctaatgaacaaactgttgtttattgtaagtcgccaaaacgagccaataaattaatgtcaaaaatattggcaatggatcttacaagtaaacgaccagaaaataataaattttctaagtggttaagggataattatcatcaggattggagtttagctcatgcggttggttatggtatcgcgtgccatcatgcaaaacttccaagagcaataggttcttatctggtcgatgcatttaataaaaaaagaataactatattagtttgtacctcaaccctcattgagggggtgaatacaaatgctaaaaatgtcatcatttatgatgattgtattactggaagaactaaactagattcgtttacttttaataatatttcaggcagaagtgggcgaatgtttaagcactttgttggaagaattcatgtaattggtgccaaacccaacaagcagttgccattaattgatatccctattattactcaaagtgataatgcttcagattctatgcttttacaaattaaaaatgatctatcagagattaatttaactaggatatataaatatactcatcaacaaatcctaccaatagagttaatcaacaaacatcaaggtatttcacctgaaaaactattaacttttgcagaagctttgatggataattgcggtaagtggaataggaatatggtatgggattcattgtatcccacaaaaggccagcttaatcacttatgttttattttatttgagtatttttctatatcaaggatgggtaatggcacggtaaaatctgcatcgcaactgcacaatagattaagatctatcatgaatcatgaaagcgatttggatttgatcaataaagaatattcttattggatagaaaaggatgctgattatactgtggatgacgcagtacaaattatttttgatttcaaacggaatttagttagctataatttaccaaaaataattcttgctattaatgatatacaaaagttaatttttacaagatttaattattcgtttggtgattatactaatttctgtcatgctctagaggcgcatttcgaattaccaactttagttacgttagaagaattcggtattccaatgcagatatctaagaaaattgcaaaagttgcggatattacatcagaggataatatagatatcaccttaggtaagataaaattgaaagcaagtaatggaaaaatatataatgttttgagcgattttgagtcttctcttttggaaaatattcttccttatttataa

SEQ ID NO: 313812 - DNA, 558 bp, Proteus mirabilis
atggcactttcagataccaaactacgcacacttgcccccagaaaccgcccctggcaacttaccgatcatgacggactggtgattgaagttcttcccaccggacggaaaatatggcgtttccgctaccgctttgacaacaaatcgcaaaagatcacgctgggcgaataccctgctttctcacttgcagaagcgcggctttggcgtgaaaagtgccgctcaatggttgcccatggcatcaatctcgcgcagaaaaagcaagaagaaaaacttaaacagaaagacccaacgacagtcaaaacattcgccaaacgctggctgaccgatatcgttgaaaaaagtaaccgcgatccgcgcaacatcactcgcgttatcaagaaggacatcattcccatcatcgggaagctggaactcgaagcccacattcaggtcgtgctcgaccgcatcaagcaacgaggttcggatcacgtcgcattactgacgcgaaacgtgcttaaacgcatgctggcctatgcgatttccaggggaatcatcttcaacaacccggcagccgctatctag

SEQ ID NO: 313813 - DNA, 264 bp, Proteus mirabilis
gtgaaaagtcaagatttgttgggtttatcttctgctaacattctaaatgctgaatttgagaagaagtaccgtgatgttattgctcactttttcagccgtgatccgcagtattggccgatatttcaggataaaaccattcagtctattacacagtttagaaagaccatgacgaatgataaggatcaattacagcgttatgagaatgggcaggcgttatttgaccgtttaatggctgatgggcaggcagatccagcaacatattaa

SEQ ID NO: 313814 - DNA, 951 bp, Proteus mirabilis
  misc_feature (920)..(929): n is a, c, g, or t
atgtcatcaaaatcctactttaccaatgaatcagaatacttaaatgagctgactgagcaagttgccaaagaaaaaccgcaacttgttaatttgctttcgcacaatgttaaagatcctgatacttcgcggattatggatgggctatcttatttatcgggtaatttacgccagcaaatagatagacaatttcctgaattaactaatagtttagccaatatgctttggccaaactacgcgcgccctgtgccaagcatgacgattgttgaatatcatcctaattatgctcagtgccaacacgcaacaaaaatttcagcaggacaaccttttaatgccactccactttatgtgcaaagtgaggaaacaaaccacgagacgttatttcaatgtcgatttagtcaaagtcgcgacctctggttaatgccgacaaaaatcagtaacattttgcagcaaacaaccgccattgaaataacatttgagttagcaacaaaacagccacttgccaatattggcttagataaattgtgtttttacttaaatggtgcgccatttactacaaatcagctctattttttattaagccagcatgtgcagagtgcctctttagtcacagatgtacatacgctacctcttactcacttttcagttacgcctgttggttttcaaaagcaggatgccttacttccatacccgaaaaatagctatgatggctatcgtatactgcaagagtttttctgttttcctgaagcctttctctttctagatattcatggtttggatgacattcctttggctatcgaagcagagcaattcaaactggtgatcaattttgatctagaaattcctgatggcgttattctttacgacgacagtattaaacttaattgcacccctattgtgaatttatttcctattgatagtgnnnnnnnnnntaaatttgacggggaaaagtga

SEQ ID NO: 313815 - DNA, 378 bp, Proteus mirabilis
gtgcctgtggccgttaaaattgcccctgatcttactcatgaagaattaatccaagttgcagatagcttagtgcgtcaccatattgatggcgtaattgcgaccaatacaacattagacaaatcattagtgagtggattagatcactgcaatgaagccggtggattaagcggtcgtccggttcaatcaaaaagtacacaaatcattcgacaactaaatgaagagttaaaaggcgctttacctattattggggtaggggggattgattcattgactgccgcacgcgaaaaaatggatgcaggtgcttctttaatacaagtctattcaggattcatttatcatggtcctgcacttataaaatctataattaatcatatttaa

SEQ ID NO: 313816 - DNA, 573 bp, Proteus mirabilis
atgtattattccttagtaaggaaggcattgtttcggctagatcctgaacgtgcccatgattttacctttcgtcagttaaaacgcttatctcattccccatttcaatttcttattcaacaatcacttcctgccaaacccgtttcttgcatgggactttcatttaaaaatcctctcggtcttgccgccggccttgataaaaatggtgattgcattgatgcattaggggcaatggggtttggctttattgaagtgggtactgttacaccacgagcacaagtaggtaataacaaaccgcgtctctttcgcttagtagaagctgaaggcttaattaatcgaatggggtttaataatttaggggttgataacctaatagagaatgtaaaacaatctcaatatggtggtgtgctgggtattaatatcggtaaaaataaagatacccccgtagagcaaggaaaagatgattacttaatctgtatggaaaaagtttacccttatgcaggttatattgcgattaacatctcttcacctaacacccccggcttacggacactctccaatatggtgaagcattag

SEQ ID NO: 313817 - DNA, 900 bp, Proteus mirabilis
atgaatgaatggtcattattgattttcacctttatgatgaatgccactattggcttaacactcataacaggcctttttgcacgtcgtcttgcacattatctcagtgctgaaagctattatcgctttatgttactaaccttattggtgatttgtggattagccggtttaggctctattgcctccattactcacttaggcgtaccgttaaatgctccgaatgccattagaaatgtcttttcagcttggttaagtcgcgaagttgctgtcactgccatttttgtaggatgtttagggatcacctttttatggctatggcgtaccggtaaattttcgatgctgctatttggtgcaagccttctgattggtctgtttgacatttattgcatggcatccatttatcgccatacttccattttaacatggatggataacaacacttatgtgatgttttttggcgcgatgctcacattaggggcaacaatattctttttgctgctaaagatattgcagcgtataggcaataaattagggatagaaataccatcagcccctttccctatccgttggaaatggcaattgtgggggatcatggcatttagtttaattggccgattactctatcaacctttttatgaacactatttaactcgtacgctctatagccaaacatcggtaacctttccgttatcacctattgaagtctattactccattggcccattacgtatgaccagttggatcttagcaactttggctgtattggtgtgtggctatagtttagtaaaatatttgatgggccaaactcagcaaaaatcaacggagtccatttttgtctatggcggtatcatggcaattattgcagaatttgctttgcgttatgtgttttattcaattcactaa

SEQ ID NO: 313818 - DNA, 357 bp, Proteus mirabilis; identical to SEQ ID NO: 301865

SEQ ID NO: 313819 - DNA, 699 bp, Proteus mirabilis
atgtctgagctaatagcatataaatccaatgctttgattgaagctagttacaaactaactttacaggaacagcgcttgctattgatgtgtattggaaagttaaaccctctggataaaactcctcaaaaaacattcaaaattacatctggcgatttctatctagcatttcctgatatgggaaaaagtaatgcagaacgacatttaaaagaagctatagataagctcgctgaacgttggatatatatacaaaacaataatgaaagacgacgtattcgctggatccaagaagaagcagaatattttgagggtgagggaaaaatagaaattgtttttgctgattccataatgccctacttaactcagcttcaaggtcaatttactaaaattgtgatcaaaaatgtatcaacactaaaaagtgtctatagcattcgtttatatgagttattaatgcaatttaaagtgattggcgatcgattgatcagcattaatgattttcgctcgatgctaggtttggacgaaaaaaaatacgccaccttcaaatcactgaatcaatgggtaataaaaccagcaataaaagagttaaaccaaaaaagcaatctatcggtaacagttgatacagtaaaaaaaggcaggagtgtttttgcgctacactttcacttcaaagaagatcaacaaataaaaatgatgttagaggattga

SEQ ID NO: 313820 - DNA, 291 bp, Proteus mirabilis
gtgtcaactgcaaacacacctgaagatgaacagaaaccgagtctgaatgcgtttaaacagcctcgtgcattttatctcatcttctcaatcgaattatgggaacgttttggatattacggcttacaagggatcatggccgtttatctggttaaaatgctgggtatgagtgaggcggaagctatcactgtttttgccgcatttaccgcattagtttatggctttatggctttgtggcaattggtggctggcttggcgataaaattctcgggacaaaaagggttattgtcctag

SEQ ID NO: 313821 - DNA, 192 bp, Proteus mirabilis
atgactaatgggcaacatcatgagttactgcaaattattaagtctgtttctggaaaagtaattatcagtggctatcactcgaatttatatgatgatgaattatcaggctggagaaaagtaaccaaagaggctcgtatttctgccggtcgtggtaccaaaattcgtactgaatgtttgtggatgaattattga

SEQ ID NO: 313822 - DNA, 441 bp, Proteus mirabilis; identical to SEQ ID NO: 301868

SEQ ID NO: 313823 - DNA, 453 bp, Proteus mirabilis
atgaatctaggcgaaacgatagtgtccgtgtgcgttattttgatgatgagcgtcggtatgacgtggcagggtaacaggattggtaagctaaaagcttcaaatgctgaattaactagtcaactatctcaacaagtcgaaatcaacaaagactaccaagctcgtatcactcgactaaatcaactcgatattaaatatactcaggagttagccagtgcaaagaataaaattgatgggttgcgtgatgatattcgcaatggcactaagcgggtgtacatcaaggccgagtgtccaaagtccgacagtagtacctcctccagcttggatgttagcagacccacccccgtggagagagacactgaagaaaatatactcaatctcgtggaacaaattgaaacactcgaaagtcaataccttggtttaagggattatacaaatacagaatgtctaagataa

SEQ ID NO: 313824 - DNA, 405 bp, Proteus mirabilis
atgactaaatcagcacgcggggaaagaaacaacaaccctggtaatattcgacacggttcaaaatggcaaggactatctgcacagcaaaccgatgaagacttttgccaattcgtgtcacctgaatatggtatacgagcaatctatgtattgatgcgaacctacgaaaataaatacgggttgtgttctatccgtgaaatcatcaatcgctatgctccgcccaaagaaaataatactgagggatacattcatcaagtcgctaaagaattgaatgtaagtacggaagattgtgtatcagtcaacaaaaaagaagttgcgattgcattggccacagcgattgttggtgttgagctgggttatcagccttacagcccaaaagtatttgaagatgcatggttgttgttatga

SEQ ID NO: 313825 - DNA, 1050 bp, Proteus mirabilis
atgaaaaatactgtgaatttaaacagtgtaaatttagtcaatgatgactcactcagctatataaaaacacttcccgataattgtattgacttaatcgcaactgacccgccttactttcaggtgaagtcttgtagttgggataatcaatgggaaaacgtaacatcatatttatcttggcttgatgaaatgcttgcggaattttggcgagtattaaagcctaacggtagcctttatatcttttgcggttcgaaactagcgtcagatacagaattactcgttcgtgaaagatttaatattctaagtcacattgtatgggctaaaccatcagggccttggcgcaggacatgtaaagctgatttacgcagtttctttccaagcactgaaagaattttatttgctgaacattatcaaagcccatacaagggcaaaagtagtgcttatcttcagcaatgcaaagcgcttaaagaaaatgtatttaagcctttaattgagtattttaaatctgcacgtgaatcgttaggaataacagcaaaagaaataaaacaggccacaggtaaacaaatggcttcacactggtttagttacagccaatggcaactaccgagtgagtctgactacaaaaaactgcaggagctgttttatcgcgtagcaagtgaaaagtttagtagtaatcctttaaatcgtgatcatactgatttgataaaggtgcaggcttctcttagtcgagagtaccaagagcttgctgaacaatatcaattattgcgccgtcctttttctgtcaccgttgatgttccttacaccgatgtgtggacgtatccacctgtgcaatattacgcaggtaaacatccttgtgaaaaaccagctgaaatgatggaacacattattcgctcaagcagtcgcgaaggtgatttggttgccgatttttttatggggtcgggtgcaacactaaagtccgcattaaagttaaatcgtcgagttcttggagttgaacttgagaaagagcgatttgaacaaacagaacaagaaataaaagctctaacttgtaagtaa

SEQ ID NO: 313826 - DNA, 198 bp, Proteus mirabilis
atgttaaaacatagtgatatgacagaagaggcaagacttgtttttgaagttgttccgcatacgaaagaggtaactgttggcgaagttgcacagtttacttatttaactgagccacgttgtcaattgatattaactcagttggcgatggcggggctaatcaaagaaaacatcaaagaaaacacatttcaaaatatctaa

SEQ ID NO: 313827 - DNA, 849 bp, Proteus mirabilis
atgcttatacctaagcgccaattaatcttttacttatttactagcatgttgatatatccagcttcctctatagccgctattttttcttatattacagaatcaaaaccagtaggtaatgaggggacaggggctgattacacttttattatccagcgttgggatcccgagccaccaacggctttaaatccttgttataaaaaaaaaccttgttatataaccataaatcatcgtcatcagcctaaccagtctggaggttcagcgaccagaactattttaagtgatgggcataaatatcgaagaatggaagatctacgtattgctgttatgaaagaattaggaggattcccttatggcccaggagttgccattcatcgatatgttgatacatcaaccatacaagagtgcgttggtatattttatcagccaaatgcttatggttttgctgaagatggctatttattaccgggttctatttgtgcaattgctccccctcctgttggacattgtgatgtgttagcccattctgttgagttggattacggcaatgtgggggaaaatgaattagacaatgcggttcgttctcaaactgtgaatgtgacgtgtaatcgtgatgtctctttacaggttgttgcaacaggaatgaataatcgtcaagtcccactacgtaatgacaatagcttatatgctgatttatatattaatgataaatctggcgaagagggagaggctatctttgtcgctaaaggcaaaatggtttctatacaagtgagttctaaattgagaaccaatggacatgttgctccagggtatttttctggctctggcgcgttgattctaacgttaccataa

SEQ ID NO: 313828 - DNA, 1290 bp, Proteus mirabilis
gtggacactattagaaccaaaggtcaaattaagttattaaacccagctacacggcatctgtttgaattagatgaaaatgataaaaatgaaaaatcttttaaccaactgatacctaactttaatatccatcgctggttagaacaaaaagatcctcatgctgaaattatctccatcaaattaaaaaaacaacattttgatatggagattgtgccaataaaactgactgatgataatcagtttaatcattgtgttggtgcgctcattttattgaaatatcgcggaataattcatgagcatccgaaattaattgttaatgataattcggggtttgaacaagttattgctgttagcacccccatgaaacaattagttgaacgcgctaagaaaatggcaaaaatggatgatcctttattattagtgggggatacggggacgggcaaagatctatttgctaaggcttgccacttattaagtcctcgagccagagagccatttttaggccttaactgtgcctctatgcctgatgatgtggttgaaagtgagttatttggttatgcggcaggtgcatatcctaatgctatcgaaggtaaaaaaggcttttttgaacaagccaatcgaggcactgttttgctagatgaaattggcgaaatgtcgccacaaatgcaaattaaactcctgcgttttttaaatgatggtactttccgtcgtgttggggaagagcacgaagttaaagttgatgttcgaataatttgtgcaacacaaaaaaacttatgggaattagtacaaaaaggactatttagggaagatctctattatcgacttaatgtattgacattaactctaccaccgttgcgggaaagaaaagcggatatcatgccgttagcactgcattttattaatcaatattgtttagagcagaaagcatcaaaacctgttatttcccctgatttatctgcttatttagtacaatatggctggcctggtaatgttcgtcaattaagaaacacaatttatcaagccatggctcagttagtaggcaatacattgcgacctcaagatatcgccttgcctgagcatactgcggatactttatttgatgaagatttgcttgaaggctcgttagatgaaatgactaagcgatttgaagcttctattttaaggcgtctatatcgtgattatccaagtacacgtaaactggctaaacgtttaggtatttctcataccgcgatcgcaaataaattacgtgaatatgatttaacaagtaaaaaagcggataaaacagagaaataa

SEQ ID NO: 313829 - DNA, 249 bp, Proteus mirabilis
  misc_feature (215)..(224): n is a, c, g, or t
atgaactctcatcattggaattgcggtgctgacttggtggttaagcaattagaacaacatggtgttaaacaagtttttgggatccccggagccaaaattgaccgtgtttttgattctttggttgattcaacaattaaaactattgttgtgcgtcacgaagccaatgcagcttttatggcgggtgcggtaggacgtttaaacggtaaagcgggtgnnnnnnnnnngtgcggtaggacgtttaaccggtaa

SEQ ID NO: 313830 - DNA, 372 bp, Proteus mirabilis
  misc_feature (348)..(357): n is a, c, g, or t
atgaaaaataaatcattttatttcacgctattattattttttattgctatggatacttctgctgctcgatgtcggaatgtgtcaatcaaatataattttccagcccaaatagatattacaaataaaaaagtgggagataagctttattcttttggtgcgccagacgcccctataaacgttgctggtcaatgtctacgtgctaatagtggggcgggaaatacaaatggaaattatatttatattgttgatcaatatggatcatcaccaacattatgcccgactactggtacagttgataaaaattcaccagatggatacttgcgttttcgttcaacgggaagttgtgcnnnnnnnnnncttcttggctgctag

SEQ ID NO: 313831 - DNA, 243 bp, Proteus mirabilis
  misc_feature (202)..(211): n is a, c, g, or t
atggggaaagtgttacttattgtattaacgatgctaggttggttggataaaagtgaccaaacctattatatccttaactttatctttaatacggccttctattttatgccggtatttattggtttctcggcggcgaaaatatttaattgtaaccaatatttagctgcgatggtctgtttagcgatggtcagtcctgaatggnnnnnnnnnngcgatggtctgtttaacgatggtcagtcctga

SEQ ID NO: 313832 - DNA, 273 bp, Proteus mirabilis
  misc_feature (261)..(270): n is a, c, g, or t
atgaataaccttaatattattattgccgatgatcatccaattgttttattcggcattcgtaaatctttagaacaaattgaatgggttaatgttgttggtgaatttgaagattccacttcacttatcaataacttatctaaattaaatgcagatgctcttatcaccgacctatctatgcctggtgataaatatggtgatggtattacgttgataaagtacatcaaaagacattatcctaatttgtctattattgtacctgtnnnnnnnnnntga

SEQ ID NO: 313833 - DNA, 804 bp, Proteus mirabilis
atgctttttgaagattttacccctgcatttaaccagtggatcacaggtaatcatcgcagttcgattatcctgctaggcataagagcggatgaatctttaaaccgatttattgccattagtaataatcgaaagttacgttatgccgatgatattccttggacaacggcatcagcagaaggcttttattatatggcctaccctatttatgattggcatgttaaagatatctggacttatatagcgcgtttcaatttaccctataaccctatttatgatctgatgcaccaagcgggcgttagtttaagtcaaatgcgtatttgtgaaccttttgggccagagcaacgcaagggactatggttatatcatgtgctagagcctgaaacatggagtcttgcttgtgaacgagtgagtggagctgatgccggaatgttatatacgaatcctcgtaataaatcaggtttctatgggcggcatcaaattagcaaaccttcccatcatacgtggaaatcttatgctcactttttattagccagtttaccagagaaaacagcagaacattatcgtaataaaatagcggtctatcttcgctggtatgccgaacgagattacccaaatggcatacctgatgcacaagaaggtgatactagcactaaacaaataccttcttggcgacgaatttgtaagaccatcttgcgtaacgatttttggtgtagaacattagcatttagtcctactaaatcacactgttatgatcgatatttcaaacggatacaaggaaaacgaaaagactggcaacttatttag

SEQ ID NO: 313834 - DNA, 177 bp, Proteus mirabilis
atgaacagaatgattaataccgaactaatttcaaacgttatttctttgagaaacaaagaaatagatgaaaaacaagtaaagatgattaacgagcttaattctatgggtctattaactaccccttcgtttaatcttaaatgctcgccatctgcatactttcaacctagaaacaattag

SEQ ID NO: 313835 - DNA, 138 bp, Proteus mirabilis
atggcttataatttgactaatacactggtcattggtattagctcaacagcactttttgatatgcagaaatcagataatctttttaaggaattctgttccagcattccggaaaaagagaaattacatgcttttgcatga

SEQ ID NO: 313836 - DNA, 840 bp, Proteus mirabilis
atgcttttgcatgaggatgatgagttacttcctggaactggatttcctttggtagaggctttgctgggactaaacaagtataaaaaagaagctgataaatctcctcttgttgaagtagtggtcatgtcaagaaatagccctgatacaggacttatgatactgaacaatataaggaaaaaaggagtagatataacaaggtcagtattcacaggtggggaaacggtggttgattatcttgaggctttcaatgtggatctttttcttacaaccagtattgatgatgcacagcgtgttatcgactctaatgcctgtgcagtagctattttaaaggaacctccaaaagaatctataaaatatcctcaagatcaggtaagaattgcctttgatggtgatgctgttttattcgatgagtccagtgaaattgtctataaaacgaaaggaataaacagtttccatgcacaagaaaatgctaagcaaaatgaaccattggcggaaggcccttatgcaatgctgctaaaaaaaatagcgagattacaagaccgattacctgcaagagttgattattcaccgataagaattgctcttgttacagcaaggaatagtccatctgaactacgagttataaaaacattaagagcttgggggataaatgttgatgaggcattctttctaggtggggtcgagaaaacaaaaatacttaaagctttcaatcctcatatattttttgatgatcaagatgttcatcttgagccagcatcagtatatgtcccttcaggtcgagtaccttatgcttctcgctcgccattatatcagcaaatactgtcaatcaagccagcttaa

SEQ ID NO: 313837 - DNA, 258 bp, Proteus mirabilis; identical to SEQ ID NO: 298636

SEQ ID NO: 313838 - DNA, 711 bp, Proteus mirabilis
ttgcctaatgcgaataaaatagcacagaccaatattgcgggtattgggatacaggttaaatttgctggaataggtgcattaaatacaacgtatttgaccccaaaggacccaagtggcaattcttatcgacttcttaccccttattggacagtcaaaattataaaaacaggcagagtaacgcaatcaggaagccttcaatggggcaagattgctcaagcagtacaaaataatacacaacctaaaaacacaacttggaacttaacttcactttatttgcctcttaatgcaataaagataaattcattaaaatgtactgcaaaatcatcaaattataatattaatatggggacttggtatgatactcaatttaaaaatattggtgatgtcagtaaaagtgtagatgttcctattacattaaactgtgcggctggcactaacattaaagcgacagtgacaagtagtgctggatatatagatgcaaatacagggaaattaaacctatcgggcactaatcgagccactggtgttgccattcagttattagataaaaacaataacccgataaaactaaatacaaaaaatagtctacaaaatggggtctcctccggtgattatatatttggttggaaagcaagatatataaaaacaggtaataaaataacgcctggtagtgctaactcaacagcaacagtaaatatcttatatgagtga

SEQ ID NO: 313839 - DNA, 165 bp, Proteus mirabilis
atggaatcgataatccatctgatcactttcgaagatgacagcacaaaagttcaacttaaagcagtgctttcttctttagcggcaaatgtgaaaacctattcaaatgaacaggcatttttaaagtactatttttcatcaactaaaggggctcataaagagcactaa

SEQ ID NO: 313840 - DNA, 432 bp, Proteus mirabilis
ttggtaaaagagttaaacaaattaaagaatatcattcctgttataattatttcgggagatgcatcgatagaaagttgccgtaacgcatttaaagcaggggctttcgaatatttaactcgccctttaaacgtcaatgagcttcttaatattgtgtcagaatcttttttacactatgaaagtgaggttgagcaattcagaacctatatttctttaaaagataagtttagtaaactatcaaatagagaaaaagaggtaatggagatgatccttgacggtaacaccagtaaagaggcagccgaaaagctctctttatcaccaagaacagtggaagttcatcgttcgaatatgtatacaaaactaaaaataagatcactaccacaactagtacaagaatatgatttctttaaaaaatatgacttaagagccaattaa

SEQ ID NO: 313841 - DNA, 678 bp, Proteus mirabilis
atgaattacgttaatatgttgttttttgatatctacccctatattgccggtgctgtttttcttatcggtagttggttacgttatgattatggtcaatatacatggcgtgcaggctccagtcagatgttagacaagaaaaacatgcgacttgcttcgaacttattccatattggtattatcggcatttttgcaggtcattttctggggatgttaacgccacactggatgtatcaatcttttctaccaattgaatataaacaaattatggcgatggttggtggtggtacttgtggtgtgttaatgctgattggcggcattatgctgttaaaacgtcgtttgacgaatgcacgagtaagagcaacatcgtcatttggtgacatcatgatcttaaccttgctggttgtccaagttgcactcggcttattgactatcccattctctgcacagcatatggatggtagtgagatgatgaagctggtggcatgggcgcaagctattgtgacattccatggcggtgcttcggcaaatcttgaaggtgttgcacttatttttaaattgcacatattcctaggtatgacgatttttttattgttcccattctgccgtttagttcatatttggagcgtgccaattgagtatctaacgcgccgttaccaaattgttcgtaatcgacactaa

SEQ ID NO: 313842 - DNA, 441 bp, Proteus mirabilis; identical to SEQ ID NO: 306931

SEQ ID NO: 313843 - DNA, 231 bp, Proteus mirabilis; identical to SEQ ID NO: 312543

SEQ ID NO: 313844 - DNA, 1578 bp, Proteus mirabilis
ttgcgctttttacctgttaatttatctcacatattagttgagttgacttcattaaaagagacattggcgttttatgaagcaattaagcaagccaatattgctgagatagaagatattgttccagcggcaaaaacactattgatccaatatgtaccttggttaattacggcgaaagagttagtggcaatattgcgcaatatcgagataaaagcgatcacgatgcgtcaaagtcacttattaacaatccccgttcattatcaaggagaagatctgcatgaggtggctgaattattggggatcactgcaacagaggtgatccgcagacacacagaacaaacttatcaagtcgcttttacggggtttgcaccgggatttgcctatttaattgctgataaaactgagctttatgttcctcgacgtaaaacaccacgtacacgtatacccgcaggctctgtaggattagcgggagaatttagcggtgtttacccacagcaaagccctggtggctggcaattaattggtactacagagataaaaatgtgggatctctcacgtgaacagccggcatttttattacctggtgatactgtacagtttgttgatgtacaaaaagcgccagtgacggtttcattacctgagaaaaaacaatctattaatgctttatcctttaacaaggataaagggctatatgttatttccgcaggtctacaaaccttatttcaagatgaagggcgtttaggtgctgcatcaatgggggttagtgcatcaggagcacttgataaatgtgcgttacatgcagcgaatcgcttagtgggaaacccgccttcattagcagcattagaaataacacaaggtagattaatactaaaagcgcaacaagactgtgtcatagcgctatcaggtgcagattgtacgatcagcttaaaacaaacgaccggagatatagcctttttctctacctatcaaactattgatgtacgtagtggagatgaaatcacagtaggaatacctacagcgggggttcgtagttatctggcagtgagagggggttttgaattaagcccagtgttaggtagttatgcgtttgatactttagctcagattggccctcgagccttacaaaatggcgatattcttcatctaaacgatgataacgcattaacgggcattattagccaagagcaaccgagtttcagtttaccaaagcaagaggatatcgttacccttgatattgtgttagggcctcgtacggattggtttacagaagatgcgataaaaacattaacctcacaattatggcaagtgacaccacaatctaaccgtatcggattacgtctattgggggataaatcgcttgaacgtcagcaacaacaagagttatcgagtgaaggaacttgcattggcgccatacaagtaccgattaatggtcaaccggtattatttcttcatgatcaccctctcactggaggataccccgtaattggggcagttgccgaataccatctgtcattggcggggcaaatccctattaacgctaaaattcgttttaacccaattactttatttcaagaatattga

SEQ ID NO: 313845 - DNA, 786 bp, Proteus mirabilis
atgataaaagcggtagatttaaatagtgatttaggtgaaagctttggtcaatggcgtatgggcaatgatgctgcagtgcttgaaattgtcagcagtgccaatattgcttgtggttttcatgccggttcaccagaaggaattttaaaaacattaaaagcagcgaaacagcatcaagtcgcgataggtgctcatgttgcttatcctgacttagtgggttttgggcgacgcaatatggatattgccagtgatgaattaaccgctgatgtcatttatcaaattggcgctttgcaaggtttagcgaaagctgtcggtatgaaggtgacttatgttaaaccccatggtgcgctttataacaccattgctcatgataaacgccaagcattagcggttattgaagctattttagctattgatccacaacttatattagtggctttagcgggatcgccactgatcacacttgcgaaagagaaaggattacgtgttgttgccgaagcttttgctgatagagcttatcatgctgatggcacacttgtttcgcgcaaacaagagggggctgtattacacgatcctcaattggtggctcagcgtatgttaaaactagtacaaaaagggggtgttgaatcgatagagggtatttttactgctatacaggcggattctatttgtgttcatggtgatagtcctgatgcggttaatctcgcaaaaagtgtcaaagagatcttaataacacacggtattgcgataaaacctttcacatctgcaataggaataaaggaggcgtaa

SEQ ID NO: 313846 - DNA, 660 bp, Proteus mirabilis
atgcagaaaaaaacatcgccacagatcctttgccaaaaaatcgctgatattattagccaaaaaattactatcggcgaattacctccaggagagaggctttcagaagctactttaagcgagcagcttgaaatatctcgtaatacattaagagaagtatttcgtatattaacccaagaaggcctattaacctataaacctaatcgtggtgtgtttgtttctgtaccagatatggcatcaattatggatatttatcgcgtaagaaggctgattgaatgtgatgctttacgacatgcctatccaatgcacccagccatatcccgcatgcaagataacgttaatcaagcaaaaatttttcaacaacaaaaagattggaatagcgttggaacctgtaatatgcatttccataccgctatcgtcgagctttctgatagccctaggttatttaaacaatatcaacttattttagcagaattacgattagcctttggtttactcaatgatccccagttattacatgctccttatattgagaagaatgagcatattttaacgctattaatgaatgggaaagcgcaagaagcggcaatcgaaatggaaagttatttagaaatatccgagcgaaccgtattagccgctttttctcgccacaacatctgttaa

SEQ ID NO: 313847 - DNA, 306 bp, Proteus mirabilis
  misc_feature (281)..(290): n is a, c, g, or t
atgaaaactagctttaaccatatcgagcgagataatagtgatatcacccacaaccataaaaatactcatagttcctgcaactgcacccaagaaataataacttctttaaatcattatattaataaacacccagaatgtactatctaccaaaattctttaatgagtagtcttattgctggtgtttatgatagtgatgttactattgctgatttattaaagcatggtgattttggtttaggtacttttaatcatcttgatggcgaattggtcgcctttgatannnnnnnnnnaattggtcgcctttga

SEQ ID NO: 313848 - DNA, 306 bp, Proteus mirabilis
atgtccccccaagaagccgtcaatagccctcgaattcatcatcaatggctacctgatgaggtttattatgaacaacgaggattatcaaaagataccttagaaaaactttctgccatgggatataaaatggtcgaacaaacgccatggggcgcggctgaattgattatggtcggccttccaggagaacaaggagtgctccctgcttcgtcaggtaatgattctgctgtttcaggggcgatacgcgaaggttatctttatggttcaaatgatgttcgacgtccagcaggtaaagccgtgggctactaa

SEQ ID NO: 313849 - DNA, 540 bp, Proteus mirabilis
atgcaattattgattgatgaattaggcaaaaatatgcaagaaaaacaattctcccttacatcacatcatactgacaaacaacatcgtttattaaaatggagcttactcagcttatattttatctctgtccccttattggctgatcccgtcaatcaagcactctctatcgatgcccgcgagcaacaacgccagcaagaacgagagcgcatgttacaacagcagaacaaccccgttgtggatacgcgtattcaacagcctgatttaacgctgcctgattatccgcaaaatgaacaaccctgctttaccatttccactatccgtcttgacggtgagtccgctgccgattttcaatgggcattaaaagccgttaacgacgccaaaggccagtgcttgggtagccaagggattttgttagtcctcaataaagtccaaaatgccattttagaaaaaggttatgtcaccacccgcgtgatggcacaagagcaagatttgaaccaaggtgagttagtcctcacgcttcaaccaaccgggacggattaa

SEQ ID NO: 313850 - DNA, 1005 bp, Proteus mirabilis
atgagtctagatattaaccagttagttttgcaccaacttattaagcgtgatgagcagacattagaagtggtactacgtgattcactcttagacattgagccggttgttcaagagatggtcgaagagttacatcgtgtttatagtgcaaaaagtaaagcctatggtttatttaatgaagagagcgaattagctcaagcattacgtttacaacgtcaaggtgaagaagaatttttaggtttttctcgtgcagcgacggttagacttaaagatgagttagcgaaatacccttttgctgaagggggaacggttcttttttgtcattatcgttatcttgcggtggaatatttattaatcgctgtattgaatagctgtaatagcatgtgggtcaatgacagtcttgatgtatcttcaacacgctatttagatattcctcatgcagatattatcgctcgtattgatttaactgaatgggaaacttcacccgattctttacgttatttaaccttcttaaaagggcgtgtaggacgcaaagtttcagatttctttatggactttttaggggcgcaagaaggtttaaatactaaagtacaaaataaaggcttattacaagcggttgatgacttttgtgaagcatcagacatgaataaacaagagcgccaaacttgtcgtgaacaagtctacagctattgtaatgagcaattgcaatcgggtgaagagattgcattaactgaacttgcacaagagttaccgccattaggtgatcaaaactttgcacagtttacagaagaaaaagggtatgaattagcggaaacttttcccgcagatcgcagtacattacgccaattaatgaagtattcaggaagtggtggggggttaacggttaattttgatgcgaaactgttgggggaaagaattttttgggatcctgctaccgatacactgacgataaaaggaactccacctaatttacgtgaccagttacagcgtagagtctcagaaaaatag

SEQ ID NO: 313851 - DNA, 447 bp, Proteus mirabilis
atgaccacaattgaactaagcgctactatttattttattttattcgctttaagcttttttattttttccgtacagagaacagctcttctaatagaaagagaattttcacaaagttatgtaagtccatcatattccatttaccaaatgagcgatcacaagtcaggatcaatatttattccctcatgggcacccacgtgtggggtaactttattgttacttaaagttgcaactctatttttcatttttaattttcttggttggggttacgctctttgttttataacagcagatatcgttctacacgctattttgcctattcctagtaaatggcttaaatgggttttcttttctagagcgatgaaaatatcacaagataagtcactggatgctcaatgcatcagtaacgcaatggttataataattaacaaaagcaggtatctaaactag

SEQ ID NO: 313852 - DNA, 480 bp, Proteus mirabilis
  misc_feature (33)..(42): n is a, c, g, or t
atgctgaaattaactacttttctttttactatnnnnnnnnnntcattaaattgcctagcaataccactagttaatgatgatggaaatattggattaattgaaagagagctaaacaacggaaatcaaaatactaaaaatgagataactgatcctttagcccgtagaatttatgaacagaatctagcattgttagatcaattagaaaaagatagattacaaaatacgagggaagattttagtaatagcccgaacttattcccttccaataaatatattaatgttactgggtatttaaaagcccaaggatttggcagtatgtccggtcaacagcaaattaatttactcaaagaaacacataaaaccatcaataaggtgtacccaaataatgttacactatctaagattgcactaatatcaatgaaaataccaggttccaaaattttcgttaataataatggagatatccaaactattgactaa

SEQ ID NO: 313853 - DNA, 381 bp, Proteus mirabilis
atgagtaaattaacaccttgggttcctgtgattttatggggcgcaatgttgttcttttcagtgctagcaatgaaagaagttattgagctgagtaaagaaaataaatcgctcacagaacaactctcacgccaaaactcaatcacggaaagcgccaaccgtacattcaggattatcaataatgtctcatcacttaatagcgaagagcggaataggtcagccgtggattctgataaagttaaaacggttatcaaaactgttcttgtcaataatgattgcgccaatactgctattcctagtgacgctcttatcaggatgcacgactattcagaaagaatacgtgccagtggagcatatagcgataccggcacaattaaccgctga

SEQ ID NO: 313854 - DNA, 378 bp, Proteus mirabilis
atgtcagataacactattcaattaaaagtctcagtagatacaactgagttagataagttagaagagcaactcgctcgcattaaacaactgatgcaagatgtgggtgtgaagcctaaatcaattccacaatctttctttcaacccgctggtcaattttttattaaagatgcctttattaattccgtggcactaaaagatgcagctgtcagttatcaactagagcaggacgttaaggctgaattggcagatttacgcatgcgagctgatcgacaagatgctgccatcactgaattaaaaagagtaatggaaactcagcaacaagcatggtcacaagctgtgagtgagttaaataacagaacgtggtgtagtcagaagtaa

SEQ ID NO: 313855 - DNA, 438 bp, Proteus mirabilis
atgtccattgcactggtgttaggcagttacctttaccgtaaggtttgtcatttgtttagcgctgaatatggtgtgatcataacttcatgtataaaccttgccatgttgtcgttatttgccctattttggcaaatctcattaccaataatgttaatattaacggtgttatatggtctctctttaggattaactatgcctacacacacgaccttattaaccagccactttagttcagtaagagcaacggcaatgggtatttataattttatccgctactgtggtatggcagcagggcctatggtcgcaagctattttgtcaccgataatcattatcaatatgtcttttattcttgtgtgatcttaacaagtttggcattgtgttttgccatcaaaacgctactttccacattaaaacaacaacgacaaaccaccgactaa

SEQ ID NO: 313856 - DNA, 672 bp, Proteus mirabilis
atgaaattatcaatccgtagtctgttttaccttgtttgctttagcgctttattaggctctctagcacaaaatatttatactcctgtgctgccattgatccagcagcaatttaataccacattatcactggttaaccttacggtatcagctttcacttttgctatggctgttatgcagttatgttatggttcattgattgacaaatggggcagaaaacctattttgctcagtgggttaacgatttcaattatcggcgcacttatttgtatatgggctaattctattaacctattaatttttggacgagtgatccaagccataggtatcgctgccatccctgttgtcgcagcaactattttaggcgatctctatcaagggaatgagcgtgccaaagcaatgggaagttaccaaatgttgctagcattagcaccagcgagtggtcctttattaggcggctatttagcacaacattatcactaccagagtatttttgttttcttaagtatggtgggacttgttttgctgattgcccatctgttttatttacctgaaactcgcccagaacaaaaacagtccgttaaaagcttatctgctatgcgacaagtgctcgccgccccagagggtaaatctgtttttgtgataagttttatggtgttttataactacttctga

SEQ ID NO: 313857 - DNA, 585 bp, Proteus mirabilis
  misc_feature (561)..(570): n is a, c, g, or t
atgaaaacaattgttattgctttaggcggaaatgcattattacagcgtggcgaagttttatctgctgaaaatcaatataaaaatattgaattaatgtcagagacaattaataaattagcgcaagagtaccgtgttgttttagtacatggtaatgggcctcaggttgggttgttagcattacaaaatcttgcttatcaagcggttacagcctatccgttggatatcttggtcgcggaaagccaggggatgattggttatatgatgatgcagaaaatcaatcaaaataatcctacgcaagcaattactacagtaatgactcgtgtttctgttgatattaatgatgaggcttttagagagccgagtaaatttattggtcctatttatgaggaagcagaaaaagaagaattaataaataaatatcaatggacatttaaaaaagatgggcaatattatcgccgtgtcgtaccttcaccagcacctcaaaaaataattgatatagaggcagtaaagcttttattagataaaggtcatattgttatttgtggcggtggaggaggtatnnnnnnnnnnaggtattccagttaa

SEQ ID NO: 313858 - DNA, 2577 bp, Proteus mirabilis
atgtcagtagaaagtgttgttaactgggctaacaagttaaagaaaaatctttggtggcgtcaagccattaggctagcggctgaaaaaggtaaattagaaagagatgattttgaacttcttttcacagttgccaaaattgaacatgggctagaatcgcaaaccaaatcttatgcaggttacattgctcctttgaatctctcgggttttggtgaagaaaaaaatgcggtaaacctaaaaaacattagcaatgtaagacatgtttctgctcttgtatctgacgcgttgcttgagttcgcaactgacggattaacagcagtttatggtgacaatggatcaggtaaatccagttatgcaaaaatacttaaaaatgcctgccttactcgcggagaaactcctaaaattctacccaacatttatgaagaggaacgaagcgaaccttccgcagatatagccatcactatcggtcaagaacaacatgctattgcctggagattatcaactccaatccaagaagacttaaaatccattagaatcttcgataatacctctgcggctcactacatctcaggtgaagatactattgaatacaaaccagcaagcatgaagttgctatcacagttaatgcgagcctgtgaatttgtccgagccagcaatgacaaagaaaaagagccatatataacttctaatccgctacctgacttcagacctggaagcaaagtttttgcatttatctcaactctttcatacaagactaaaattgaagatgttaatgcgttttgtataagcaaggaacaagaagagtctattcagaatcaccaagctgaactaaccaaacttaaaactagcactcctgagcagattcgtaaaacctacagagaccgctacaaaagtttacagccactactagatcacctagttaagctaaaatgcaagttagaccatgagtgtttttgcataattaaaaactcatttgatgattacaaggctaaatttgcagcagcagaatttgctcgttctcaggcattagatggacatgaactttctggtatttgctcacctgaatgggctgccatgtggaatcacgtaaaatcgtttgtacagacttataattctgaacttacttttcctccgattgagggtgccccatgtcctacttgccttcaatcaatatctggtgaaacctctaaaaaattaaagttattcaatgattatctccaaaatcaaacacaaattaaagctagcaaagcaaaagtagtatttgattcgtttattagtaaccttaagttgttgcaattcgatctcaagccttatgaattgactttaagtataattcaggaacaaaacccagaatatgaaaagaaaattattgatctaaacaaaaaccttgaaaccatccgtgataatctaattaaaaccgaaccagattttactcctattaaaactgagtttaatacggtcgattggttgagtagtcaggtgagctactggaaaaaaaaagaagctgaggtagcaacaaatgaaggattagtaaaacagattgccactctagaacttctaatccaagaccttgaagataagaaactatttacttcagcaaagcaaaatatccttacagaaataaaacgccaccaaatacttacactgtacgataatctatcgaattcttgtcagtctacacaaattaccactttaacaaactccatagctaggagtggtgcggttggtcatctccagaaagcatttacaaacgaacttaaaaaatttggttttgaaaacttagatgttggcactgaaactcgtggtgtacgcggaaaacaaatgttcaaacttcacctcactggtaaggcaaatggtataatggaaatagcaagtgaaggcgaacaaaaatgtattgcactagctagtttcttagcagagctaactgtagatgatagaaaatcagcgattatttttgatgatcctatcaactcactggaccatagatggcgccgaaagtttgctaaacgaatagcagaagagtcactaaatcgtcaggtaattgtgtttactcatgatatgccatttcttaagatgttggaagaatctagtgatgaggctaattcaacactgaaacttatatctatatcaaaatatggtaatgttgctggattcccatcccctgaaccaccttgggatgctaaaaatacactatcaagaataggttttctaaaaaatttattaccagatcttaaaaaaatggaaatatctggtgactctagatatgaatttaatgccaagcatacttataacctaatgcgcgaaacgtgggagcgcctcgttgaagaatggttattaagaaaagtggtagaacgttttgctcgtgaagttaagacccaaagtcttagagttattataaatggtataactgttgaggataatgacataattaatgctgcaatgtctaaatgcagtacttttatgtacggacatgataatgcaactggattatctgtcgattgccctagttataatgaaattgagcaagatgtaactcgactggacgagtactttaaggcacttaaaaagcgtcgtacctag

SEQ ID NO: 313859 - DNA, 2460 bp, Proteus mirabilis
atgcgagtgttaaaatttgggggaacttcagttgctaatgcagaaagggtgctgaatgttgctgatatcgctgagaaaaaacgagagcagggacaagtcgctctggtattatcagcacctgccaagataacgaattacttggtggcaatgattgaaaaaacggcagaaggagaagaacctctcactcaagtacgagaagcagagcaaatcttcgctaatctattgcaaggtttacgagaaaatcaacctggttttgattaccaaggtttaaaagacaaagttgagcgtgagtttgctgagattaaacatatcctgcatggtatctccctattagggcaatgtcctgatagcatcaatgctgcgatgatttgtcgtggtgaaaagctttcgattgccattatggagtcggtgttacaagctagaggatataacgttaccgtcattgatccggttaaaaatctccttgctcaaggtcattatctcgaatcgacagtggatattcctgaatcaactcgccgtatttccgcccttaatattccgaaagatcatatgatcttgatggcaggtttcactgccggtaatgaaaaaaatgagcttgtggttctcggtcgtaatggctcagattattcagccgccgtattagccgcgtgtttacgtgcacaatgttgtgaaatttggacggatgttgatggtgtttacacctgtgatccacgccttgtcccagatgcacacctattaaaaggcatgtcctatcaagaggcgatggaactttcttactttggtgccaaagtccttcatccacgcactattgcacctattgctcaatttcaaatcccttgtttaattaaaaatacgggcaatccagaagcaccgggtacgttaataggtgatggtcaaaaagatgacagcacgccggtaaaagggatcactaacctgaataatatggcaatgatcaatgtatcagggccaggtatgaagggaatggtgggtatggcggctcgtgtcttttctgtgatgtcgcgtgcaggaatatcggtagtattaattactcaatcttcatctgaatacagtattagtttttgtgtaccgcaaaaagagctaattagagcgcaaaaagcactgtcagaagaattctatctagagttaaaagatggcgtacttgatccgttagatattatgaacaatgttgctatcatctcggttgtcggtgatggtatgcgcacccttaaagggatctcagcccgtttcttctctgctttaactcgaggcaatattaatattgttgctattgctcaaggctcttctgaacgctctatctctgcagttattgctaatgatgcagcgacgaatgcggtgcgtttatgtcaccaaatgctctttaacactaaccaaatcgtagaagtctttattgtcggtgtcggtggtgttggtagcgcgctaatcgagcagatccatcgtcaacaagcatggttaaaaaacaaacatatcgacctacgtgtttgtgggattgccaattcacgtgcgatgctaaccaatatgcaaggtatcgatttagataattggcaacaagcgctacaagcagctaaagagccttttagctttagtcagcttattcgcttagaaaaagagtaccacttcctcaatcctgtgattgttgattgcacttcaaacgaaatgattgcacagcaatacgccaatttcttacaaaatggctttaacgttgttacgcctaataagaaagccaatacgatgtcgatggattactatcatcaaattcgccaatcagcggaagcatcacgtcgtaaattcttatatgacactaatgttggtgcgggtttacctgttattgaaaacttacagaacttgcttaatgctggcgatgagttggtgcaatttaatggtattctttctggctcactctcttatatttttggtcagctagatgaaggaaaaagcttgtctgaagcgacactttctgcgaaagaaaaaggctttacagagccagatccaagagatgatctctcgggaatggatgttgcacgtaaactgcttattctcgctcgtgaagcgggctatcaattagagttgagtgatattgatgtagaacctgttttacctagctcatttgatagtacaggtgatgtcgagagtttcttaaaccgcttacctcaagtagatgttgagtttgatgctaaagtcgaagaagcccaaaagtcagcgaaggtattacgttatgtggggatcatcaatgaagggaaatgccaagtcaaaataatggccgttgatgctaacgatcctctctttaaagtaaaaaatggtgaaaatgcgctagccttctacactcgctactatcaaccaattcctttagttttacgtggatatggtgcaggaaatgatgtcactgctgctggggtatttgcagatgtattacgtacactatcatggaaattaggagtttaa

SEQ ID NO: 313860 - DNA, 198 bp, Proteus mirabilis; identical to SEQ ID NO: 299913

SEQ ID NO: 313861 - DNA, 285 bp, Proteus mirabilis
  misc_feature (269)..(278): n is a, c, g, or t
atgcaaagctatggtttcccaattcaaaatacaccatttttagagaaatctcctgtaatacagtttgacgactatatttcatcagcaccatctactttcttttctcttcctccttcattaaccttaaaaaaccataaaactggtgatatggagttacaaaacaacatcattaccttagctaaaaaagcgggtatctatacttattggttttctaatcaaggttctatgattggctctgattctattatttctactataggtaaacgtgnnnnnnnnnngtgctga

SEQ ID NO: 313862 - DNA, 189 bp, Proteus mirabilis
atgaaaaagacaaagaaattttgtgccaccgcattgctcttcagtactttcagtgttgtattttatgtgcttccagtgcaaagtcagccagtggagaatactctggttgttgcaacctataatattgatggtaaagtttatggtctgcgctgcagagcaaagtcgcctactagaaaatctgaatgttga

SEQ ID NO: 313863 - DNA, 321 bp, Proteus mirabilis
ttgttcgattgggctaacaaagattcattctggcacaaaaatattttaagtcctcgaaaattacgtaaacactttgatgaactcactatccgtagccaagagccaaggaatgaaccaaaagttcaagttgacaccattgaacgcgatagtgccttttcccgcttgattggctctcgctctaaacctaaaaaccgcattgaagaaattgcacttgagctagcaggtaaaacaggcattcgtcgtatgagtgagttttcaggtcgccaagcatggaacagcatttggaagcaagcgatagaaatattacaggaggctcagtaa

SEQ ID NO: 313864 - DNA, 225 bp, Proteus mirabilis
atgcgtaatcaacttattgctctgttttatcgttatcaagctaaagtgacattggtatatattgaagtcccttatttgcaatggaaaaaacaaaacagcgcaagaaaggaagcggttcccgataaagtgatggaaagaatgttgagcaaactagaagtcccaacaccagaagaagcgcttaatgtgatttattgggttgatggggaagctcaaaatttgatttaa

SEQ ID NO: 313865 - DNA, 480 bp, Proteus mirabilis
  misc_feature (458)..(467): n is a, c, g, or t
atgaaagttacaagtgccgaaaaacatgcattgttattaccagataatcgaacgttaacttggtatgaatctggcccatcagatggtcaaccggtattattctgcacaggtgcagggatgagtgggctattaagtatggatgctgatctgttaactaagttaaatattcgacttattacaccgactcgtcctggtttaggtgaatcaacttttgatcctaaaaagacattaaaatcgttttctagcgatgtattattcttattagcatatcttaatattaagaatatcagtgtgataggatcctctcaaggtgctgtttttgcaatggccatttgttactatggtaaagtggataagctggcaattgttgctggtcaagatcaactagattatcctgaaataaaaaaactgttgtccagtgatgtggttaatatgcaacaacaggcattattcgatcnnnnnnnnnncaagatttattaa

SEQ ID NO: 313866 - DNA, 1065 bp, Proteus mirabilis
atgaaaattttaaaacccatcatttttacggctcattctgagttaaaaaaagcaattccatcaataaagaaaagccatttatacgaagctttcgcagcattttgcggctttaaaagctacgcggcatttcaagttgcctctgaatatagagttgaaaaccttgagatcgcaaatagacagtgctttgagcgcttgcaagttttagattttgatgctggtgtttcgcttcaagtatgccaacaaatccagcaagcttgggagcaatttaacgttatctctttagatgacgtttatgcattttattctgaggcttcttttgaaaaagcattaggtgaaacacgaatgctaagtgttttaacctcattcatagatgcaaatgactcagaagcgatattggttggccttgttgtagctgcgacattattggctgaatatgaagataatcctgataacagaagtggtgagttctggtataacaaaaaactagcaggtcattcgcttaatgtaattcagtctgatgttgctgagcaataccagcaaatcgtcccttatcgagagcttttaacgctggtattaaagaaatttgaaaacagtaatgatgcggtacttccaattccttcatcgttgaaaccaatctatgatcaatatggtgacggccatagtcactgctggagtgggtatttttatgatgatccttatgttgtgattgaggctattgggtatgctttgcattgtcatgacgaagacgagccagtaatctcaattaatttttatcttaattggctaaaagctgaaatgattgttgctccgtcacgcgatgggttgattgaaatcatcgaagctacgattagtgaaactgaaaagtggttttggtattacgttggtctacagcatgatttcgacgtaaccaaagattgttacagattaatcaatgctgacactggtgaagattatgatgattatgggccagcagtagctgttggcgatgacggtgtagcgcttccaattatttctgacgacttaaaacttaaactaaaaactgttgctcgaaaacttatctcttaa

SEQ ID NO: 313867 - DNA, 1542 bp, Proteus mirabilis
atgactgatacacaaaaaatccttgaagaaaataaaaacctgaaagaaaagattctccggttacaacaagagaatgatttctttcgggaaaaatttaagctagcccaacacaagcaatttggtgtgtcctccgaaaaatcgcccgaccaactcgactggttatttaacgaagcagaaacgattgaggatgtagcattaacagaaaaggaaactgctttagcgacggacgatacagaagctactgcacaagtctccaccaaaaagaaaaccggtcgtaagccattaccaaaagacctgccgcgcgaaacccgcattattgatgtagcggcggctgataaagtgtgtccttgctgtcagggtgatttacaccgcatcggcgaagaaaaaagcgaacagctggaatatattccagccagtctcaaagtgattgaaaccctgcgcccgaaatacgcctgtcgccagtgcgaaaaaaacaacgcaactacgccaattgttatcgcccccgtgcccgcgagccccatcccgaaaagtatggccacacccagcttgctcgcgcacattattggcaataaataccaattcgcgttgccgctctatcgccaggaaatggtgtttaagcaattgaacatcgatcttaatcgcaagaccctgtccaattggatgatacgcagcgctgctgtgcttgagccactgctattgcgattaaaaacacaacaactggcgcagcaggtactgcacgctgatgaaacgccagtcgttgttattgccgatgacaaccagaaaagttacatgtgggtctactgtagtggaggcgattcccctgatcccaatagcacccttaaaaacatcgtgatttacgactatcaacccagtcgcgcggcagcgtgcccgaaagaatacttaaaaggttatgcaggctatttgcaggttgatggctatgcagcttatgaaagtaccggcgcaacacttgcgggttgtatggcgcatgtgcggcgaaaatttattgaagcgcaaaaagtacaaattaaaggtaaagttggtcgcgctgattgggccgtggcacacattcaaaaactgtatcgcgtcgaagcgcagctcgcaggcaaaatgtttgaagagaaatacacactgcgacaacaatacaccgtgccgttactcaaggaatttaaaatctggcttgataaatctgcacagcaggttgcccctaaaaccacattgggtatggcggtcgcttacaccttgcggcaatggggaaaactcaccacctacacgcagcatggtcagctcagcatcgacaacaatcgcgcggagcgcgccataaaaccctttgtgattggccgcaaaaactggttgtttagcaacaccgccagcggtgcaaaagccagtgcaattttatattcagttatcgaaacggctaaagcgaacggattgaatccggtgaggtatgttgaactgctgctaacggaaatcccaaggcgcaattcaggtgatgaccttgagaacctgatgccttgggttgtgaagttgggtgtggatgattag

SEQ ID NO: 313868 - DNA, 285 bp, Proteus mirabilis
atggccagactaacgcaagaccaatggcgaacattgattgatgagcaagccgcctcaggacaaaccgccatggcattttgtgccgagcgcggcattgataataaatatttcagcacaaggaagtcacagctctttaaaccttcaagcacaagtggctttattgcggtagcgaccaagcccaccgaaagccaaagtattcaactcatcaccggcgccgctcagctgcgtatcccgaccagtgtatcggcgcagtggttggcggattttatcaaggctctggagtga

SEQ ID NO: 313869 - DNA, 156 bp, Proteus mirabilis
atgcgaaccaaaattagtcgatggataacaccaagcttaatcgcaatcagcttgagtggcgtcctgttatctcaagcgtcgtatgcagacgtggaattgccgattgtgccagccagtgtgatgaagcagtctgctactgcaaatccaccgatttaa

SEQ ID NO: 313870 - DNA, 627 bp, Proteus mirabilis
gtgaagttcgacgtgtttttaaaatcatggcaaggcacgcaattagagaaccgatggcagcggttcctgattgcagtgctggtgctatctaatttgctgcttgcggtagcagcattttctcgcaataccgtggtagccattcaaccgccaaccttgtctgaaacggctgaagtgtcacgaaaccaggctactcagccttacttggaatcctgggggctctacctagctgagcttatgggcaacgtgacgccgggcaatgtgtcttttatccgggttgctatcgagccgctactttcacctgcggtgtaccagcaagtggtcgatgcactggagattcaggcaagacagatccgtgaagaccgagtcacgctcaaattccaacccagacaagtggagtatgagtatgaaaccggccatgtctttgtgaccggttattccttggtctctggaccatctggagatgaacaacgccaaactcgcacctatgagtttgacatcgatattgagcaataccgtccaaagctcagctggatggatacgtatgaggggcaagctagaacgaagcgcgttcgtgaaaagttgacccaagagcaaaaccggagggtgaatgatgcgaaccaaaattag

SEQ ID NO: 313871 - DNA, 1107 bp, Proteus mirabilis
atgaataacgaattttttggtgaaaaactaagactggcgagattgatggccggaattactcaacaagaacttggtgagttagttgcggtcagtcgtcagtttatacatcagcttgaagcaggtgttaaaccacctgctgaagacctgcttttggcattggctgaagtattaaaagtgaaaagtgatttcttttttaagaaaccacaaaatgatgttaagtatgagcaatgccactttcgcaagcgcaaaacaacaccagttggacttgcaaatcgagtattggctctcggcaccatttttgaactattagttgagattattgaagatcatcttgagttgcctgttgccaattttattgattttgaagaatcagatctgagtgcggaggctatcgaaagagcagctgagcagtgtcgtattaactggggtctgggattggatgcgccagttacaaacatggtaagagtactggagaataatggcgctgtaatcacttgctttgatggtgtttcagataaagttgatgcgttatcaatgaatcgaaaaagacccatcatagtaagaaataatgcgaaggaaagctgctgtagaatgcgctttgatttggcgcatgaatgtggccatttggttttgcatcaaggtgtagaaactgggtgtgctaaaacagagagagaagctgatgcttttgcaagtgcgtttctttttccacgtaaggcttttctgaaagagtttcctcaatgtgtgggacctgttcgaattaggtgggagaaaatctttgcattgaaacttagatggcgtgttagtgcgagagcaataatttatcgagctaattatcttgggttaatttcgtcgcaacaatacagaaccgccaatgtttatttgaataagtcaggccagtcgaagacagaggacttagatgatcaaataccaatggaacagccagagctcttatcagctgcaatagaccagcttaacgagcatctgggtatttcgattttcgatattgcaaacgatttaggtgtttcagagcagatagttgctcagttaaccagttacgatttgactaagcaaatcaataagtcaaatgtcagaaatatcaatttctaa

SEQ ID NO: 313872 - DNA, 639 bp, Proteus mirabilis
gtggtatctaatcctattgctttactacctgaggtaacaaatttgaatacaccgatgacactaaaccctaattttaaagaaagtcagctaattgaagttgctcagcttttagcagatgttcgagcagaagttgtagatttacacaacagagatttgggtgacaccaacaaatcattaggcataaggtcctacgagtgttgttgtacacatttagtaagaaagtcacttgaagttgattggcttaagatactgactccgaaagggaggtttacgtttagtatcgctaacgttccagttcgtttctggaaaggtcagcctgacaaactcccatcagggaaactgatacgttcccacgaagctatgatgcaaatggagttattttcaacacaagatagtccgtcagagatcatttggttttttgtactgagcactgatcaaactaaatgtgtagatcgcgcctttttcgttggttatagcgatgttggtgaaattgtagtcaactgggaagtgccaatgaattctaaggttacattaataacagatactgatgagaatgtttctcatggtgttgaacttgaatcggctgtttctaaaatcaaaattaagaaaaagtcgaaaaatgcagtaaatcatgaataa

SEQ ID NO: 313873 - DNA, 3606 bp, Proteus mirabilis
atgaatacgaacaacatgaaaaaatacgcaccaaaagcgcgccgcgaatttatggatgcggtagctaaacgattaaatacctttggtatcaccgcgaataaaaagggcgagctacaaattgcagaagcgaatctacaaggttctgtgcttcaaatcgccggtaacagttttgacggtaaactggccgagcccagaaaacgcatagtagccagaagccagaaacttgggtatgcacaacttattgaacaagtagcttatacctggttcaaccgtctgtgtgctattcgctatatggaaatccatgactatctaggccacggttttcgtgttttgtcgcacccagacaaccctaaaggctttgaaattatcgaccatgcccaagacgctgcggatgaactcggattagatagagctcgcattattgaactcaagcttgcgggtaacaaagacgaagagctgtatcgtgaactgctgttgggccagtgccataagctacatgaagctatgccttttttattcgacgctttggacgatgaaactgagcttcttctaccagacaacctaacacgtaccgactcaatactgcgtggattggtagacagcatccctgaagaggactggcaacaggtagaagttatcggttggctttaccaattctacatttctgaaaagaaagatcaggtaatgggtaaggtggtcaaaagtgaagacattcctgccgctacccagttatttacacctaactggattgtaaagtacctggtacaaaactcagtcggtcgtcaatggctgcaaacctatccagattctgccattaaatcgcagatggaatactacattgagccagctgaacaatctgatgaagttaaccaacagctaaaggctattacgccagaatctattgaacctgaaaccatcaaagtactcgatcccgcttgtggctcgggccacatactgattgaagcttacaacgtactaaaagccatttacgaagaacgtggtttccgctctcgtgatattccaaagatgattttggagaacaacctctacggcttagacatagatgatcgtgcagcgcagttatctggctttgcgctgatgatgatggctagagatgacgataagcgtatttttacccgtaacgtgcgactcaatgtactgtctttgcaggaaagtaaccatattgacctgccgacgttgtggaaagcactcaacctatcgggaagttggcaaagcggcacatcacaaggcttgttctcggatgatgagcaagatttaagctcgttcaatgcagacaaccgctaccaactgctgaagcgaacattggcaagatttactcaatccaagacctttggttctttgattgatgttccaagcgatgagcatgaacagctaaaagagctaatgagcactctagtcgagctacaagagtcaggcgactcaatgcaaaagcctgcggcgaagcaattgattgaatttgtacatcaggcactggttctatcgattcgttacgatgctgttattgcaaatcctccgtatatgggcggtaaaggcatgaatgcagatcttaaagattttgcaaggaaatactatccaaatagtaaatctgatttgtttgcgatatttatggagcgtgcttttaaccttctatcaaagtatgggctaaacgcacaaataaacatgcaatcttggatgtttctatcaagcttcgagacgatgcgggagacaatgtttgactcgaaaactatatttgatctttgtcatcttggtgctagagctttttcacagatctcaggtgaagtagtacaaacgtgtgcgtgggttatcggtaactactcgattccagtatataaaggcgattattttagattgaattttggttctgaagaagtcaaaaaagaaaagcttattaatagggagtgccattattcacacttgagtcagtcggattttagcataattaaaggcagtcccgttacatattgggttccaaagaacatattgaatctatttaaaggtaaatcaatttctgatgtttttgaagtaagagaaggcttggggactcgaaacgatgatagattcttaagacgcttttgggaagtcgattacgataagatcagcagacgagaaaataagggtaagtgggttaaaacagataaggcggggacatctcgtagatggtatgggaatgctgacttcgttatgaactgggagaatgacggatacgaaattaaaaactacagaaacgctgatggtagtttaaagtctcgaccacaaaatacacagttcttttttaaagaagctgtatcgtggaataaagtaggaacagctacaccctcattccgatttcgtgatgaagagtatgcatttaatgatgctgctccatctttatttggcgatacccaagatttactaagtgcacaatctatgctccaaagtagtttgtttgagtatcttttagagttgcaaggggacactataaaccttactactggtgtaattaaatcgcttccagcaattcttctgccggaggctgcttcaattactcaacaagcaataaatatagccaaagctgattgggacagtttagaggtttcatgggattttgaagcaagtccattgataacctatcgggatgagttattggaagctaactatcgcaagtggttcgagaagagtaaacaaacaacggaaagtatgctttccttagagaaggaaaacgaccgactctatgaaaatattgttgaaggaaaagtcacaaatagaacccgagactttcaagatattacgctatttagttcagattcgattttgaatgatgagaaatttcgttcaaatacatttgcagacttggttagttattacattggatgcgttatggggcgctattcattgatcaaaaaaggaataatatcagcctcttctgttccatatgtcaaaatatcacctgaggactacggtgcaatagcagttgatgaagatggaattgtcccaattacagaccaagactggttcaaagacgacgctacaaatcgttttcgcgagtttgtccaagttgtttggggtgaagaacatctacaagaaaaccttgattttgttgccgagtcactgtgcttacatgccataaagcccaagaaatcagaatcagcgctggagacgattcgccgctatttatcaacccagttctacaaagatcatctgaagacttacaaaaaacggcctatttattggctatttagctcaggaaaacagaaggcttttgagtgcctggtttacctgcaccgttacaacgagggcacgctttctcgtatgcgtaccgagtatgtcaccccgttactaggcaaatacgatgcttatgctgagcagcttgagaagcagattgaaacagctgactcaaccagtgaagcgaaccgattcaagaaagagttggatgctttaatcaagaaacaggttgagctacgagggtttgatgacaagctaaaacactacgcagatatgcgtatttcactggatcttgatgatggtgtgaaagtgaattacggcaagtttggtgatctgttggctgatgttaaggccattaccggttcggccccggaggttaactaa

SEQ ID NO: 313874 - DNA, 666 bp, Proteus mirabilis
atggcaaggaacaaaaaaaataatcgatatagttatgtgcaaaagcaggcagagcacacaaaattttacaacaaaaacttcaataaaacttcgagttttaactctgtattcagcgggtcacatttcaaaaatacatctctggttggtgcaaagttcaaatattgcaatctcaataatgtgagatttgaaaactgtgttttacagggaactcattttaaaaagtgtacacatgacggccttaagtttgaaagatgcattttgatttcaacttcctttgagcgtatgcagttacatggtgtcgaatttgttgattgttatattttaagtactaacactcacgcatgtaagcagtttcaaaacagcaaggtatataacagttttcctgatggtactcagtatccttctgatttaatgagtattgttgatgttttgagagagaattcttgtataagaaaatccggggtgcttcataggaaaggcggcaaagtaaatacaattgcactggattttttgcttgatgaattcggagttaactacctaatcaataacttgcctaagctaaacacactagagtccgatttctatacattgagttatatttcggcattcttgcggagggtaggaaatcctgatagcttagacattacccggcccacagcaacatag

SEQ ID NO: 313875 - DNA, 1218 bp, Proteus mirabilis; identical to SEQ ID NO: 270417

SEQ ID NO: 313876 - DNA, 369 bp, Proteus mirabilis
atgactgtagacgtgaatgaaaccttgaatgccttgagaagcgaaattgcagaaatgaagcaattactggctcaggtcgttgaaaatacggtgagtgacggcagcaaatcaaacttaccaccatctgataaagagtatcttaccgtcgatgaggcggcggcatacgttggagcaaaacgctcatacatctaccgcctgacgcatgaaaagcgcttatcgtttactaagccgggtggtaatcgggtgctaattaagcgctcagaccttcaagcatggttggaaaagaacagagtgaagtctgctcatgaacttcaccaagacgttacaaattacatcacgagttttcctcgcggccgtagggcatcttaa

SEQ ID NO: 313877 - DNA, 210 bp, Proteus mirabilis
atgaagcatttagatcgtgaaactgaaaagcgattaaacatcgtcgttaaggcaatcggaacgttgtttattctaagctttcttactcacttgtttatctcgtcgtggagagatgaccaatatggatttaccttactagcgttgattgcagggagcgcgttagtttcaatcaatctaggccgcagaaaaaaaggtaaggaggactactga

SEQ ID NO: 313878 - DNA, 543 bp, Proteus mirabilis
atgcgcaaagccttgccagaaaaagatattcgccccggccttgcgcataacgaattaatgtgtgaaaaagattatgcgcgctttgcccaattaaatacctacccttttctctcctttcaatgggctggcgtagagcaacataatattgataaagatcttgaaatgttaggcaaagcacgttgccaatatctagaaaccgccggtaaatttattgatgcgggagtgactgtcgcatttggcagtgattggccgattgatccattaaatgagtggtatgactttaaagttgccatgactcgacaaaaagatccctctcagccacgtttagataatgatcgcaatctcaccttaatcgaagtattacgagctgccaccatcaatgccgcttatgcactagatatggataaacagattggttcattagaagtaggaaaattcgccgattttattgtcttagatagaaacttgtttgaaatatcggcagaagatattgaaaatgtcagggtattgtgtacgataattgcggggaaacccacaatttag

SEQ ID NO: 313879 - DNA, 1281 bp, Proteus mirabilis
atgagcgcggtgaaattatcgaagggatgggattgtactctattaggtcatgtaatcgagctcaaatatggcaaatcgttatcagcgcaaactcgtgatggcgttggttttgatgtatatggctccaacggcgtagtaggaaaacactccatcccgttgattaatcatagtggattaattgttggtcgtaaggggtcattcggtgtagtgcaaaaatcaacagaaccatttttcccaattgatacaacgtactatattgatgatttctacaatcaaccgcttgagtactggttttactatttgtcttttttaccgctaacgaagctaaatcgatcaactgctattccaggtcttaatagggatgatgcctacaatttggatattgttctaccacccattacagaacaaaaaatcatcgctgaaaaactcgatacactactggcgcaggtagacagcaccaaagcacgtcttgagcaagtcctgcaaattctgaaacgttttcgtcaggcggtgttggctgcagcggtgagtggaaagttaactcataaaaccaaaaaaaatagcccttggcaggaggtgctactgaacaatattgcatctcatattgtggattgcccacattccactccgaaatggagttcctctgggaaatactgtgttcggacaaccgctttcaatccttttaaattagacctgtctggacaagggtttgtcgatgaagcaacctatcagaataggacacagagattaaaacctaaagaagatgatattttatatagtcgtgaaggaaccattggaattgcatgtcaaatacctaaaggtgttgaactatgtcttggccaacggatggtattgattagagctagtgataagatcttaagtaaatatttaactattgtgcttaattctaataaaatactttcaattgtcagagcaagaacaatgggaagcactgtgccaagaataaatatgtctgatataaaatcttatcctattccacttccgtcactctccgaacaacatgaaataatctgcagtgtcgagcaacttttcgcctacgccgacaccatcgaaaaacaggttaacaacgctttgagccgcgtcaacaacctcacccaatcgatcctagcgaaggcattccgtggtgaactgaccgcccaatggcgcgcagaaaacccagacctgatcagcggtgaaaatagtgcagctgctctacttgagaagattaaggctgaacgtgccgccagcaatagtaaaaaagccccgcgtaaaaagaaatag

SEQ ID NO: 313880 - DNA, 435 bp, Proteus mirabilis; identical to SEQ ID NO: 56169

SEQ ID NO: 313881 - DNA, 204 bp, Proteus mirabilis
atgcgactagccagtcgttttggttatgcgaaccagatacgccgtgaccgtccgctgacacacgaagaactgatgcactatgttcccagtattttcggtgaagaccggcatacttcccgcagtaaacgatatgcgtacattcccaccatcaccgtactggaaagcctgcagcgggaaggctttcagccattcttcgcctgctag

SEQ ID NO: 313882 - DNA, 1449 bp, Proteus mirabilis
atggataataaacaacactatttagatatcgccgcagggcaaggaaaaaaagagccctctcgtatagtggcattccctgcacagccactaaactatgcattgatagaacaacgcctagaggaacagaccgaatacacagatggtgagataagctatcttagtgatgatcttgatgaaggttttttctatcattgccaacatggcgatgatgagctccatttttttatctgcctgctaccacgatcagaagattatcaaatacgtcctatgtatgcgacagatgagatgactcctgagctattagcccatgccaatgccaccactcaagacatcttattagaaacgatgttctctgacaccctacatcctttagcgagttatcgccatcagctcaatctactgaacataattgcgccagaaatgatcctcgcactggatgaatctgccgcaggtaaaggattaactcccgaatggatacgctttcaattggagacacccgatctctatcctgaagtagaaagtttgtatgttattcatgcagtttacgatacagaaaatgatccaccaaccatgttctggtttcatacccatggcttgcaacgttgtggcttaactgaagttgatttagtgatcccaagcatgttggaatcttactacggtattcctgatcttttccgttgcttcgtcaataacagtattaacaaccgccaaattgaatttggcgagccgatgctttgtggacaaacttcgtcaggattagaatatttagtcgcgctaccctttgaagaaggtatacgtcacgttaatcagtccacacctttagatagtcttagaccattagaagagatgcgttataacactcaaggggcaccacatggcgtatttctgggcgatatggctgatagagacgaatatcatcagcacccatcatcgatgttatttagaactaatgaagaaaaccctattttagaaactttctttaaaggttatgaagaacaacaagccatgatgctactacgcagtaacgaagaaacctacgaaatggcagaaaaggccaaaaggcgttggcaatattttctctccatgtttgataactaccatcagccccccgtagagaaaaaaaccggtttcttggcaaaattattaggtagtaaagagagcaatgaagaaactgagagcccatggcaatttatgattaagtttggtattccttatggtgataaggaagaaaaagagcttgagcacatgtggtttatccctcagtctcgagaaggtgaccgaatttatgctaagttacttaacgtaccattctatgtacaagaaatggaagaaggtggcatttatcccattgatattgcgttcatcactgattgggttatctcttatgaaggttatagttatacccctaatacgatttatcaactttttagccaccagcagactcactaa

SEQ ID NO: 313883 - DNA, 327 bp, Proteus mirabilis
atgagaactgttaaaaaaatagccagagagcgcaatatgacggctaaagaagcagctaaaaaatttggtaaatccacccgaacaatccaacgccttgttgctcttgaccgtagcgattacgaacgccgagcagatgaacgccgtaaaatggcttataacctacgattacaaggcaaaaaatggaaagaagtaggcgaagccttaggttgttctgatgaagcagctagagccctttataagcgttatctcgccttacaagaaaaaaaacaaaaagaagcagaagaagccaaaaacgaaacagcaaactatgatttattcatggattaa

SEQ ID NO: 313884 - DNA, 819 bp, Proteus mirabilis
atgaggacattatatcaattagacctctttacatcaagcatagcccactatttagcgtgttctgacgacttgggcaacgtggttaggctacccaaagaaaaagccattacaaagccgtatatcgcaccaaataacagttctttcatcaactgcttgctgtttgacattgataaaccagacgcaggggcttcatggctggataacaacatcgccatgcccaactggatttgtcaaaacccgttaaatggtcatgcgcactatggttacatgcttaaaacgcctgtttctcgcacgttaaaagccagaggaacgccacaacgctaccttgcccgtattcagcaagccatgacagaacagctagaagctgatgcaggttacgcccatttcctcactaaaacgcccgcacacgacaaacaccgcacaatatggggtagaagtgaaccctttaccctagacgagcttagggacggtttagacgctgatttaccgcttagattgaaaagagaaacagcagtaggcgaaggcagaaacgtaaccttatttgacggcttaagattttgggcttatcgggaaagattgaaatacaacgactttgataggtggtttacagcctgtttaagccacgcacaagcccttaatcagtttagttgccctctagggtacaacgagcttaaaagtaccgctaaaagcgtcgctaaatggacgtggcaaaacattaatgcaaacggtttatctaaagctcaaacaaacagaataagaaaaagatgggcaaaaaataatgctgaattaattgatattcagggagatttaataagatga

SEQ ID NO: 313885 - DNA, 315 bp, Proteus mirabilis
atgcaaaaaaagcgaaatatcaaaataacggtgcgttattctgatgaagaattggagcaagcccaagcaaattcccaaggtgtttttgcttcttggcttcgctcgctttcattgaatgaaaaaacaaaaaagataaagcctgttgatcctcagcttttgtatgagctaaaccgcattggcgttaatctcaatcaaatagcccgttattgcaatcagcaggctattttccaagccgaggataaaatcgacttactggctacgcttgcgaatatcgaggagcaactgcaagccttgagagaaagtcatgctagttaa

SEQ ID NO: 313886 - DNA, 1422 bp, Proteus mirabilis
atgctagttaagttttttaagaacaagggcgggggcagtccaaaggcgagcatggcttatttgctcaaagaaaaggggagggcagaagcccctgccgttttacagggcgaccctgatttaagccttgcgattgctgaagcttcaccgtttaaaaatgcttatacggtcggttgtttatctttcgaggaagtggatcttcctggcaaagataaacaggagattatgcaacgctttgaagaaacgctatttgcaggcttggagagcgagcaatacaacatttcttgggttgaacatcgagataaaggacgtttagagcttaatttctttattcctaataccgaattaagcacaggcaagcgtttacagccttattacgaccgagcagaccgccacctaacggataactttaaaaaagtaattaatcacgaatacgggctttcagaccccgacagtatcgaaaagaaacagcttttacagctgaacagccaaacgcctaaaagcgttaatgaaacaaaaaaagaaatagccaactattttgctgaaaaagtaggcgatggcttgatttcagagcgtagccaagtggagcaaacccttgaagccgcaggttatgaaatcacccgaaaaactggcaagtctatttctataaaaaaccctcatggggaacgcaatatcaggcttagcggagaaatatttagcgaggaattttatggacaaatcagagatgttaagcaatctggacaaagcttggcagaagcaagagagcgaaaccaagaaagagaacgaagcgagagccaagcaaattaccaacgagctttggaaaagcttggaagtggagttaaagcacgtcaagagcggtttaaagggctatatcctcggcaaaatggtttgggcatcagcgataacagccatcaccttgctgttgctgattctatgggggttcatcggttggcaagtcaaacagaagcagaacgacttaaaacggctagagaaagcccaagcgaacatgcagaaactggagaattggaaagagttaagcgaggtagaaatcatcgacaaatacggggattatctactggtaacgaccaaaaacaagaaagcagaaatacgggatacgaacgagtacggcaaagccctgctgataccgagaaacaaggactaatggggtttttcaatgaattacaaacaagaattaaaacgactgtttcaagagcaagagagcaaattgaaggaattagagagttattgcgaggaactgaaaagagagaatcagaggctgaacgacttgaacaagcaagcctttcaggcattaagcaagctgaaagaagccttggaagcacaagagaacatcaacaacacattagagaaacagaacgggcaattaaaagggctaatcaatcgttagataggggcatgagcctgtaa

SEQ ID NO: 313887 - DNA, 378 bp, Proteus mirabilis
gtgcggcgacatagcgttgccttgtacggcccagctgctcacgaatttttcgatgaaattcctgtcgtcgatgtgcagcgttcgttactggaaacattgacactctggactacagaggcggattggaaaggggatgagagaaacatcgttctcgccttggtgcgtatctggtacaccgcaatgaccggagagattacttctaaagttgctgcagcagactgggcgcttcagcgtctgcctcgtgagatcaaaagcgttgttattgccgcaagggatgcgtatctggggctggaagccgcagatctggcagcttatccgaaagaacgggcagaccttcggaaccatatccattctagcgtgacggcgaaactgcaatag

SEQ ID NO: 313888 - DNA, 630 bp, Proteus mirabilis; identical to SEQ ID NO: 290967

SEQ ID NO: 313889 - DNA, 810 bp, Proteus mirabilis
atgtcgaagaaatcaaaaccggttcgtctttgtgttgaaggggcgacaacggacgggcgtcgagttgatcgcgaatggttaacccaaatcgcgaaaaactttgatcccacggtttatggtgcgcgagtcaatatcgatcactataactattcatgggcaccacgctttggtgatgtggagtcggtgtataccgaggaaattaaagaaggggcgctggcgggtaagttggcactgtatggtgtgatcaatccgacgcctgatttaattgaactcaataaaaaacgtcaaaaagtctatacctctgttgaaattgacccgagtttttcagataccggcgaagcgtatttagtcgggctggcggttaccgataaccccgcgagtttaggcactgaaatgctgcaatttagtgctaatgcacaaagtagcccgctttcagagcgcaaacaaagcaaagataacgtttttactgctgcagaagaaaatcactttgaatttattgatgaaaacccgcagagcgagaagccagggctttttagcattattaaagagatgttttctaaaaaacaacacagtgatgatgcgcgatttaccgatgtgcatcaggcggtggagctgtgcgcccaagaagtacaaaccctttctgcagaaattaccgcattaaaaaacgccgaccaaagcgaagcggtaaaagcacttacgcaacaactcacggaattaaaaacccaatttgaaaatacagacgcctcgttctcacatcgtccgccggccacgggtggcgaaaataatagcgaagtgctgacggattgctaa

SEQ ID NO: 313890 - DNA, 2019 bp, Proteus mirabilis
atggcacactattcttatttatttactccccttgatttagggtttactacgcttaaaaatcgtattttgatgggctcgatgcataccggactagaagaagatccacatgatgcacctaagcttgctgaattttatgctcaaagagctgcagcaggggtggcacttattgtcaccggtgggatctcccctaataagcaaggtgtattattgccacatgcagcaacgctaatgtcagaagatcaactcgcttctcatcaattagtcactgatgcggtacataaacaggatgggaaaatcgctttacagattttacatactggtcgttatagttatcagcctaatttagtcgccccttcagcgatccaatcgcctatcaccccttttataccccaagcaatgagtcatgagcagatagaacaaactattgaagattatattcattgcgctaagttggctcagaaagcaggctatgatggtgttgagatcatgggatctgaaggctatttaattaaccaatttttagtaagtcatacgaatcaacgcgatgatcaatggggtggctctattgaaaatcgctgtcgttttgcattacgtattttagctggcataagagaagctgtgggtgaacactttatcattatctatcgtttatcaatgttagatttaattaccgagggagctaatgcctcagaggtattttatcttgctcaagcagtagaaaaagccggagcaaccctaatcaacagtggtattggttggcatgaagcccgtatccccactattgccactatggtgccaagagggcaatttgcttatgtcactcgccaattgatggggaaaatcaacattcctcttatcacttctaatcgtatcaatacacctcaagtggctgaagctattttagcggaaggctgtgcagatatggtgtctatggcgcgtccttttcttgccgatccgcaattcgtattaaaagcgcaacttggtcgcgaggatgagataaacacctgtattgcctgcaaccaagcctgcttagatgagatattcagtggtcacccagcatcttgtcttgtaaacccttttgcctgtcgagaaacagagcttattttaaccccgactcaagcccctaaaaaaattgctgtcgttggcgcaggccccgcaggattagcatttgccattacagcagctaaacgtggtcatcatattactttatttgaaaaagaagaccgtattggtggacaactcaatattgccagtcaaattccgggtaaagaagaatttaaagagacattgcgctactttaagcggcaattgcaaatcacaggggtgatcgtaaaaaataatacggaagcgacactttcccatctgcaacattttgatgaaattattttagccagtggtgttatccctcatattccagagattgatggccatgataatccgatagtaaaaacctatcttgatgtccttaaatatcatcagccaaccggcgaaaaagtggtgattattggcagtggtggtattggttttgacactggcctttatcttacccaaacaggccaatgcagtagtttaagcccttgtgcatttaataaagagtggggaattgacccaacacttacgcatcgcggagggatcacctccgccgatccttttattaaaaaagacaaacagattgttatgacgcaacgtaaaagtgggaaatttggcttaagtttaggtaaaacaacaggctggatacatcgcttaacattgcagaaaaaaggggtcaaatggctaacgggctgccattatcaaaaaattaccgagcaaggggtaataattgaacataatgaacaacagcaactgctcgcggctgatagcgtgattttatgtaccgggcaacaatcttatcgtccgctactgcaagcgttacaacaagaaaataaaaccgtccatcttattggcggggcaaaagaggctaaagcattagatgccaaacgagccattaagcagggaacagaattagcacttactatttag

SEQ ID NO: 313891 - DNA, 1413 bp, Proteus mirabilis
atggaagagcaaacagaagttactcagcccgttagagtgaaaaatgccactctacaacgcgggctaaccaatcgtcatatccaattaatcgccattggtggtgctatcggtactggtttatttatgggttctgggaaaaccatttcgctagctgggccatcgattatttttgtttacatgataatcggctttgtcctgttctttgttatgcgagcgatgggagagctattattatcaaatttagaatataaatcgtttagcgattttgccggggatttattagggccttgggctggcttttttgttggatggagttattggttttgctgggttatcaccggtatcgcggatattgttgccattacctcctatattagttattgggcgcccaattttcctgaatggggaacgtcttttatttgtgtgctgacactacttattttgaatttagccacagtaaaattatttggggaaatggaattttggttttcgatgatcaaaattaccgctattgtctctttaattattgttggtatcgtattgattagcataaattttcaatctccagccggccacacggcaactattgaaaatatctggaatgatggcggtatgttccctaaagggatcaacggattttttgctggttttcaaattgctatctttgcctttgtggggattgaactagtaggtacagcagcggctgaaacacgtgatcctgagaaatcgttacctaaagcgattaacgctattcctattcgtattattactttttatgttttggcattggcgattattatgtcagtaacgccgtggcgttctattttggcagacaaaagcccgtttgtagaactctttgtcatgattggtattccagccgcagccagtttagttaactttgtggtattaacggcagccgcctcttcagcaaatagtggtatcttctcaaccagtcgtatgctatttggtttatcgaaagagggggaggcaccaaaacagtttagccagctatcaaaacgttcagtacctgccaatgggttactctttacgagtctctgtttatcttgcggtattgtgctaatttattttattccagatgtgatgcgggtatttacgttagtaacaacggtctctgcgttattatttatgtttatttggagtatgatcttatgctgctatttagcatatcgtaagaaacgtcctcaattacatcaacaatctatttataaaatgccattagggatagtgatgtcatggctatgcttagcattttttgtgtttatggtcgtgttattggcatttgaacatgatacccgtcaagcactgatggtaacgcccatttggtttattgctttaggaatagggtatcattttgtgaaaaagcgtaaacaaaaagcacaattaaaaaattaa

SEQ ID NO: 313892 - DNA, 900 bp, Proteus mirabilis
atgactcctgaagacgtttatattttatgccgaatttttcattttgtggcagtcatgttcatgttcggactgagctgttcggctgccattctcgctaaagaaaagtttgttcctcttattcaagtacgcttacgcccagcattggcgattagcactatcactgtatttgtttccacttatttatggatgatagtgcaatcaggcattatgggagatggctggcaagatgcttggtcgctaacgatatggcaagctgtattgggaacctcttttggccaaatttggcaatggcaattagttttatcctctctcgcattaatcgctctctttattcatcaacgtagcattagaaatattagtctgttacttatctcaacattgatgcttgtgctgcatgcttttattggccatagtgccatgtttacaggtagtgaagccgtaatttataaactaaatcagagtatccatcttattagtggagcgtattggtttggtggtttatggccttttgttgtgtgcctacagtttttacgtaataaagatgaattagctgatggcatgatcaagcctattattgccaccatgaaacgcttctcattatttggtcacttcgctgttttattggttatagctagtgggattgtgagtgccattatgttactccccggttggcctgcaacaacacaactttcctcagagtaccaaagtatgttatggctaaaaatagcctttgttgccttgatgttaggattggcattagtgaataggtatgtattagtgcctcatatccgtaagaagaataactttcaatggttgcttattaatagttggtttgagttattacttggtactatggttattttgacagtggccatttttgcgattaactcacctgtatag

SEQ ID NO: 313893 - DNA, 789 bp, Proteus mirabilis
atgacgacagagaagttgccgtctcctaaggttcctgcaacgctaaatggtattctaagctatcatagtgaaaattactgtgtaaatgcgaacctaattttaggtcgtgatattagtgaaagtacacaagtagggttctattttaatgatcaacttaaaatgttgccctgtactgataaatcagcggtatcggtcaggttagagaatcaagccttaacgaatggcgttcattatatctctttcttcactgtggatatttttaacaatatttgtttttcacgccgtgaacgtattattgtggataattccttaactggggaatgcggtaaacaaattaaaaatattgcaccgaagccttgtattagcgtcactattccgcaaatttgcgatcgttattttaattctgtcaatattcggcttgtgccttctttatgcttacaaattaaaaaccgtgttgcaaaattggatatccaaaaaatggttataatctttaatggatatactaaagtcaatagcagtgagcggacattggtttatcgttctacattagaaatttatgccgatgatcctcgtttaggtgatttcctgcaagatactacaccaagcaatgagccgataagtatgattgaaatatcagagcctgcattagaaagtattttggcggatgcattgccaaatatcgaagtgggacaattaggtattcaggtgatggtatttgagaaaaatggcaactgttacttatgtggtgaaaatatgtataccgtttctctacgcttaccttgtgcttaa

SEQ ID NO: 313894 - DNA, 429 bp, Proteus mirabilis
ttgattctaagagatgaagataatgaagataatgcctattatgccccgccgttgcaaattcgagtgacacccgcgatccctaataccgattgctcagcggctaattgtgagaggtttgatgatttactgacaatcaactctgaatctatgcaatggccgagcaaatgggaagaggtatctaaaagctttgtggtacaccttcaaaatcaagaaggtgaagatatgcaaaacaaggaggtcacattagtttacgataaagacaacagcacactacttactcagcctgaaatttataattccgaaggtgagttaagcaatatttcaaaaaccaataaatatggtattgcaaactttaaagttagatttaaaggtacgagccaaagcagattgctgttttttatgctgaatcagaaaacagtgaagatatag

SEQ ID NO: 313895 - DNA, 348 bp, Proteus mirabilis
atgaaagagctaatcaaagagcaaaaccaagagcaagttgagtgggttgttgttaatggtgaccaagccacggtgactctagaacaaccgattatgcgcggtgaaaccaaaatcgacaaagtgaccgtgcttaaacccaattcgggagcactacgcggtgtgcgtttacagccgttaatggatatggatgttgatagcatgatgcaggtgctaccgcgcattactatgccaacactgacaaagcaagatgtgctgtctttagctgcgggcgacttggtaaacctgagcgtgcaggtggttaattttttattaccgaagtcggttatgcccgattccccagcgaattaa

SEQ ID NO: 313896 - DNA, 162 bp, Proteus mirabilis
atggtttatgcggctaataaagctatttatttgattatattgctttcagctgcgcctattgctatcgcgacctttattggattgcttattgggctattgcaaacgatcacacagatacaagagcatttgtttacttatgatgatgggatggatgggagataa

SEQ ID NO: 313897 - DNA, 300 bp, Proteus mirabilis
atggctataaaaaacgaactatcaattcttaccaaagctgagcagcttgatctatattctccgccgctattatcacttgaacaacaacgattgtattttacgccaaacgagatcgagttaacagagttgaaaagtattcgcctaaggaaccaccgatgctatttcattgcgttattagggtattttaagtctaagcctgtgattctttcacctagctttaacctcatctttgacgatatgcagtttatttcaacgcaagttcaaggaggcaattcgaaaactcggagtccaaaccggtga

SEQ ID NO: 313898 - DNA, 252 bp, Proteus mirabilis
atggttgcttcacataatccttttttcgtgcgcatcctcgataacttacatgagctttatcttggcgtattgatgtattccttaagccaaaataaaggacgtattgccgaaactgagcgtgttattgcagagcatgaagctattgttgaagcaataagacaacaagatagtgatgaaactagccacaaaatgcgtcttcatttagccaatgtacgtggaaagttaaagcgcttacaacaagaaaaaaattaa

SEQ ID NO: 313899 - DNA, 357 bp, Proteus mirabilis
atgggtattgataccaccggcttagggcatggggtttatcagaatgttatccagtttttccctgctgcgcgtgagtttatttataacccgaatgtcaaaaatgccttagtcattaaagcctatgacgtgattagtcacggacgcttagagttcgatgcgcagtgcgttgatatcattcaatcctttacatccattcgtcgtaccaccacaggaagcggtaaccgcccaacctatgaggcctcgcgcagtgaagaaagcggacacgctgaccttgcatgggcgacgatgcatgcccttttcaacgaaccgttaaccggcaccaccgagaacagtaataatattgtggagatttattaa

SEQ ID NO: 313900 - DNA, 672 bp, Proteus mirabilis
gtgagtatcgctgataagttgggtgatatagcggaaaaagtaagagcgtctgctgatgcaggagatttcgccgcttatatcgagcaccaagggggccctaacgttaagcgtaacctacaaacgttattagtcgctcgtactgttgccgatgagccgaattcttatgatgaagaagtgatgcgaataattggattatattcaccgataaaaagtagcgatttagtaaaaacgcgtgagcgtcagtatcgtttagttcgtaaatctaagcaggatattgaggcaattgagcataagcgtaagtcagaaacggggagggttttgactttaaaaagcgcgatcagcgcgccttggagttctgtcaataactgtggatcgggcagttcacccgatattaaaaaaccacacgataggggcttaaaatcgcccgtatgggggatttctgagcctgaatatttcgaccttcattcacaatatagcgattgggataaatcattttgcgaggttttagagcataaaaagagtcagcgaataatttccacggtgtcattaagtgaaaatcaggcacgtttgatacctgaatttaaagcttttgtcgaaaaaatgggattggatttaccgcctgactacatttatatggtcaatgatgaagtgatttggtttgatggtaagtag

SEQ ID NO: 313901 - DNA, 273 bp, Proteus mirabilis
atgcttggaagaaacggtgaagtcgcctggaaaacggcatcagaatacgattcaaacggcattctcgattgctttgctatcgaaggaaagccggatgcggtcgaaactatagcaaatgcttacgtgaagctcggtcgccatcgagaaggtgtcgtgggctttgctcagtgctacctgttcgacgcgcaggacatcgtgacgttcggcgtcacctatcttgagaagcacttcggagccactccgatcgtgccagcacacgaagccgatagataa

SEQ ID NO: 313902 - DNA, 273 bp, Proteus mirabilis; identical to SEQ ID NO: 313901

SEQ ID NO: 313903 - DNA, 273 bp, Proteus mirabilis; identical to SEQ ID NO: 313901

SEQ ID NO: 313904 - DNA, 207 bp, Proteus mirabilis
atgtctaaagaaagtgatgtaaccgatttaattaaagccgttcgagaagatgaaagaaaatctcgggcggttcttttttctgctcgtttgcgaaaattagcatcaaaagcactgagtgaacgaatggagccttcacaagtatttcaattattagaaggtgaagccgagtctatcgaacatcaagcacaggaatggaattatgtctaa

SEQ ID NO: 313905 - DNA, 348 bp, Proteus mirabilis
atgaaaaagccaatcgaagaacaaaaccaagggcaaattgaatgggttgttgtcaatggtgaccaagccacagtgacattagaacaaccgattatgcgtggtgaaaccaaaatcgacaaagtgaccgtgcttaaacccaattcaggcgcattacgcggtgtgcgtttacagcctttaatggatatggatgttgatagcatgatgcaggtgctaccgcgcatcactatgccaacgctaaccaaaaacgatgtactgtctttagccgcgggcgacttggtaaacctaagtgtgcaggtggtcaattttttattaccgaagtcggttatgcccgattcccaagcgaattaa

SEQ ID NO: 313906 - DNA, 300 bp, Proteus mirabilis
ttggatgagaaaaaaagcaatattgcacaaataggtgaacgatatggtgtatcagggacacattttagacggctgtgtaaacgttatttaggtaattgtggtaaaagtcaattacgttcatggcgtgcggcatcttctattttgacaacgctatcaacagatgaatcattgactcagattgcagtcgataatggttttagttcagcatctcatttttctaatgaaattaagacattatttggtattacaccaactgaatttcggcgaattggccaatatctttatgaacataaaaaataa

SEQ ID NO: 313907 - DNA, 780 bp, Proteus mirabilis
atggtcaaggaaatgctccgtgaccacttctcccctcaacaaattgccggtaacttgcgccgtatgtttcctaaacttaaagatgcctacgtcagccacgagacgatttacaacgcaatttatgccctgcctgtgggtgagctgcgcaaggagctcattcattgtctgcgtcacggcaaaaccactcgcaggccgcgtacaggcggtgttgaccgtcgcaatcagatccctgacatggtcagcattcacgtgcgtccgcccgaaattgaagatcgtctggtaccgggtcactgggaaggcgatttgatcaagggcaaggggaatgcgtctgctgttggcacgctggtcgagcgcacgagtggctatctgatgttggtgaaaatgaacgacgcaacggcaacgtcagccgttgaaggcttcagcgctgccttaaaccgaatgccccttgcggtacgtaaaagcatgacctacgaccagggccgtgaaatgacccgtcacgctgaaattacgcagaaaacgggtgtggcgatttacttctgtgacccacacagcccttggcagcgcggtagcaacgaaaacatcaatggcctcatccgacagtatctacccaaaggcaccgatctatcgcagcatagccaagaggagctggatgaaattgcgttttcgctgaacaggcgaccacgccaacgctttggtttcaggtgcccgattgaggtgctgacggaggtcatgcagaaagagatggcattgtgctataatggccccgcatcaattcattaa

SEQ ID NO: 313908 - DNA, 3243 bp, Proteus mirabilis
atggccatgacagaagaaaccctggttcaggaagtcactgcagactacttgctgaatcagttgcagtgggatgaatctgtcctgggtatgtatgaaaagctgggcaaggagggtgatttaggtcggctttcagagcaagaggtggtgttaacccgctatttgggcgagaaactgatagagctcaaccctggcttgccggatgtcgcctaccaagaggcgctgcgcgtggtttgtgagatgccagcatccaccaatattgttgctgtaaataaggagaaatactcccttcataagaatggcgtagaggtgagcttccataacgaaaaaggtgaacgggtaaagaaacggcttcgcctgtttgattttgacaactacgaaaacaatcacttcttgctggtcagagagttttggatcaaaggcgatatttatcgtcgcagagcagaccttgtgggctttgtgaatggtattccgctgctgtttatggaggtgaaaaacgttcacaaggatatccgtgctgcctatgagcaaaatcttgcggactacaaagacaccgtcccgcacctgttttatcacaacgcctttattatcttgggcaatggtattgacgccaagattggctccgtttccagtaaatttgagcatttcaatgactggaagcgtttgaatgaaagtgagcctggtgtggtggatatggaaaccttgttgaaaggtacctgctccaaagccaatctcatgaacatttttgagaacttcactctgtttgaccagagctcgggccgcctggtaaagattattgcccgcaatcaccaatatcttggtgtcagccgtgccattgatgccgtgattaatcgtggcgagcggatgggtaagttgggagttttctggcatacccagggctctggaaagtcctattcgattgtctttttcgctcagatggtgcatcgaaaactgggtgggaactatacctttgtggtgctgactgaccgagaagatctcgatacacagatttataaaacctttgcaggctgtggcttggtcgacaacgataaagacccgtgccgcgccgatagtggtaaagacctgaaagagctgatcggccagcaaaaggcgtttgtatttaccttgattcaaaaatttaacgaaaaagtcgaccctaaaaagccttattccgagcgcgacgacattatcgtcatcaccgacgaagctcaccgcacgcaatatggtacgttgtcgttaaacatgcgcaacgccttgcccaatgccagttttatcggcttcaccggaactccattatttaaagatgatgagataaccaagaaggtttttggtgattacatctctacctatgactttcagcgggctgtcgaggataaagcgacagtgcctttgtactacgatgcccgtggtgaagaattggtatttaccgatgaagatggcaacgagcatacagttgcggaccccaaaggcatcaatgagcgcatagcggaaaagctggatgagttggaaattgaggatgtagacgttcagcaaaggttggagcgagagctgaagcgtgattatcacattatcactgcaaccagccgactggatcagatagcacgtgactttgtggctcattatgccaacgcttgggaaaccggcaaggcgatgtttgtgtgcctcgacaagatcacttgtgtacggatgcacaaattgatcgatttttactggcaacaggaaattaaaaccaaagaaaaagcacttttgtcggctacggatgagcaggatctagcttggcgagagcggcaattggcgtggatgaaagaaacgctgatggcggttgtggtcagtgaagagcaaggtgaagtcgccaagtttgaaaaatgggggctggatatcaagcctcaccgccagttgcttaaagcaggatttgaactggctgatggctctcgactggacatggaagaagcctttaaatccagcgaacacccttttagagtcgccgttgtctgtgccatgtggctgaccggatttgatgtgcccacactttctaccctctatttggacaagcctttgaaggcgcataccttgatgcaagctatcgccagggctaaccgagtagcggaaggcaagaataacggtttgatcgtggattactgcgggatactgaaaaacctgcgtaaagcattggcaaccttcgccggtgctggtgacgagggtcatggcggaggtgagggcgaaaatgaacccgccaagcccaatgaagagttgttagaaagtatgaacgagtcgatcagttttgttgctgagtttttacgaaagcatgattttgaactaagccggattattacagaaacaggttttgctaaaaatgcagcgattgctcaagccaaggaaatcatcaatcaaaatgacgaaacacggaaacgtttcgaggtaatggccagagaggtgttcaacaagtttaaagcctgcattaacgtgccgggcgttaatggctatcgtgatatgcgcgatgccatcaatgtactctataagagtttgcaggcagataaagagaaagccgacatctccgatattatgaaggatctgtacgagattgttgacggtagcatcgataccacccataaagtcaaagaaccgaaaccggatggtgatcgaatttacgatatcagcaagatcgattttgaacggctccgccaggagttttctagatcagagcgaaagaatactacagtgcaatcgctcaagcatgcggttgagaagaagctagccaggctcatgatgcagaacccgttacgtaccgattatcaagaacactacgaaaaattggttaaggaatataaccaagaaaaggatcgcgttgttattgaaaaaacctttgaggcactgttaaaactgaatgaagagctttctcatgaagagaagcgcgcaatcagggaatgcttggacgaggagtctttggtattgtttgatctccttagtaagccgaatttgcagccaaaagagattgccaagatcaaacaagtcgccactacgttgttggcaacgctaaaggcagagcggctgaaagttgcaaactggcagcagaaagaatcgacgcgcgacgcggttaagcagcagatatttgattttctttatgatgaaagaacagggttacccgttgagcaatatgaagaaaatgagatttcagatatcactgaaagggtgtttcttcacatatatcgggcgtaccccgaactgccatcgcccatttatgggtga

SEQ ID NO: 313909 - DNA, 1377 bp, Proteus mirabilis
atgaatgtatcccgcttttcatcagctgatggctctttaccagctaacggctctttgtcacccacggcgcaagcgaccttgctgttgaccagctatttctcaaaagccagtagcgaaagcgcaaagccgctgaccaatgccgaatggggtcgctttgccttgtggttaaaagaaaagtccaccacaccagctgatctgttggtttccgacccgaaagctttgctgcaaggctggcacgatgcgcgtatcagtgcggagcgcatcattgaattgctgagccgtggtcatagcctcgcactggccatggaaaaatggcaacgggcaggcctgtgggtggtcacccgttccgacccggaatatccaaggcgtttaaagcagcagctaaaaacagattccccgccagtgctgtttggttgtggtaacaaagccttgttgagtgccggtggcttggcggttattggctcgcgcaatgccagtgagtctgatttggcttttaccgaccaagtgggggctaaagcagcggcagagggtattgccattgtctctggtggtgctcggggtgtcgatgaaacggcaatgctgggggctatgaaacaaggcggtgtggtgatcggcgtgatggccgatagcctgctaaaagcagcgaccagcagtaagtggcgtaaaggtctgatgaatggccatgcagtgctggtatcgcctttctaccccgaggcggggtttagtgcgggtaatgccatggctcgtaataaatatatctactgtctggcagacagctctctggtgattcactccggtaaaaaaggtggcacgctcaacggagcagaagaaaatctgaaaaagggatgggtgccgctgtgggttaaacacacgacggacaaggatgccgccaatgccgatttggtcaccaaaggtggccgttggctggaggctgataatactcaagccttcaagattgcggaattaatgtgcaatgaaggtgggcgtgtgaatcaggtgaaggaacaaatgggcgatctcttttccatgcctgcacagcccgaattgttttttgagcctgaatctaattctgggcctgaagaagttatagagtcagagcgcgagatagtcgttagcgaaagccagacaaagattcaggctattccagagcagactgccgaaagcgaagctgccccatcaggccctgtcgatttctatcagatgtttatctccgaacttcaacacttggctgaaaagccagtaaccgttgatgcgctgattgaaagcacacagcttcataagtctcagttaactgagtggctgaaacgtgctgttgatgacggggtggtgaaaaagctcaatcgccctgcacgttttcaagtcaagaacaaaaaatag

SEQ ID NO: 313910 - DNA, 2133 bp, Proteus mirabilis
atgaaccgtgcccaagcccaacaattattacaaaccgctctagctaatcccgccgccgaattccgtgatggacagtgggaggccattgatgcactggtgaatcatcggcagaaactgttggtggtacagcgcaccggttggggtaaaagctcggtttactttatcagtaccaaaattttccgcgatcgcggtatggggccgactattatcgtttcgcctttgctggcattgatgcgtaatcagattgaatcggcagcgcggcttggcatagtcgctgagacgatgaattcaaccaatactgatgattggcgctcggtaactcagcggatactgaatgatcaaatcgactgcttgttgatttccccagagcgcttggccaacgatagttttatcgaaactgtgttacaaccgattgccgatcgtatcgctctgatggtgattgatgaagcgcattgtatttcggactggggccatgactttaggccggattatcgtcgtatcgtaaacattctgcgccagttgcccgccaatacaccggtgctgggaaccacggcaacggctaataaccgtgtcgttgcggatattcaagcccagcttggtgatattcaaattcatcgcggtccgctgactcgtgagagtcttgctctacaaactatgatactgcctgatcaggcctcacgtttggcttggttagcgcaagtgatacctacattgcctggcacaggaattgtgtatgttctgacccaacgtgatgccgatatggttgcaaaatggctcaatcaacaaggtgtttctgcgtttgcatattacagtggggtcactcatcccaattttgttaataatgctgggaaagaagatacagacctctatcgtcaatttctggaaacccagttactagagaacaacataaaggttctcgttgcaactactgcattagggatgggttatgacaaacctgacctaggctttgtgctccattaccaagccccaagttcgattgttgcttactatcaacaagtaggtcgcgccggtcgtggaattgaaaatgctattggcgtattaatgtcaggtactgaggataacgacattcatgctttcttccgccgaacagcctttccaagtcaagatgatgttcagcgtctacttgcagcattagaagatgcagacggattgtcacttgagaagttagagaaagaagcaaacctgccgcaaaagcgaatagagcatgttttgaaatatttgcgtactgaaagtccatcgcccgtcattgcgattggaaagacttggtttagagctcctgttcgctaccaaatggatctagagcatattcgtaaaattacagagattcgtgaacgcgaatggagcgagattaatgattatctcaataattcaggttgtttaatgttggctttacgtaatgcgcttgatgacacttcacaggaaacatgtggcaaatgtgaaaactgtattgcggagccagtgcttaccaaagttatcgatcaagaaattggaataagagcaactcagtttttaagacagtcagaagaaattattaagccccgtaagcaaatagcagcatcgaatgatgaggcagcgagaacatttattgaatatgattttccacgtaatctcggtaacttagtcgctcaggaaggccgtgttttatcccgctggggtgatgcaggttgggggcggacggttgccgacaacaaacatgccgggcgtttcagtgatgagttggttgaagccatggcagaaatgattcagcagcgttggcagcctaaccccgcacctcaatgggtatgttgcgtgccgtcgcgtaatcatcctgaactggtaccggattttgctcgccggctggctgcacgcttggggctgccgtttgtggatgcagttagcaaagtcaaagacaatcagccgcaaaaaggccagcagaatcgcttccaccaatgtcgcaatctggatggtgcatttgctgtgactcagctttatcagcggcaaccggttttgttagtggatgacatagtggactccggctggacgctaacggtcgtcgcggcactcctccagcaagcaggcagcggcgtggtttaccccatcgcgctggcttcatcttcggtgaaagactcatga

SEQ ID NO: 313911 - DNA, 1071 bp, Proteus mirabilis
atgaatattgtcgaactaggtcaaatcagttccatgaagtatggaaagatgttgtcaaaagacttagctgttgacgaaggtttccctgtttatagtggctaccggattacagggtattcaaaagagtatctttacaacgacccaatgcttattgtggtagctcgaggggtgggcggaactggagatgtaaaaatatcaccacctaatgcatggataactaatttatctattgtcctagagctagatgattcaaaggttgataaacaatatttgtgttatttgctgaacagagagaaccttaaagacaaattaaactctggtgctgcacaggcacaaattacaattgattcccttgctaagtatcgaattcgccttcctccaattaaacagcagaaaaaaactgcggaatttatcgccaaatatgacgacctaatcgaaaacaaccgccgccgcattcagttgctggaggagtccgctcgtctgttgtatcaggaatggtttgttcacctgcgcttccctggtcatgagaaaggaaagatgatcgatggtgtgccggaggggtggactaaagagcctttggaaaacttgttggttcttcagcgtggattcgatttgccaatatctaatcgtattgagggtaatgttccgatctacgcctctacaggtattaatggattccataatttggcgaaggtaaaaggccctggtgtagtcacgggaagatcaggttcgctgggaacggttatgtatgtcgctaaagacttttggccacttaatacgacattgtgggtgaaagaattcaaaaaagcatcacccatattcgcaacatatttgctaagagcaatgaagcttgaaggctataacggcggtgcggctgttcccacattgaatcgaaatgacgttcacaaggtcgatgttctgtgccctgaatcgaagttaatgaatgaattcgaagttcaggtagaaaacattttcaaacagatagacaaactaaaagaatataacgagaagctagcccaagcacgtgacctgctactacccaaacttatgagcggcgagctaaccgtgtaa

SEQ ID NO: 313912 - DNA, 2142 bp, Proteus mirabilis
atggcacaactggaaaacatcgaagcaattgaaaaacgcctgtggaaatcggctgataccctacgcgccaactccgagctggccagtaacgaatactttttgccggtgatggggctgatcttcctgcgacatgcttacagccgctacttatcgctaaaagacgagataatcgcaaacctgcccagccgtggcggtaaaacccgcgagcttacaaaagaagatttctctaaaaagagcgccatctatctcaagccagaagcacagttcgactacctcattgctctgacggatgctgataatcgcgccgaagccattattcatgccatggactccatcgagaccgattacaccaacctccgtaaccagctgccgaagcaggaatacaacaacattcccaatgatgtattaggtatgttgctgcgtacgctcaacccagaagagcttaaaaaagccacgggtgatatctttggccgtatctatgaatacttcctcacccagtttgccgatcagggtgcgcacgatggtggtgaatttttcacgccggtatcgttagtgcagttgattgtgaatgtgttggagccagatcacggcaaaatttttgacccggcttgcggttccgggggcatgttcgtacaaagtgcccactttatggagcggcacgcgcaagacccgcatgaactcaccttttacggccacgaaaaaaatcgcgtgaccacacgcctagccaaaatgaacctggcggtacacggccttgaaggcaacgtggaaggtggtgaagccgccattacctactacaacgatccccacgaaggcctgttcggcactgtcgactatgtgatggccaacccgccctttaacgtggatgaagtcgacgccgataaaatcaaaggcgataagcgccgcttgccgtttggcttgccgggcgtaaataaaaacaaaaaagtcagtaacgccaactacctgtggattcagtacttttatagctatctcaacgattcgggccgagcaggttttgtcatgtcatcccaggcttccagtgctgggcgggacgaagctaaggtgcgcgagcagttggtcaaaaccggtcatgtggacatcatggtcgatattcgcggtaactttttctatacccgcaccgtgccctgccagttgtggtttctgaataaaaacaagcccgcgcacctgaaagacaaggtgttaatgctggatgcacgcaacgtctaccgcaaagttacccgcaagatttacgacttcagccccgagcagcaacagaacctgactgccgtggtctggctataccgtggcgaaggagagcgttttgttgagctggtgcagcagtatatcgacaagtcaattttcgaagctcgctcctgtgaacaatctgaagcgctagcctgcgagccaataccagactttatcactcagttgggaaaattcggccaagcctttcaaccctttatggacaaactggagcagggcggcgttagtgttgagccttatgtcgattttctgaatgccaaaggctcggtcgaaggcggttggtcggcgtttaaaatcctgaccaacgatctgcaaaagtggtggaatgaatacgagtataacgatgctgccagtctgctggacttcatcgataaagatgactgcttaaaagacctggcagagcaaagccgcaacctgattaaagaaatcgacctagcttataagctggcagcccgcgtgattgaactggccgaagccaatgacgcaaaagacagcgaactctgggataacacactgttaaatggtcgtggtcgcagcaatttaaagaaaaccgcagacgaagcccgtaagctgtccgtggaacagctcaaacaagtacgctatttctacaaacaagcctactggctgttaagccgcttcccggaaggcaaactgcgagatgtggaaggcttggtcaaactggtagatatcaaagcgatcgaagccgccgactggagcctgacgcccggccgctatgtgggtgtggcaccagaagaagtggatgaagacttcgattttgaagaagccctacgtgatattcatattgaactgcaaggcttaaatgctgaagcggcagaattggccgaaaagattactcgtagctttgaggagttgggggtatga

SEQ ID NO: 313913 - DNA, 1620 bp, Proteus mirabilis
atgaaaaaactgcctgaaagtatctgccaagaacttgatttacttaagcaaaatacgcttgagaagttccgcctgcctgcaggtagtctggatgatgtgttctcgctgttcatgcagagtcaggctgaggttttacgcctgaaagaagagctgaccctgatgcgcatgcgcctgtttggccgccgttctgaaaagcaggcgaccaacgaagacgatccgcaaatgcggatgtttgatgaggccgaacacgcggtagcaactgctacaaatgaagaacagcaggctgatgctgagcaggaatctgttttgccagaagcagtggccgccgctgctgatcaacccaaagcgcctgctgcacgtggcaagcgcaaaccgctgccagccgagctgccacgggttgaaattgtgcacgcactgccggagcacgagcagcgctgcgagtgtggctgccagaagcatgtcatcggcgaggaaaccagcgagcagctggagattatcccgcagcgcgtgcaggtgattcgccacattcgtaaagtgtatggctgcaaagcctgcgagactgcgcccaaaaccgctgccaagccagcccagatcatcgaaaaaagcatggccacacccagcgtgctgtccatgctgctgaccaccaagtttgtcgatggcattccgctgcaccgctttgagcgggtcatgcagcgtcacggactaaaaattccgcgtcaaaccttggcctgttgggtgattgaatcatccaaacagctacagccgctgtacaacctgatgcaggatcaactgttgcaaagtccctacatccactgcgatgaaacgcgggtgcaggtactcaaagagccggatcgatcacctgaaagccaatcctggatgtgggtgatgcgctcgggcaggcccgaacggccgattttactgtacgagtacagcagtacccgcaatcaaagcgtgcctttacgtctgctcgaaggctatcagggctacctgatgaccgacgactatgccggttacaacgccattgccaaacaatccggcattgaacgactcggctgctgggcgcatgcgcgccgcaagtttgttgatgcacaaaaagtgcagcccaaaggcaaaaccggtcgcgccgatgtggcactgaacctgatcggccagctgtacggcgttgaaaaacaccacaaaagcgccagtattgacgaacgctaccacgcccggcaggaacagagcctgccgatactgcacaagctgaaaacctggctggacgaaaccctgttgcatgccacagccaagaacaagctgggtgttgcactgggctatctggccagcaactggagcaaactggtgcgctacaccgaagccggttacctgccgattgataacaacccggtggacggtgatatccgccacttcgccgtgggtcgcaaaaactggctgtttagcgacacccccgccggtgctcactccagcgccattatttacagcctgatgcaaaccgccatggctaacggcaaagagccgtacgcctggatgcgttacgtcatggagcagctgccgacctgcgaatctgccgaacagatcgaacagctgttgccctggaactgcgaaccgccgatttaccgctga

SEQ ID NO: 313914 - DNA, 360 bp, Proteus mirabilis
atgatgaggcccgacgccaaggtggaaaaagtgtttttgtacccaaggccggtagatttccgtaaatccattgatggcttgtccgctttggtagaactggaaatgaccgtctccctgtttgagccatccattttcgtattcctgaatcgtgcccgtaatcgggtcaagattttgtattgggaacgcaatggtttttgtctgtggatgaagcgcctggagcaggaaaaattcaaggcgccaccggctgaattggaggatgccatcgagctgtccgtcgaagaggtgaactggctgctggacgggtttgatctctggaaaaacaggccacataaagtactgacaccccgctttattgcttga

SEQ ID NO: 313915 - DNA, 552 bp, Proteus mirabilis
atgccgcaatcgaaaatcctcgttgataccaacgcctacctaaggttggccaaaaccgtacgccccttactgtttgtgccctttggtgacaacgagtattgcctgtacattctgcctgaactcaatgaagagctggctggtaggaagctgcaaagtaagttcccttgggtagatgacgaagaattcgccgagaatcgcaaacacttcccccaaatcggcaaaaaacaaaagaagtccattcagcaaaccttcgaatacgtgtgggatcatgtgcaaaccgagttgccgggtccgtccaaggtggatacttggtatgtcgcctatgcattggagttgggtgtaccggtggtgacggacgatcaggatatgactgatttggccaaagccttcgatgcgcaggtcatgccaaccttagagctgctcaaaatcatgctggactgtggccatacagacatgaagaccatcaatggcctggttgagtactggaagtactttgcagacatgcctgccaacttcaagcccgactaccagcgcctgtttggtgatcaataa

SEQ ID NO: 313916 - DNA, 1143 bp, Proteus mirabilis
atgcaaaaaagactaaatacagataaagcacagcaggcgatcgataaggcagggttaacccaaactgccgtcgcggatgctctaggcgtaaccaaagaagccgtttcccagtggcttttgcacaagtcttttccccgacctaacaagctacttcagttaggcaagttgttaaatctctcttttgatgatttggtcatcaaggaagatccgcacgccccgaaagtggcattccgcaaaatgcgcggtaccaaaaccaaggattaccatatcgaaaaagcgcaagagattggtcgctttttgcgtcacctcgtgccctatttgccgtttgacacctttgaaatgccgccggtactcaagtcgccgagctgtgattatgactatcttcgaacggtaacagcgaaagtcagagaagatattaatcttggcccggtggagtgtgtggatttcacgcatttgattcgccgcttcagcgaactacaggccgttgtggtcccagttatgtggggagcaaagcagcgtcatgaaaatgcagtacacatacaccttcctgactcgggcagcacatgggtatacctgaatctggataccaatacccatgacttcaagttctggatggcacatgagttggggcactgtctttcgccaagccttgagggtgatgacgcggaagacttcgccgatgcttttgccgcgagcttgctttaccctcatgaattagcggagcaggcctacgaagtgttggttaaaaagccgtcgactgctgcaaagatcaatacgttaaagcagatggcagagcagcaggtaatttccccaaatactatccttcagcaagttaacaagtacgcaaagcggcttgatagagctgaaattataatgggtaattccttctttggtgcggtaaccaaatttaaccagcaattcctaaatatcagcgaagctctgttcggtgataatgagctggacgaatacggcaagccaagcgcgcgcgactacatcgaaaaagtagaaggcgctttcgaaactcctttcttcgatatgcttcgacaatatctgaaagagcacgataaagggccgggttatgttcaaactgtgctggatatgccactcctcgatgcacggagtatccacgcagagttgacctga

SEQ ID NO: 313917 - DNA, 477 bp, Proteus mirabilis
atggttaagcgcttcagacgcatgtccgacagtgacatcaatacaatcgttgccgatttggatcgctgggcgttgggtgagcttggatcaaaactcacctgggctgtgctagaagagcgctttggctttagtcgccagtcgctccaagctaaatctgagatcaaggccgcctatgacaacgccaagcgagcattgtcgggcggattggtgaaaaccaaagagcaggccactaaagaggccgaagagcttcaggtagaggtagatcgcctcaaagcggagctagatgcctacaagcgaaaagaagagctatggctgcgccgctggcagcaaatcgcctttcatgtgcggcagaaagggatacagatggctagcgttgataaggccccaccagaaggggctgagctgccctcaaacactgaaaccgcgcagatactccggccgtttgataaggaagttccaccttcagggagggtttag

SEQ ID NO: 313918 - DNA, 2010 bp, Proteus mirabilis
atgtctgatggtcgttctaatcgcaaggccaaagtcgtcccttttctcgatcgtctggagcgtgacaggaatgaaaacctaaaatctttaatcgacaaagcaaagctaatgaagctggaagggtttgagtcggttgtttgggaagactccgagtggcaagtcaatgcggggcgcctagtcaagttgacaggtaaaaacacgaaatcagcctcttttggtttttcgctgtcactgaggctgggttctgagccactagtcggttgctgggaacgggttgccaaagcactgtttgttctcaggttccacagaaaatatcaatcagcaccgaatcagcgcagtttcattaccgctattggatatgtctcatatgcagctgaacagctagggcaggagttagttgggcttacgccagaggctctggataatgcgtctggtttaatttcaaaacactacagtgaaaccactgcctacaaccttcacaagcatgttgcagagttcgcagcgcattgtgattcgaatggtctatgtcgggttttattgcagtacaaatacgctaggatgaggcggccagcgagcacgggagggataaatcacaaaaggttggatgatccagaggttctggagacgaagtcggacaagctagttgatcccgctgtgtttcgagtcattggtgaactctacttaaacgttccccaagatcataagtatcgcttctatattctgatgttgacgctacttgcttgcacaggcagacgattcagtgaggtttcactattacccaatcagcagctgtctcttgatgaagagggtaacgcctatattgaatacttcccgcgaaaggcaagtcgtggtgacgttttcacacctaagcgtagactttatttgccgtcagaagtgacccccatcgttggtgatgtgctcgttgagttagcggaaattacatttgaagcgcgtttaacagcggaagaaattcacaaagttgctgagcctgatctaaggtttctggatggcatacctgaagataaaaagctctacgcggctgatttaactgaattggggatcagtcatactgttttgggcacaactggctggctcaggaagcaaaacctcgcgtggccagatcatagcgcattaaccaagcagggaattaagcctgcaaatcccattttttacacttacaaaagtggattggttgaatactgtttccgtgatttctcgggagcatatttatcggctcttcatacggaccaatttggtaaagaatactacctaaaagatcttttattcattcgttctcttggactttccagcggaagctacgctcattggctggccacaagttgtagccagtccatgtttactacatttctccgctatttccctgcgctcgccgccgaatacgcctccagcagtatcgaggtggacttcaccagtcatcacttccgccatacgctcaatactctgcttgatgagggcgggttaagtgacctgctgcaaactgaatggtttggtcgaacgaacccaagagacaccaaagcctatcagcatacatcccgtgaaaaacgagcactgatgctccgtgaagacatcaaaaaaggtttgggtggaggtcagttagctgagcaaatcaaagtggttccggtagaagtacaggatgccattctgaaagcacgaattcaggccgtacatgatgtcggtacaggtatctgcatccacaatttctctcaaaccccctgcgagcgccatttgcagtgttcggcggactgtaaagactacgtgtgggctaaggatgataagggtcgtctggacgagcaaaaacgccaatatgcgcttactgctctagcccgaaaaaaagctgaacagcagttggatagcactaagccaaaaaagagtgctgactggctggcacacaacgataaaaaactgaaaacactggctgctcaactggccgacaacggggtggagcactttgatcccgaacaatatttacacgaggtagagcatggttaa

SEQ ID NO: 313919 - DNA, 1584 bp, Proteus mirabilis
ttgaatactagattatcgaaacctcaggccgtcgagcagtcttggcctgagatagagaagctaattacccgtgaaggaaaggaagttgatatatccggtgatacttggagattgccctattctgcgagggataattcaaccctgaatttcacaaagataactaactctgaaatcagagaagcgttcaaagaacatgttgctgaccgacttaaacgaatatccacccatgcgggttatgctgcgtatcaggatgtttggagagaagttctgagacattgggggagcccagtatctcaagttgatactgagtcgcacttaattggtctgtttgaaaccgctatcaatcgcgcccgctcacgaaaaaggttgtgggcaatgtataggcccgtacagtggtacatttggagtgcggacaacaagtcagaatgtggcttttcggaaatttatgcgcaagaacttgaggtattaaagttgccagggaatctgaaaggagaggctgttcggatggaagatcccgaaagtggccctctgcacaagtatcttgagctacctctgttaatcaatgcacttaaatcggatgaggggcgatcattagagtatttgcagcagagggttgtggttgcgctctcaatagcatttggacgcaatccagctaacttaacttttctgcgtgagtctgattttgaatgtctggttcccggaggtgaggacccctgctacatcattcgcatgccgagaattaaaaagcgatttgtaaatccaagagacgatcttttggatgaatatctcgatccgcattttggtgccatgattgagcagttgattgaagtcagtaagttagttccgctgagctttgcagagagggcctttgtgaatccgaaagagcgaccattgcttattaacaggaatggaaacaaatccgccattttatccaaagacattgataacgtatttaatctgacaagcagcgatatagctcgtttgcttagtgcgttcgtgaaacgtcataacattatctcgccgcttactggcgagctactgcgcgttacgccaaggcggctacgttataccttggcaactggtttagcagctgagggaatcagtaagcgtgagctggccagaatactggatcataccgatacccagcacgtgagtgtttattttgagatggccggcaaaatagttgagcatctagataaagcagcggcgaaaggtttctcgaagtacctcaattttttcaaaggcaggctaatcgatagtgatgaaaatgctgtcaatggtgagcgagatgacaagcatctaacgtttgtagatgatcagaatcctgctgatcaagctgatattggcgtgtgtggtgaatctagcgtctgccaccttgatcccccctactcatgttatttgtgccccaagtttcagccatatcgtcatgctgatcatgagcatgtcttggagtgcctgctggccggtcgcgaagagcgtttaaaaaagtacgagaatgcgcgattaggcatacagcttgatgaggtaatcgctgcggtcgcacaagtgtccaaactctgtgagaagggggggcacaatgtctga

SEQ ID NO: 313920 - DNA, 1182 bp, Proteus mirabilis
atgaaaatagagctagtcacacacaaaacgggtgaacaaataccaatgatgctggatgcttctggtatgccagttgtcttacccaatgagtttgtcctttccagacgatcccttagtaccaatacattggttcggaatttgagagagctgtcagtgctctaccgttggctggataaatcaaattgtgacctatctgcgaaattactggctcaaaactcatttaacgaagcggaattaaaaggtggtttgatcgaagtgttaagaatcgatcaggcaaatgggcgtataagtgcagtagcgcctaataccttcaatcaacggttaacaactatccgacaatttttcagttggtgcatggacgtcctgactagtcagctgccgctatcttccttggactatgagcgtttaagggagagaaaatcatttttgcttaaaacgctcgatggtagctttatgtctgccacaccaatgagaaagagtcttcgaaagggcctaaatgagtcagaagttgatttcttgtttgcggtattgcaccccaatgctgagcagggttatgggcgagattctgctgtaaaatttagaaattatgtatctgttgggctgatgctattttgtggtttaaggccaggtgagctgcttagcctcagggtagaggatgtccaggttggtgcgatttcggcgataaaggttgagcgtagacctgcggacccactagatgtaagacgaccgaggcctcaaataaagcgcaatggtcgagtcatcccgattgagaataagcagcttacatttgctttgaatgagtacattgttacttggcgtgaagtacttgaaagtaaaagccaagacgaatcagactatttaatcttgggtgatgagggttcgcctttgtcgcaatcctcaattacacagttctttcaattgttgcgatcgcaatacgcagacgatcttcctgaaaacttaacggccaagtctctcaggcatacattctcatcccgtcttgaacgggtgttgcgtgcttcaggaatggatgagcagcgcagaagggaagccttagccttgcttcgtggcgatagtagtttggattcacaagatacttacatagcccaggaagtggaagaacaggcaatcaagtcactgaagcggtaccaggctgaaatagtgtcagggaggacgccggattga

SEQ ID NO: 313921 - DNA, 2145 bp, Proteus mirabilis
gtgtcccgtacaattatgctagtcccaactgatacacgcgtaggtttaaccagcgtcagcttgggtgtaatccgttctatggaacaaaaaggcgttcgccttagtgtattcaaacctatcgcacagcctcgtgttaaaggcgcattagatcaaaccactgcgattatccgctctcactccacaattcaatccgcagaacctttaaatatggattacgttgagtcattactcagctccaataaaaaagatgttctgatggaagaaattgttgctagatatcacgaaaatactgctgatgcagaagttgtactgattgaaggcttagtgccaatgcgtaagcacccttttgcacaatctttaaactatgagattgccaaaacattaggtgctgaaattgttttcgttactgcattaggcaacaacaccgctgagcagttaaaagagcgcattgaatttgctcgtgctgaatttggtggtgtaaaaaatcaaaatatcacaggtgtgattgttaataaattaaatgcccctgtggatgatcaaggtcgtactcgccctgatttatcagaaatttttgatgactcaagcaaagcgattatctctaatgtcgatttaaataccatcgaaaaaaatagcccacttcctttattgggttgcattccatggaacttcgatttaatcgctactcgtgctacagatatggcaaaacacttaaatgcgactatcatcaataagggtgatattgaaactcgtcgtattaagtctgtgactttctgtgctcgtagtattccacatatgttagagcatttccgcccaggttcattgcttgtcacttctgccgatcgcccagatgttttagtttcagcatgtcttgctgcaatgaatggcgttgaaatcggtgctatcttactcacaggtggttaccaaatcgatgcaccaattaaacaattgtgtgagcgtgcatttgagactggtctacctatctttatggttaattcaaacacttggcagacttcattaaatctgcaaagctttagcttagaagtgccagcagatgaccatgagcgtatcgaaaaaattcagaactatgttgctcaacatatcaataaccaatggattgattcactgacagcaaactctgaacgtcctaatcgtttatcaccaccagcattccgttatcaattaacggaattagctcgtaaggcgaaaaaacgcatcgtattacctgaaggtgatgaacctcgtaccgttaaagccgcgtctatttgtgctgaacgtggtatcgcaacctgtgtactattaggtgatcctgaagaaattcgtcgtgttgctgcggcacaaggtgttgaattaggtacaggtattgaactcatcaatcctaaagaagtacgtgaaatttatgtacctcgcttagttgaactgcgtaaaaacaaaggtatgacagaagttgttgctcgtgaacagttagaagataacgttgttctcggtaccttaatgttagaaaaaggcgtcgttgatggtcttgtttctggcgctgttcatacaaccgctaacactattcgcccaccactacagttaattaaaactgcacccggtagctcattagtgtcttctgtgttctttatgctattaccagaacaagtctatgtttatggtgactgcgcaattaacccagatccaaccgcagaacaactggctgaaatcgctattcaatctgcagactcagcaaaagcgtttggtatcgacccacgcgttgcgatgatctcttactctacaggtaactcaggtgctggcagtgacgttgaaaaagtgcgagaagcaactcgtttagcacaagaaaaacgtccagatctgattattgatggtcctttacaatacgatgcggctgtaatggctgacgttgctaaatctaaagcaccaaactcacctgttgcgggtaaagcaactgtgtttatcttccctgatctaaacaccggtaacactacctataaagcagtacaacgttcagcagacttggtttccattggaccaatgttacaaggtatgcgtaaacctgttaacgacctttctcgtggcgcgttagtcgatgatatcgtctacactgttgcattaactgcaattcaagcaagccaacaagaaaatgcctaa

SEQ ID NO: 313922 - DNA, 279 bp, Proteus mirabilis
atgggtgatgcattaggacttattgaaactcaagggctagtggcatgtatagaagccgctgatgcgatgtgcaaagccgccaatgttgatttgattggttatgaaaacgttggttcaggtctcgtgactgcgatggtgaaaggcgacgtaggggcagtgaaagctgcggtagattcaggtgtggaatcagcgcaacgggtgggtgaagtcgtcacatcacttgtgattgctcgtcctcacaatgacatcaacaaaattgttatcaaacacaaggcatag

SEQ ID NO: 313923 - DNA, 240 bp, Proteus mirabilis
atgaaagcaaaaattgtactaggtgcggtaattctggcttcaggcctattagcaggttgttcttctagcaacaacgcacaattagaccaaatctcttctgatgtaaaccgtttaaatacgcaagttcaacaactaagtagtgatgttcaatcagctaacgctcaagcaaaagtcttctacaatattaaattctgcttgaacaacaggtacgataaccaagtaactacttataaaaaataa

SEQ ID NO: 313924 - DNA, 546 bp, Proteus mirabilis
atgtcaaaaagcgagaacaatcttatctggatagatctggaaatgactggccttgatcctgaacgcgatcgtattattgaaattgccactatcgtcaccgatccccaacttaatattttagctgaaggtcccgttattgccgtacatcaatcggataaattactcgcctcgatggatgaatggaatactacaacacatacggcaagtggtttagttcagcgggttaaagaaagtcagtatgacgatgtggctgcacaacaagccactatcgaattccttgaaaaatgggtgccacagggtgcatcaccgatctgtggtaatagtgtggggcaagatagacgttttctatttcgctatatgcctgaattagaaaaatattttcattatcgttatctcgatgtcagtacactaaaagagttagctcgtcgttggaaacctgaaatccttgaaggatttaagaaaaaaaatactcatcaagcgttggatgatattcgagaatctattgctgaattagcctattatcgccaaacctttattaaagagtag

SEQ ID NO: 313925 - DNA, 1059 bp, Proteus mirabilis
gtgacaaaacgtaaattatctaaaggccagcaacgccgagtacaagaaaatcataaaaagcgtttgcaaagcaaagagaaaaaaaatcacgttgaattagacgatacacaattaggcgaagcgaccgaaggcctcgttatcagtcgctttgggcaacatgcagatattgaagctgcagatggctctattacccgttgtaatattcgccgtactatttcatccctagtcacaggcgatagagtggtgtggcgccctgcattacaaacccaagaaaatgtgcgcgtcaatggcattgtagaagcagttcatgagcgtacttctgtactcactcgcccagattattatgatggtattaaacctattgccgctaatatcgatcaaattattattgtttcagccattttacctgagctttcacttaatattatcgaccgctacttagtggcttgtgaaaccttaaatatcgaaccccttattgtattgaataaagtcgatatgttagatgcagaaagccgagcgatggtaagtgagtggatgcaaatttataaagatattggttatcgagtgcttgaagtctcaagctataccaaagagggattagaagcattaacccaagcattaattggccgcatctctatttttgctggccagtcaggtgtgggtaaatcgagccttctcaatactctcttaccaccaatggaagaaagtattctggtcaatcaagtctctgacaactcagggcttggacaacataccaccaccgcatcgcgtctttaccattttcctctaggaggcgatgttattgattcaccgggggtacgtgaatttggtttgtggcatttaacacctgagcaagtgaccaaaggttttattgagtttcgacctttcttaggaggctgtaaattccgtgattgtaagcataatgatgatccgggttgcttgatcaccgaagccgtagataaaggtgaaatcgcaccaacccgatttgaaaactatcatcgtattttagaaagtatgagtcaggtgaaagtgcgtaaaaatattaatttagactcttaa

SEQ ID NO: 313926 - DNA, 912 bp, Proteus mirabilis
ttggacaagctaaaaattaaactacagtatctattgcctaaattatggctaacacagctagctggttggtttgccaataaaaaagcaggtagcgttactcaatttgctatcaaaatgtttgctcgcgcatataaagttgatatgaatgaagcgaaagagagccaatttcaggcttatgcaacatttaatgagttttttattcgtgcattaaaagatggcgctcgccctattgttgaaggagataaccaactggctctccccgcagatggcgctgtcagccagcttggtcagatccaagacgatcaaattttacaagccaaagggcactcttacacccttgaagcgttgctagcaggtaattttaccttggccgaccagttccgccatgggcaatttattacaacctatctttcaccacgggattaccaccgtgttcatatgccttgcgatgggttattaaaagagatgatttatgtccccggcgatctcttttctgttaatcctttaactgcggcaaatgttcctaacttatttgctcgtaatgaacgtattatttgcctttttgacacccaatttggtcccatgatacaaattcttgttggagcgaccattgtagggagtattgaaacggtctggtgtggcatggtaacaccaccacgtgaaggtattattaaacgttggacttatcctcaagcggataaagttggcgctatatttctgaaaaaaggtgaagagatgggacgctttaaattaggctcgaccgttattaacctcttccctgaaaatagtgttcaattaaataaagatctgatgaacggctctgtaacattaatgggagaactactaggctctatcattaatgccacaggcactgatcataaggcctgcgataataataccattaatgaataa

SEQ ID NO: 313927 - DNA, 2634 bp, Proteus mirabilis
ttgttaaagaaaacaatcaaatggacagggatgatactactgggtgtcggcgcagttagcacgaccttgtggctcaccattccacgttggttacctgttgtggctaaaagctatttacctgaaggtgtttcactctctttaacacaaccaaggttacaacaatggggtgtttttattgatgatatcgcattaaaaagtgatagctgtaccttagctaatgtgcagcaatttacgtttaactatcaaaaacagcaaattgatagcctatcatttaatagtcaacaacttactattaacgaagggtgtttttcacaattatcttttgcagataaaaaagagaccgcaacagttcctctcgatattcatgcgttattagctactattcctcacttatcggttgatattaatcatgtttctttaatggataatcagcgctataacggccattttcagcttaaaagtgatacaaatgggcgattaatcagctatcagggagataatacgcagatacaagcgctgatccgtgataatcaatggttagatattaaacaattaaagattaatttacctgacgataatcagatagagctggcggctgaaatagcgttaccccttaatgttgattcattaccagaaaatggttctatcagcacaacattgttaacatcccattatgcttacccattagtctttattgctcaatggcaagggaatagcggtaccatttctattgctgaacaaggtggagggcaagcgttagctgtgttgccttggaatgtaactgcagaaaatatcacgatagaaaaagggcgttgggaatggtttgggcttgatcaacccttacgtggtggtgtgaatatcaacattgcccagtggcagcaaggattaacggggttacgcttaactgcgcgcttaaatgttatgacgcaagggcatgcagggaaagggaatttagtgatgacgatacctgaaacggcgattaactggttagatgctgatatacctattcaattgacaggcattgtaaataaagatctcatgcaagccagtgcacaacttcccgttaaagtgactggtatgttgacagatcctactatcgaatttcagcccggttcactattacgctttaaagggcaactaacagaaacgctgacggtaaaagatgctcgtttaccactggctggctcaacattatcttccaaaggatttaatggtcacctaaatgcgattgtgttagctgaagatactatttggggagattatcgggtccattttgctggacgttcgaccgatttcttacctgatcagggcaattggcaatggcgttattggggagagggcaatttattgccattaaaagcgcgttgggatatcgctggaactggctcttgggtagataacatggtgagttttgagacattaaataccggatttgatgttttaacttatcagcataccagtatgttagcccccagattgacactcttaacgccatttcgttggttaagagacgataaaaacccattatttgaaggaaaattgaagttaaccagtcaacgaatcgattttcctgcggggggattcttagatagagctgactttattgccagtgtaaaaggtcaatctccttttcgttttaatatgaaaggcgagctcaatgccaagccaaatattggaccgataacgattaatacacgttgggatggtgaaaggctaagagggcagatgcgttggcctgcacaaccaatcaatgcctttcaatctttattgccagaaaaattaggcatcacattagataatggcgaattttatacacaagctgacttttctattgcccctcaacaaggtttagttgctggtggacatttagtagttaagcaaggcagcatgtggctaaaagatggcgtattagaaggactcgattttattttaccttggcgtttaaacggtgatgaatggcaactaggtgtgaagcagccagtgcaattacggattaagcgcgtcaataatttatttgaaatgacagacattaccgccgatctgcaaggattttaccctattacagaagcaaaacctttagttttatctaatgtcaaggttgccatgcttgatggcactatttctatggcaaaattagcattaccacagcatgaagcggcgattatctcattagataatctagagttaagtcggcttttcactttattgaaggtgacccaatttgccgcatcaggtaaagtaagtggcgaattacctttctttatcaataacaatcagtggatagtgaaagatgggtggctggctaattcatcgtacttaaccctcaggcttgataaagattttgttgactctattgatgatagcaatatgacagccggtgtcgctatggcatggttacgatatttagagattagccgctcttggacgcgggttaatttaagcaacctaggtgaattagtgcttgaagcggaaatccaagggaaaaatccattggaagacaaacggcgacaagtaaatcttaattatcgccatcaagaaaatatttttcagttatggcgcagcttgcgatttggttcgcaattggaagagtggttagaaaagagcctatccgatttagggagtgagtcagaatga

SEQ ID NO: 313928 - DNA, 1083 bp, Proteus mirabilis
atgaaaagaatctttgtcatattatttcttttaactctattccctagtctagctgttgctggtgcagatgactacgtaccgtctccaataacaatcaacacatctaccctccctgttgttgttattggtcctgctgatgcccatacttacccacgagtgataggggaactcaccggaacaagtaatcgatatatatttaacggcggtagtttaatagcattaatgcgtggaaaatttactcctacattacctaaaataggcaaaatcacatataactttcgccaaggaaataacactcaatcttccgatttcgatatatttgatactggagttccagggctaggtattattattggtatggcgggctattggcctgcaacgccattggttcccataaacagctcaagtatatatattgatcctgttgccgccaatacaaatccaaatgcttataatggtgcaactggaagttttggtgctcgtttatatgttgcttttgtcgcaacaggacgattacctaatgggtatgtaacgataccaaccaaacaactgggccatattttattggaatctaatcgggcaagtttgaataataaaagattaacagctcctgttatgttaaatggagggcgcatccaagtgcaaagccaaacatgctcgatgaatcaaaagaattatgttgttccattaaatactgtctatcaatcccagttcacgtctttgtataaagaagtgcaaggaggggaagttaatatacaacttcaatgccaagacggtattgatgtttatgctacattaaatgatgcgacccaacatgggaatcgttctgatatattaacattagcaacggattctacggcaaaaggcgttgggctaagattatataaaaataatgaagtaactgcgattagttatggttcagacactcctaacaaaggaaatcaaaatcaatggcatttttcaaattatagaggagagataaatccacgtataaaattaaaagctaattatataaaaacagaaaatactattacgccaggaagtgtaaaagcagtagcaacgattactttttcatatcaataa

SEQ ID NO: 313929 - DNA, 306 bp, Proteus mirabilis
atgagtacaattaattccattattgcttatagaataaagcaaaaaagaaaagaattagggatgacagggagggaaatagcccattcattggaaataagtcaacagcactattcacgtatagagaatggacataccaaaataacagtagaacatttattctctatcgcgtttattttaggtgtcaaacctaaagaactattgcctaattataaattttcaaatgaaaaagaaatgattaaagcaaaacaatcattatcagcagaaagcattatgccaataaagaaaagcgacatgtatcccacataa

SEQ ID NO: 313930 - DNA, 522 bp, Proteus mirabilis
gtgtggacctttcagggatttcgaagtgcgattacacgtaatacacaaatggcttattgtgtgtttcgacaaaaaatccaccttaaaggcgggcgctattggtctttgccgacaatattatcgcatttagataagtgtgttgtgttttatcataccaccaaccctcaagcggaagtgagctatttagcgcataaaaagcaattatacagttcagcccaaacagacatttatgtgtgtgtattcgtttcaggaatggttttgaccccgaagaaacgttgggggttatcactgtacagtgaagatggagcacgggtctttaatacggactatctgccttttacccgaggacaatcaatggcattgttattacggaaggggagtgtagagactccatatagcttgcctttagtctgtgcaaccagtcagtttgtgaatgcatcttatcaggatgaccacattgattgggccaagcgcaatacggggatacggggattcgttttcggggaaaacagatttttgtga

SEQ ID NO: 313931 - DNA, 462 bp, Proteus mirabilis
atgaaatacgggaaactctatgccgtcattgcgatggtaggcatcattgtgggtagttattgggtgattaactggcaagctaacagaattaatctattagtagaaacaaacaaagaactaacgattgctctcgaagaacagaggtctattaatactgattatcaagcacgcataatgcgattaaatcagttggatattcaatatacgcaggagctagcgaatgctaagaatgaaattagtcgcttgcgtgatattagtgagcatcatcctgagcgggtgtacatcaaagccgagtgcccaaaaagcaaaaccactcccgccaccagcttggcttatgcaaccaccgcccgacctactgacaccgctctccgaaattattggttactcagagaacgaattgcagagtcagagcaaatgattaaagggttgcagaattacattagagtggagtgtgtgaactaa

SEQ ID NO: 313932 - DNA, 219 bp, Proteus mirabilis
atgtttaaaaaaagtttattagctgtttctttacttgctctaacaagtagtgttgcctttgctgctacacctactgctaaactaaaagttatcggtactattcaagcccctacttgtacagttaatggggaaacaagtgagactactgttgaatataaattcgatgttagcccaggccttttcccagcaaaaggtcttgtgatgctagaacctatttag

SEQ ID NO: 313933 - DNA, 171 bp, Proteus mirabilis
atgggaggcatgggaacgaaagctcatgacttattcactattccattatgtcgtcaacatcatgatgaattgcatcgtgatccgaaattgtgggaagccacttatggcaatcaaatcgaattgttattttcttttttaaaccgttcattaggaatgggggcattggtttaa

SEQ ID NO: 313934 - DNA, 198 bp, Proteus mirabilis
atgtttttaaataactcagattccattgtcgccaaagtattaataatttctaatttgcattttttatcaataggtatagtaaacattttatcactttatgtaatgaattttttgtatagtaatataatcattgtgaatgataaaagtagtgttatttatttttattatatgtgcgaaatttttttaaaaaaaagttga

SEQ ID NO: 313935 - DNA, 1404 bp, Proteus mirabilis
atggggaataaagttaagttgggtgaactgttaagtatattaactgactatcatgctaatggggcttataagaaactaaaagaaaatgttgaattactcgatgagcctgattttgctgtaatgattcgtactactaactttgaacaggaagattttactaataatttaaaatatattaacaaacatgcttatagttttcttgcaaagtctaaggtatatcctaatgatataattatgaataaaatagcgaacgcggggtctagttatttgatgcccgacttgaaagtccctgtatcattagctatgaatctttttttgcttagagttgatgctgcaaaggcaaacccaatatatatttacctttatctgagggtaaatgaggcatatgtgaagagctttgctaatggttcagtaactaaaacgatcacaaaagatgcagttagaaatttagagattgaactaccaagtagaagtattcaagatcgaatcgctgagcaatttatttgtattaacaacaaaataaccctcaaccgccaaatcaaccaaactctagaacaaatggcgcaaactctatttaaatcatggtttgtggattttgatcctgtggttgataacgcactagatgcgggtttttttgaacaggatttagctttctctgatgaattactgcgtcgggttgaagtgcgcaaagcagtgcgtgaaagtgataattttaaaccgttatcagaggatattcggcggttatttcctaatgcttttgaagaatgtactgagcctgcattagggcttggggggtgggtgccgaagggttggaataacggatgtatttcggatgtagctcattatagaaccaaacgcattaacacttcagagttgacacttactaattacatatcaacggaaaatatgctggttgatagaaaaggtattcagaaggcaacagcgcttccaacggtaaatagtgtgccagcatatacatctggcactattctaatttcaaatattcgtccttattttaaaaagatatggttagctaaaggtgatggtggctactctaatgatgttcttggatttgaagttaaagatcaaggaaccgaagaatatttatttaatttaatgtatcaagattcattttttgatttcatgatggcgacttcgaaaggttctaaaatgccaagaggcgataaaaaagctattctagggttggagcttgtagtgcctccattaaagttgagaaagctattttctaaaaatgtgaatggtttttatacgtcatcaagtattcggaataatgaaaatcatgcattaggccatctccgagacacactcctcccaaaacttatctccggcgagctgtctttgagtaatataaaaatagatatcccagaagaaactttaatctaa

SEQ ID NO: 313936 - DNA, 1302 bp, Proteus mirabilis
atgatatatacaacaggcactgttagcacagtgtcagggtctgctattgtcaaaggcactggcactaaatttaaaaataataatcccgccattaatattggaatgacaattttaattaaatcgggaaatactaatattccatatatgattaaatccgttaattccgacactgaattagtattagcacatccagcattagctactgcaacaaatacagcattctcaattcatattactgagccagataataacagtgatgcggcaagaacgatggttgccataaatgcatacacgcaatattttctcgatgcgatgaatacatggatgagcgaaacaggacagacaaaaattgagatgccgaacggtgaagtcatcacgctcgatagcattaaaaagatgcagggggatattggtagcaaagcggatttaaatttatcaaaaacgcaatcattcacatcagcgatagaggcaataacaaaactaacatcaaaatcagcggatggtaaaacatcaatatcattaacgaccagtaatgcaggtgggactagcatcgagctcaattctgtatcaggttataacgggatacaaataccaaaactgtcgggtacgatggtgcttgttggtcaatatggcagtggaagcaaacaattgtctatggcgggaagaccaacagatatgaaagcggtgggtgcatctggactttatggttatgtatcaccagccaatttacctcagaatattgtagcgtatggagacttcatccacctgaaatatgatgcaaataattggcaaaatattatattccctaactatggggattatatgtttatacaaagaacgataaataatgttgatactcatgttcaagtaatgacatcaaatatgtggactactgacagcaatggattttataaacgcgcatctccaatcatcgacatcaatccagatggctcattcacaactaacgacgaatctgagggcgcaactgttactcgagtagcaaaaggcgaatatcttatcgaaggtgtgctaggttttaacgctgatgcaggatggggcggtgtcgatggtggtattgaaattccactcgatgttaataaacaaccgttgatatgggttaattctaaagttaacaaagacggctctattcttgtgaaaacttatcaccgtacacatcctaatgtgccagaatttgcctgtaatgatattgatggttacagcgacggagatccgatcgatatcccttatggccgttttatttcagttcgagtgcagatgtcagagagacaatttatggtatga

SEQ ID NO: 313937 - DNA, 450 bp, Proteus mirabilis
atgagtggtggtgattggctctcaggtatatcaatctttgtatcggtagtaagcgctattggtacggcaattactgcgtatattgcgtacagggcgttaaatgtatgggtgccagaaagagaagttagatatagagacgcttttattacatctattcttcattataaagcatgtgttaagagtttacctcagtatatagatgaaaaaaatcattcagaactgttagatgagttatcacaagcaaaattagagtgtgataaaaactggtgttttgttgattacagaaagaataagtcattattcaattgctatactcgtattaattcacatcatgtgatggttatgggatttcaaattgaacagaatgaattgttagattgctgttatgaaatgattagtttattactagatgaacaacaaataagtcatatctatatattaaataattag

SEQ ID NO: 313938 - DNA, 1653 bp, Proteus mirabilis
atgttttgctcagtaaccaagttgcatgaatgtaaaaatgttgaacaattatactattttttagggtgtgaagcggccgaaattagtaagtttttatatagtggagtaattaaataccgctctttttctatacttaaaaaaaatggtaatttgagaaatataagagctcctgtaaagtatttaaaagaaattcagtataagataaaggatgagctagaaaaatattataccccaaaatcatgtgctcatggttttataactggaaggaatataatcacaaatgcgaggcctcatgtaagaaaagaatttattttaaatgtagatttaaagaatttttttgattcaattaattttggacgagttagtcgtttgtttcaaagtcaacctctaaacttgccagagaatgttgctcatgttttagcacatatttgttgttataataaagcactacctcaaggtgctcccacatctccaattatatctaatatgatatcttatcgtttagacagacaattgaaggagctggcaagaaataatgcgtgtacttataccagatatgcagatgatataactttttcttttactaaaactaaaaagtatcttccaaaatcaattgtttctttaagtaaagataataacattatactaggccatgaatttaaaaaggtaattgaagataattggtttgaaataaatgaagaaaaaataaggctacaacataaaacacaaagacaatcagtaacaaatattacggttaatactaaaattaatataagtagaaaatttaaaaaacaaacttcagctatggttaatgcattatttaaatatggagcggctgaagctgaaagagaatattttagtaagtatcataaaggttatatagcagaaaggcaatataataagattaaagaaaaaccaggtttattatttacacaaaaagtaagaggaaggttgaattatatccgattagtttgtggtaagaataatgaaagctggagaaaactcatgtataaatatactctagcaatagggcagcctaatgaagagtacaatagaacattgtgggatattgctggtgattcaacgttcattctttgggcgaattcttcacaaggaagtggtttttttcttgaaaatattggtttagttacaaatgagcatgtaatcaaaggaatagaagatagcaatattaataatgatctaataatactctggttaccaaatgaaagaaaaaaatatattgagttacatttagcttggaaagatgataatactgatttagctgtaattacttctaatatatcttttcttgacataaaacctttacaagtagaaccagttcctatttatgatatagggacagaagtatatgcagttggatatcctaattatgacgccagaggttcaattggaaaacctacaattattacagcaaaaataacgagtataattactcgagaaaggcaaaaaagaatcgttatagaccaaccaattgtacatgggcatagtggtggagtcgttttaaatgctgatggacgtgtaataggtattgttgcaaatggaaatgccgagggggaattaagagtagttccgaatgcttttattcccattgaaacattattaaatgagcacaaatcacgaactaaattataa

SEQ ID NO: 313939 - DNA, 522 bp, Proteus mirabilis
atgaagcattggaaactttacactgtcgttgtgatggtgggtattgttgctggtggttatattgtcaaaagtatacaagacatcattactcaaagagataaattagtagcagagaataaacaattaacaaaagaaaataagaattactcaaaactgttaagtaatcagatatttcaatttaatagatttaaccaaatagcagctatagcctatcgctatggtattcaggcagatgcaaaattacaggagaaaattattgaatataaaacgatcctcaaaaaagagccaacttgtgatctgcttgttcctcaacatattactgatgggttgttcaagcacacatacgagttacggtcactgtatagagatcccaaagacactgactcaaccaatattagtacctctaccaccagcaccttaacatactgccaagcggtactatggattgatcctttattggtagctattgataaggcaaatgagcaacttgaaataatacgaaagttagaggatattaaatag

SEQ ID NO: 313940 - DNA, 1059 bp, Proteus mirabilis
atggctgagttggcaagagttcttgatatttcaaggcaggcaatatcatcatttgagaaaggtttaaagaatccatctccagatacactttctatgataagtaaagttcttggatttcctgaaaggttttttcttagtactgagggttctcctgaaattgaaggagcagtacattttaggagtagaagtactgcaactaaaaaggaaagaattaaaggtagaacaaaaggaagatgggtttcattaatcattcgagagtgtatgaagtatgtacagctacctaatgttgagttgccacctattgatattccagacttcgaagtattagaagatgctgatattgaagatatagcgactaaagtaagaagatattggaatatgggtgacgggcctatttcaaatttaactcgactcttggaaaacaaaggcattattgttgcaaatcttcatgccgcagaaaaggttgatgctttttctttttgggataatgatagacccataataataactgataacacaagaaccgcagttcgaactcgttttagtattgcgcatgaattaggacatttaatccttcatcgttcagttgaggatgattatattgatgacaaatatttatttgaaaaagtagaagggcaggcaaattattttgctagttgttttttgttaccagcaaaaacttttagccgagaatattattctccgagtttgccagctcttgaaaaacttaaagaaagatggattgtttcattgcaatgtatgacaaatagagctcataacttaggactaatgagcgataatcagaaaggatatgtttataggcaacttgctccatataggaaaaaagagccgctagatgatttaattctccgagaagagcctgcatttattaataaactgataaacttactagattctcactctattcttttaaaaaatgagttattagatttatttccgttaccagtgcaggatttaatgtatataacaaaattaaaagaaaatgagttgttaagagatgatagcgtattgccattcgtcttgaaaaagaaagcttaa

SEQ ID NO: 313941 - DNA, 609 bp, Proteus mirabilis
atgaataattactccaaacaattggtttcagcttttgatatggaatgtcgtaaagaattatctatgtccctttcaaaggcatatttattgtcttttcaaggagcaaaagaatttggctctttctggcgtcaggctcaatcatatttgaaatggctgtattctgatatgcttgtagaaaaagcggctaatagcttgaaaattcaatgtgacatttctctcaatacagctaaaaactcacgacatccaactttgcattctaatggctgggctttgactgctcacagtgtagaaagcaaaggagtattaccaagggcagcaaaatacagatctatttattcttcactgaaccgtgatttatttgaagaaattgaaagcatagaacatataggtcaatctagcggacacgtatatttattgcatagtggtaagaatcaagcaatctcaactcttaacttaactataccaacaccagatagttcagggattatttatactgagtctgtggcgatctactctccaaatgaggtagaaatagaaaaagttgatgatgaattagatgataaatttaaaatactgactgaaaagcttcttaagcagaacgaaaaatga

SEQ ID NO: 313942 - DNA, 1959 bp, Proteus mirabilis
atgttgcgtttaaaaggaactatcggaataggacatgtacgttatctgtattggcgagcaacccacacacttaattttaatacctctattgaagggatattgggtacaggattatttttggctgagatctactcttggattattttagtattaggttatttccaaacagcttggccattaaatagaaaaatagcaccattaccaaaagatatctcgttatggccaacagtggatatttatgtacccacatataacgaaagtttagatgtggtgcgtgatacggttttagccgcacaaagtattgattatccaaaagataaaatgaaagtttatcttttggatgatggtagccgtgaagagtttaagcaattcgccaatgatgttggtgtgacttatattgagcgtgaagagcacgatcacgctaaggcaggtaatctaaatcacgcaatggcattaactgatggtgagcttatttgcgtctttgattgtgaccatatctctacccgtatatttttacaggcaacggtgggttatttccttgaagatccaaaattagctttggtgcaaacaccacactatttctattcacccgatccttttgaacgtaatttaagtgccgccaaaaacggccctcacgaaggtgcacttttttatggccctgttcaacgaggtaatgataattggaatgcaaccttcttctgtggttcatgtgcggtaatgcgtcgtagtgccctagaagaaattggtggtattgcggttgagacagtcacagaagatgcccatacggcattaaaattacaacgtttaggttggaattcagcatttattgatattcctttagctgcaggtctagcaacagagcgtttagcattacatgttaatcaacgtattcgttgggctagaggaatgacacaaatctttcgtgttgataaccctatgttaggccgtggcttaacatttcctcagcggttatgttatctcaatgcgatgatgcattttcagtatggattgcctcggattatctttttaaccgcacctttactgtttatgttattcaacctcaatattatcgcctcttctgccagtatgatttttgcctttgcattaccacatttaattatgtcggtgtatgtaaactcacgaaatattggtaaatatcgctattctttctggggagaaatctatgaaacagtgatggcatttagtttagtactgcctacattgctcagtttagtctcgcctaaattaggtaaatttaatgtcactgataaaggcgatttgcttgataaaagctatatggattatctaacggtacgccctttaattattactgcactgcttctagttatgggtatttcatgggtcatcattcgttatttattaaatgattttcaaggcatcgaccctttagtcattgtattgaatttggtttgggcaacttatagtttatttattgtgttggcatcgatcgcagtaggtaaagaaacacgccaaattcgtaaaaatacccgcattaaggcatcacttcctatcactttacattttgatgatggcgctgaattacaaactaccaccgaagatatttctatggggggagtgcgtattgcgattaataaaatagctgaattacgccagcgtaccgttaatagcattacgttaatggtgcaacgtgatgttgttacgcttcctgtggaaatggtcagtttagaaaatagccagttacgtctcgcttttttaccaatggatttaaatctacgccgtaagttagtacgggtgatctttggtcgagcagatgcttgggttcatcaaacacaatatcaagacaaaccattaaaagagttaggtgctatcactggctgtatttttgagttgttctttggtcgtcgtcaaaaagtaaaagcaccggtaaaaagaacaaaaacctctctctctgtgcaatctattaatggggatgactag

SEQ ID NO: 313943 - DNA, 1503 bp, Proteus mirabilis
atgtggtggccgtttaagaggcgaaaaacagaaccactcgcaccggttaaacggtcagcattcacaactgacttatatcctgcgctggcgcgagaacagggctttgatgggattaatttaccccaacccacaattgcaggtattgcgatggatagcattgatagctatgtgccctcatttaaaggtgagcaggtttacggtgtgcctgagtcacaggcctcatggtatgcctcacaaatgtttatcggcaacaatatgtgtgcggttatcgctaaacactggctggtggataaagcctgcaatatgcccgcacgtgatgcgatacgccaaggctacgatattgattgtgataacgacgatgatcgtgctatcagtaaaaagcttcgcaaacgagataaaaaataccgcattacacatcagcttaaagaacttgttcactttgggcgtgtatacggtggtcgtttagcattattcgttgtggagacatcaaacccgaaagagtggtatgaaaacccgtttaatatcgatggtgtgaccaaagggatgtacaaggggattaaacagattgatcctcaatgggtaacggctgatttaacggatgccaatgttcaagatcctgctagcatggatttctacgagccaacctattatgtgattggtgggcgtaagtatcataagtctcactttattaagtttgtaccgtttcctgtgcctaacgtgcttaagccaatgtacaactactttggtgtttctgttcctgagcgcatttatgagcgtgtctatgcttcagaacgtactgccaatgaagcgccacaattggcaatgactaagcgtttactcacaatggggatcgcagaccttgagtcggcagataagagcattatcaatgaaaacatgctctattttatggagatgcgcgataactatggtgtgcaaatgacgggcagtgaagatacggttcaacagttcgacacctcattagcggatttagatgccacgattatgacgcaatatcagctggtggcatcggcttccaatgtacccgcgacaaaactgctaggcactacaccgaaaggctttaactcaacaggggaatacgaagaggctaattaccgcgaagagcttgaaagtatccaatcaaacgaccttgaagagctattacagcgtcattatgacatgttaatgcgtagcgatggtttacctgtgacagaaatctctatcacatgggcgccacttgatagcccgacggctgttgagagtgcggatattgaactgaaagaagcgcagaccgatgtggcactggcttcgacgggtgcgatagatgggttagatatccgtaaaaaactggccagcaataaagagtccagctattacggaattgaagtgaacgaggcagattatgtcgaggcgaatacgagtacgaacgaagcgagcgcaatgggcaatttcgcgtcaagcggtcatgaaggggaaacctctgcagtattcagtcgccccagctag

SEQ ID NO: 313944 - DNA, 141 bp, Proteus mirabilis
atgagagaagtctcatatagttatattgtgggtgagctttttggttttaaagattatgataaatatattctaacagaagatataatgttggaaatttatttaaaaagattaatttctaaggtggtgcttcaaatgttatag

SEQ ID NO: 313945 - DNA, 219 bp, Proteus mirabilis
atgcaacatatcattaaatcaatgactaatgcgtatattgaaaaaggctatattacttcacaagcttttattgccgatcaagatctctcaaatcatcaattaaccattaacgtaattgaaggaaagataaaatcaatctttattgataatatgacttcccccatggttgatattctatttccttcatatcaagataaacgacttaatttacgtgagtga

SEQ ID NO: 313946 - DNA, 618 bp, Proteus mirabilis
atgaatatagcgatgacagaaagatataaatggttattgtttttcctatttatcttattaacttattttattcctttagaaacgcgcctgttatggcaaccagatgaaattcgttatgctgaaattagccgtgaaatgttagtttctggcaattggtcagtgccttatcttcttgatattcgttattttgaaaaacctgttttaggatattggatcaattgtattgctcaatggctatttggtgaaagccattttgcggtgcgtattgttgtagtaacatcaaccttattaacaggatggcttatttataaagcggcaatggtagtttggcgcaatagcgctcttgcttttaatgctatgaccgtttttttatcttcttttctggtattagcaataggtacttataatatattagatcctattgtgacgctgtttgtgaccgctgcaatgtactcatttttagttgcgttatcgaccccgaataaaaagggcaaaataattgcttatatgggtattggctttttttgcgcacttggttttttaacaaaaggctttattgcggttgttttacctgcattagtttttttagtcatggcaattagtcaagctcgcgggtga

SEQ ID NO: 313947 - DNA, 969 bp, Proteus mirabilis
gtgattactgttgcattacaagcaccggattattggaattattttttctgggttgaacatgtacagcgttttattgctaaagagtctgctcgctcacaaccaacatggttctatatcccgatagttatattgggtgtattgccttggctaggttttttatttggtgcattaaaatcagctttctctttaaaaaaaggtacactctattttctgctgtggtttgctctcttttttgcttttttctcagcctcaaaaggaaaactattaacctatatgctaccgtgctttgtgccattatctattttaattgcacactatatcgaagagttaaaagatagacctgatgagaaaattagcaaagtgaatgcatctattaatattgcttttgggctaatgggtatatcagccgttatctattctttatacagtgccaaatttgcgctttatgatacgaatgaaacgttaaaaatagtgttagcaataagtgggtttttattttggagtgtgattggtgcgggggcgctatttagacaaacacagtttttaacgatgttttgctctatcggactaagtttagttattggctatgcaatcccagaaaagatagaaagtaggagtacaccagaaaatattatccaacgttattatgagcctttgagtaataaatcgtatcttttaacggacgaagttggtattggtacatcacttgcttggggactaaaacgtactgatattcgtttaacagagacgaaaggtgagttggcttatggtttaaattacccagatgtaaaaaataaatactatagccttgaacagctattagcattaattgaagcaaaccaatataaaggggtagcgattgttttagtcagacctgatagaaagcagattttgactaaattgactacattaaaggaaaagccgatagtagaaaaagagggcgatttaacgctggtgttctttaattag

SEQ ID NO: 313948 - DNA, 321 bp, Proteus mirabilis
ttgtctcgtgggctcggagatgtgtataagagacagataaatgataatatttggaaggcaatagaaaatgctaaatgtagaaataattgtagtataaaacgatacgtttcaataagaaattttgaacatgcacataactatagccatgatcctaaattagggaaaccactatctgcatacttatatgcccaaaatttagatataagaaataatgagatttctatagttaagcaattaaaacaaataactggcgatcttgcatatgatgaagaattcacacctgaatcattagataaactagttcaagaaccaaatcgttaa

SEQ ID NO: 313949 - DNA, 594 bp, Proteus mirabilis
  misc_feature (560)..(569): n is a, c, g, or t
atgcgcaaaatattcgttatatcatgtgcacttgtcgttcaaggattgctcatatcacaggctaatgcggcagtggtgccatcaggaacgatactcgacaaaaaacaggaagtagtgcgacatttaaaagatgaacccgcatcacttgatcccattaatgccgtaggtttaacggaggctcaagttcaacgagacttatttgaaggattagtgatagaagatgagcgagggcgtcccattcctggagtggcacaatcatggcgaacagaagacaaccgggtttggatttttacattacgtgataatgctaaatggtcaaatggcgaaaaggtgacggcttctgactttgtttatagttggcaaagattagttgatccaaaaaatctttctccttttgcttggtatgcagccctagcttctattgagaatgcccaaaaaattattgatggtaaattaaaaccaacctcgttaggtgtggaagccattgatgaaaaaacgttaaaagttaccttagaacgacctgttccttatttccctagtttagcgaccaatttttcacnnnnnnnnnngtttagaatggatcaaagtaggtaa

SEQ ID NO: 313950 - DNA, 402 bp, Proteus mirabilis
ttgcacatcatacaaagtaaaacaggatcaaaagtagcaataccactttctttacgtaatcaagctattaatgtatctcttaaagaagttattgaacgatgtcgtgatcgtattgtaagccattatttagttcattatcatcgaactacttcacaatctaaacgtggcgaacaagttactgcaaatacgttaacgactaattttaaaaaggcgagaaataaaacggatattgattggggagaaggaacacctgcaacatttcatgagcaacgttctttatctgaacgtttataccgaaaacaaggtattgatacccaagccttattaggccataccacacgtttacaaactgatcgttataacaatactcgtggaaaagagtgggtaaccattacctgttaa

SEQ ID NO: 313951 - DNA, 540 bp, Proteus mirabilis
ttggcaacaattgaatcaaatttaatgagaattaatgatacaaataaattaattgacgagttggagtcagaaagagattctcttcttaaaaaaatagaaaatgagattgcagggttagaccgaaatattgaaatttttaatgaattttttggtgatctaacaaaagaaatatacggtgagcgttatatttttgatctttcttttgatgcggatagaggtaaatgccttttggggatttcctgcttaactccaaatagtaatggtggaaagaaaaaaggtgaaataacagcttttgatttggcatatattaatttcgtagataaaatcaagcttaaaagagcaaggtttgttattcatgatagtattgaagatgttgatattaatcagattagagatgttttttatgctgcgaataaaataaatggacaatatatagtatctgtacttagtgataagttttctactgaagaagattttaagttaattgatgagaatactatattagagctttcagaagatgataagttttttaaagtttag

SEQ ID NO: 313952 - DNA, 630 bp, Proteus mirabilis
atgagtgaattcaaacaatatgcgcctgttagcgatgaacagcttggtttttttattgattcttctcgttgctcaggttgtaaagcatgccaagttgcatgtaaagataaaaataatttagaggttgggcgccgttttcgccgtatttatgaaatacagggcgggggatttgcgcctaatgggcaaggtgcatttgaaaataatgtctttgcatacacattaacgatttcatgtaatcactgtgacgatcctatatgtgtaaaaaactgtccaacaacagcaatgcataaacgccccggagatggcattgtccgtgttgataccagcaaatgtgttgggtgtggttattgctcatggtcatgtccttatggtgcaccacaaatgaatactgaaacgggacaaatgtcgaaatgtgatttctgcgtagatttattagcagaaggtaaaaatcctatttgtgttgatacatgtccattaaatgcgattaagtttggaaaaattaaagatttacgcgctaaatatggtcatttaagccaagttcaagggttacctgattttacaatcactcaccctaatttggtcattaaaccacatactggtgcaattaaaaaaggagggaaccaagcatga

SEQ ID NO: 313953 - DNA, 2397 bp, Proteus mirabilis
atgtctataaaaaaacaagaaaaaaggcttgctaatcaagaggggatgccattaacgcgtcgtcattttgtacaagccagtgcagcattagtgagtatgccttttttcgcacaaaatgcacaggccaatcttgataaaagcctacctattgccaacattgatgagaaacctgctactgtcgtcgcaacatgtagcacctttgactgtggtggtaaatgtgatatccgagctcatgttaaagaggggattgttacccgtattaccacaagaccagatgctgatttagatgaacaaatgccgataatgagggcctgcgtaagaggtagaggttatcgtaaattcacttatcatgcggatagacttaaatatcccatgaaacgtgtgggtaagcgcggtgaaggcaaatttgagcgtatctcttgggatgaagcaacctctttaattgctgagaatgtaacacgattaactcaacagcatggtgcagcaagccgttttcttacggtaaataccgccgtcactggggggatcttctcaggtgatactatgatgaaaaaactctttaatctcacaggaggatatcttccttattatcattcagtgagcttagggaataccgctaaagtcacaccttatacttatggcgtatctaaaacaggaagttctcttgatactttagcggatacgcctttagttattttgtggggacataatcccaacgaaaccatttttggtcacaccaatcactattttcaaaaaatgaaaaataatgggaccaaatttattgttgtcgatcctcgttattcagatacagctcaatctttagctgatcaatggatcccattacttcctaccacagataatgcactgatggatgcaatgatgtatgtcattgtgaccgaaaatttacatgataaagcgtttatcgataaatatgtggtaggttttgatgaagatcatatgccagaaggggtgccagctaacgaatcattaatggcttatttgttagggaaaaaagacggtatagcgaaaacccctgaatgggcgacaaaaataacacgagtcccagccaatactatccgtcaattagcacgtgaatatgcgatgacaaaacccgcggccttaattcaaggttgggggccacaacgtcatatttgtggtgaacgtaccgcccgtggttcaacgttattagcagcaattactgggaatgtgggtaaaaaaggcgcttgggcggctggatatggcggaattggtaaccgtcaatctattcgtggtcccaatattggcaaaaatccggtaactgcacaaatatccattatgaattggatgcaagctgttgaggatgcgagcaaagtgacgccagaagatggccttattggcgtcgacaaacttgatagtaatatcaaaatgatcttttctttagcgggtaactatcttgtcaatcaaaaccctgatgttaatgcggcagctaagttacttgaagatgaatctaaagtagagtttatcgttgttagtgatctatatatgtcgccgtcagccaaatacgcagacttagttttaccagaaacgagctttttagagcgttggaatatcggtaatacatggggaacgggcaactatttcttactgtcagaaaaggtcgttgaacctgcttttgaaagacgttctgattatgaatggatcagcgatgttgctgagaaaatgggagtcaaagaggcttttaccgaaggacgaacagaaaaagagtggatagcttatctcgttaatactaacaaagaacgctttaaagatagacctgatttcccaacttttgatgaattactcaagactcgccgctatcttttcaaagatgcaccttttgttgcatttgaagaaaatattcgtgatccagaaaatcatcctttcccaactccatcaggaaaaattgaaattttctctaaacgtctctatgacatgaataatgtcgatattcctgcattatctcattatgttcccgcaattgaaggtccagaagataaattgaccgagaaatatccactacaaatgttaacttggaaaggaaaaaatagagctaattcaacgcaatatgctaacccttggctacaagaggtacaacgccaagaaatgtggataaaccctattgatgcacaaaatagaggcatcaaaaatggcgatatggtgcgtatctataacgacagagggatcacacaaatacctgctttagttaccgagcgaattattcctggtgtggttggtttacaggcgggggcttggtggtctcctgataaagacggcgttgatcatggtgggtgccctaacgttttgacatcaacacgtatgacaccattagcccatggtaattcacatttaaccgttttagttgaggtaaccaaagcatga

SEQ ID NO: 313954 - DNA, 759 bp, Proteus mirabilis
atgatcccagaaaaacgcgtcgttcgccgaatccaatctggcggttgtgcaatccattgtcaagattgcagtattagccagctctgcatcccgtttactttaaacgagcatgagcttgatcaactggataatattatcgagcgtaaaaaacctatccagaaaggtcaaaccttgtttaaagccggtgatgagctgaagtcactttatgccattcgttcaggaactattaaaagttatacgatcactgaagaaggcgacgaacagatcacaggttttcatcttgcaggtgacttggttggatttgatgccattatcaacaccgaacacccaagctttgcacaagctcttgaaacatcaatggtttgtgaaataccatttgaaacactagatgatttatcaggcaaaatgcctaatttacgtcaacagatgatgcgtctaatgagtggcgaaatcaaaggtgaccaagagatgatcttactgctatcaaagaaaaatgcagaagaacgtttagccgcctttatttataacctctctcgccgctttgcgcagcgcggtttttcacctcgtgagttccgtttaaccatgactcgtggtgatattggtaattacttaggcctgacagtagaaactattagccgactattaggtcgtttccagaaaagtggtatgttaagtgtaaaaggtaaatacatcactattgaagatagtgaaatgttaagtgaactcgcaggcaaactgccttcctcaacagaagcttaa

SEQ ID NO: 313955 - DNA, 951 bp, Proteus mirabilis
atggaaaaatatcaaaaccttctcgttgtcattgatcctaaccaagatgaccaaccagcactacgtcgtgctgtttatatcgttcagcgtaatggtgggcggataaaagcttttctacctgtttatgatctctcatatgacatgaccacccttttatctcccgatgaacgtaatgcgatgcgcaaaggcgtgattaatcaaaaaaccgcttggataaaacagcaagctcgctattatcttgaagccggcattcaaatcgacataaaagtgatttggcataaccgaccgtatgaagccattattgaagaagtgatcaccgataagcatgacttactgattaaaatggctcatcaacatgataagttaggctccttaatttttactcccctagattggcaattgttaagaaaatgccctgctcctgtatggatggtaaaagataaagagtggccagaatacggcactattgttgtcgccgctaatctgtccaatgaagagtcatatcatgatgcattaaatttaaagttaattgaattaactaacgatttatctcaccgtatacaaaaagatccagacgttcatttactcagtgcctaccctgttgcacccattaatattgcaattgagttacctgactttgatcctaatctttataacaatgccttgcgtggacaacaccttatagcaatgaaagagcttcgccagaaattctctattcctgaggaaaaaacacatgtcaaagaaggattgcctgagcaagttatccctcaagtatgcgaagagctaaacgcgggtattgtcgtattaggtattttagggagaaccggactttctgccgctttcttaggcaatacagcagaacagctgatcgaccatataaaatgtgatttactcgctatcaaacctgatggctttacctgtcctatcactgttgattcagataacgaataa

SEQ ID NO: 313956 - DNA, 1389 bp, Proteus mirabilis
atgtccagcggtgttgttacagcggcatatattgtcgccgcaatattatttatttttagccttgcagggttatccaaacatgaaacctcaaaacaggggaattactttggtattgcagggatggctatcgcgttatttgcgactatctttgggccttatgctgataatgtaggttggatcattgttgctatggttattggtgccgttattggtatccgtttagccaaaaaagttgaaatgacgcaaatgccagagttagtggctattttgcatagttttgtaggtttagccgcggttctggttggttttaatagttatctagatcacaatcctgccattgatcctgtaatggccaacattcatctcacagaagtctttttaggtatctttatcggtgcggttacttttaccggctctattgtcgcttatggcaaactaagtggcaaaatgtcatccaaacctatgatgttgcctaatcgccataaacttaatttagcagctttagttatttcatttttattaatgatctggtttgtcaaaactgacagtgttggtttacaagtctttttaatgattgtgatgacagtcattgcattagcatttggttggcatttagttgcctccattggtggtgcggatatgcctgttgttgtgtcaatgttgaactcttattcgggttgggccgccgctgctgctggttttatgttaagtaacgatttgttaattgtgaccggggcattagtgggttcatcgggcgctattctttcttatatcatgtgtaaagcaatgaaccgctcatttattagcgttattgccggtggttttggtacagatggtagcagctccagtgacgaaggagagatgggggaatatcgtgaaacaaccgcagaagaagttgctgaactattgaaaaactcaacttcagtgattattacgccgggttatggcttagcagtggcacaagcacaatacccagtacatgatataacagaaaagcttcgtcagcgtggtataaaagtacgctttggtattcacccagttgcgggtcgtctaccggggcatatgaatgtattgttagcagaagcgaaagtaccttacgatattgtcttagaaatggatgaaatcaatgatgattttgctgatacagataccgttttagttattggtgcaaatgatactgttaacccagccgcacaagacgatcctaatagtccaatagcaggtatgccggtattagaggtatggaaagctcaaaacgtgatcgtgtttaaacgctctatgaataccggctatgcgggggtacaaaatccattattctttaaagaaaatacccaaatgttatttggtgatgctaaagccagtgtcgatgcgattttaaaagccttgtga

SEQ ID NO: 313957 - DNA, 1530 bp, Proteus mirabilis
atgcgaattggtatacccaaagagcgactttctaacgaaacaagagttgcagcaacacctgctacagtcacacaactcttgaaattaggatttacagtcgcgatagaaaatgaagctggcattgcttctagtttcgataatgacgcttatcaacaagcaggggctgagatcttagattgtcaaaatatttggcaatccgacattatcttaaaagttaatgcccccctagaagatgaaattgctttactcaaaaaaggctcgactttaattagttttatctggcccgcacaaaatgcaccattgctagaaaaattagctgaaaaagagattaatgtaatggctatggatagtgtaccgcgtatctcccgtgcacaatctttagatgcattaagttcaatggcgaacattgccggctatcgtgccgtagttgaagccgctcatgaatttggccgtttctttactgggcaaattaccgctgcaggtaaagtaccaccagccaaagtgatggtgattggtgcgggtgtcgctggacttgccgctattggggccgcaggtagtttaggcgctgttgttcgtgcatttgacactcgacctgaagtcaaagagcaagtgcaaagtatgggcgctgagttcctagagcttgattttaaagaagaagcgggaagtggtgatggctatgctaaagtgatgtcaaaagcatttattgatgcagaaatggcattatttgcagagcaagccaaagatgttgatatcattattacaacagcattaattccaggaaaacctgcaccacgtttaatcactaaaaagatggttgattcaatgaaaccaggcagtgtggtggtcgatttggcagcccaaaatggtggtaactgtgaatataccgttcctggtgagatttttaccactgaacatggtgtaaaaattattggttatactgatttagccgcccggttaccggctcaatcatctcaactttatggtacaaacttagttaacctattgaaattactctgtaaagaaaaagatggtaatatcaatattgattttgatgatgtggttattcgcggtgttaccgttattaaagcaggggaagtgacatggccggcgcctcctattcaagtttcggtgcaacctaaagcagctcctgctgcaaaaccccaagaaaaacccgttgcaaaacctatttccccgtggaaaaaatatggtttattggctattgcctttttactgttcgcatggttggctaatgttgcgccaaaagagttcttatcacactttactgtcttcgcactttcttgtgttgttggttattacgttgtttggaatgtcagccattcattgcacaccccattaatgtcagtgacaaatgccatttcaggtatcattgtcgttggtgcattactacaaatcggtagtggtggttgggtaagctttttctcatttatcgctattttaattgccagtattaatatttttggtggatttaccgtcactcaacgtatgttgaaaatgttccgtaaaggataa

SEQ ID NO: 313958 - DNA, 954 bp, Proteus mirabilis
atgaagctgaaaacctcagtcatcgcagcagcggtgttatctttaactaatattactgttgcgcaggctgcacaggaactgtctccagaacaagcggcagagctaaaaccatttgaaagaattacagtcatcggtcgttttaatgcgatttatgaagcagctgacgcagtatctcgtcgtgctgataaaatcggtgctgatagtttttacattcaaggtctagatgatatcagtgatagtggtaacatgagtgtgactgccgatctgtatcgaaaagatgcaccaaaagcaactgaagaagaataccgcgtatttcatggtgtaaaagaattaccaaaacctgaagctattttgctacagccttttgataccgttactattcatggttactatccaacaacacctgatattaataacgaaatcgggaaagaagcagcaaaaaaaggtgcagcatcattctttattgtccgtaatatctcggtaaatgatggtggtaaccaagaagttactgcttatatctataaaaaagatgcccctaaaagagccatacagtcttcagaagccgtggttccttatgactctgatgcgggtcgagcgcttattgccgaaggtggaagtgcagccaataaagttgaaaaaccaggacttgcgtcaaatagtgactttgatagaaatgtaggtgtatttgctgaaacacaatcatcaggtaaaagcggacgttacactgtcaccttacctgatggcactgaaattcaagaggttaataaagcagcggctgcattaatggaaccttttgataccattactttcagtggttattttgtgaactcaccggaagtttcttatcaagttgctaaacgtgccgcagagaaaggtgcaaaatactaccatattactcgtgaatggcagagtaatggtggtacggtaacaatcacagcggatttatttaaataa

SEQ ID NO: 313959 - DNA, 495 bp, Proteus mirabilis
atgaaaataaaaaatcatatcagattactatctgcattattagttatctcttctagcatgaatgtattagcagataatagcaaaacaacagaaaagaaaaatagcaatattattaattttagtggaacagtaacatcaacatcctgcaatatagaaagccctaattctcttatcactttgcccgcaattaataaatcggaaatagtctcagataaagattgggccaaagccaaaagcagtacaggtagtaattttgaaattaaactattagattgtggcaataataatgcagcattaacatttaacggtactgatttagcgagtgaaaataaaattctgaagaataaaaataccacaaataatggtgctaaaggagtaggaattttcattcgtagtgatgaaggtaataaaaatatcattcatttaaatggtaaccaagcaataactaagagaattgaaaataaaacagtaacttataaattccatgccgattag

SEQ ID NO: 313960 - DNA, 273 bp, Proteus mirabilis
gtgactatggagagacataaccactcacacaagcaaggtgaaacgatgaaagaaattacaccaattaatcagatgcgtttggagattaagcggctagtcggtaacgataatgcggcagctcaagcagcaattgagtttattcaggatgaccagttgaaatgggagttattccaagacgcctataaccattgccaaactgaaacgcaatttgtcgcacgagcacagaaagcggcgcgcgaagctcaagaggcattagatctattcattctgtag

SEQ ID NO: 313961 - DNA, 261 bp, Proteus mirabilis; identical to SEQ ID NO: 310339

SEQ ID NO: 313962 - DNA, 234 bp, Proteus mirabilis
atgattacgattgatagcgacccaatattaaatccgatttttattggtgggatcgttatcagattttttaatgaatcagattttattagtgctgatataacatcgatatataattatgttgaaaaatttgttgaattatcctttgagctttttcttttatctttagattggctttttataatcggtgttgttgaattagatgaaaatggagtgattttttatgcggttaaatag

SEQ ID NO: 313963 - DNA, 165 bp, Proteus mirabilis
atgaccattgaacaattacaagaagaaaacgcgaagttgaaacaagcgattatcagcatttacacaaacgcggaagaaataacagtcaatggtgaagatggttattatgcagtaaagcaagatcacgttaatgatgcgtatgagctagtagacccaacggaataa

SEQ ID NO: 313964 - DNA, 300 bp, Proteus mirabilis
atgatatgccctgaatgctgtggggatggcaaggaaacatgtaccaatccagatcatgggttaatacaagcgttaacatttcatgatgttgggcgaattggttgcccatgctgtggtcacgataaattccataaagtagagaatggaggctcgtgtgaaatttgcagtggaagcgggaaggttacagaccgcgagttcgaacaatactgtgacgactgtgatcttgatgtaagtgagcatattcagttagttaaagaagtaaataacagattactatctctaaacaatatctcaaagtaa

SEQ ID NO: 313965 - DNA, 240 bp, Proteus mirabilis
atgacagataaaacaggtggagcggcttttcctgtaagcggacatccagatatgcagtttgtagcgcaggaaggcatgacgttgcgcgactatttcgctgctaaatgtatgcaaggtgattgggcaacagagcgcatggatagcgggtattggtcacaggatgacattgacgctattttcaaggataaagctgaaacctactaccgcatggcagatgcaatgttaaaggctagggggtga

SEQ ID NO: 313966 - DNA, 1566 bp, Proteus mirabilis
atgttagataataatttaaaagctcaactgaaagcttacctagaacgattaacccagccagttgagttagttgcaacattagacgacagcaaacattctgctgatatccaagccttattaaaagaaattgaaccgttatctgataaagtcacataccgtgaagataacagtgctaatgtgcgcaaaccatcttttcttattaccaacccagggaaaacaactggcgttcgttttgcaggctcgccattaggtcatgagtttacttctttagtattagcattattacaaactggtggtcatccatctaaagaagccccggaattacttgaacaaattcgtcagttagacggtgagtttcatttcgaaacctattattcgctctcttgtcataactgccctgatgttgttcaggcattaaacttaatggcgattttaaatccgaacatcacccatacggcgattgacggaggcatgttccaaaatgaaattcaggaacgtaatatcatgggcgttcctgcggtgttcttaaatggcaacgagtttggccaaggtcgtatgactttagctgaaattgttagcaaagtagatagcaatgcagaaaaacgcactgcagagttattaaataaaaaagatgcctttgatgttctgattgtcggaagcggccctgcgggggcgtcagcggcagtatatgctgcacgtaaaggcttaaatacaggtcttatcggtgaacgttttggtggacaagttctcgatactgttgatattgaaaactatatctctgtacctaaaaccgaaggcgcaaaattagcaggggctttaaaagctcacgttgatgattatcaagttgatgtcattgacagccaaactgtcagccgtttaattccgggagaagcggaaggtgatctacaccaaattgaaaccgcatctggtgcgattttaaaaacccgtagcttaattattgccacgggtgctcgctggagaaatatgaacgtaccgggtgaaaacgagtaccgtactcgcggtgtaacatactgcccacattgtgatggtcctctatttaaaggtaaaagagtggctgttattggtggtggtaactcaggtgttgaagctgccattgacttagctggtttagtggagcacgtgaccgtactagaatttgcctcagaaatgagagccgatgctgttttacaaaagaaactgcgtagcttaagtaatgtcgatgttatcttaaatgcccaaacaacagaagtatatggagatggtactaagttaacaggactgaaatataaagatcgcactaacgattcaatgcatgatattgccttagcgggtattttcgtccaaattggtttactgccaaacacacaatggttagacggaactgttgagcgtaataaaattggtgagatcgtggttgattcacgtggtgaaaccaatattaaaggggtatttgctgcgggtgactgtacaactgttccttataaacaaattattatcgccgcgggtgaaggtgcaaaagcctcattaagcgcatttgattacttaattcgcacaacttcaaaataa

SEQ ID NO: 313967 - DNA, 945 bp, Proteus mirabilis
atgaaaatgatttttaatctagatggctcaaaaatacggctctcatctttacagtataaaagtaaattgaagcagatcgagataatgcgcaactggtttttcgataactatgaggatcctgcagattcttgccctcatgaaagccgtgagggtggatattattatgtttatggtggcccatatgatgcaagtgaagaactagaagcggtatttggggaacatgtaaagtttgagtatatccaagaattagtagatgagttacaagagatatgttgggattggtctggccggccagataatattgatgattggtatgatgaagatttgtacaacgcggtaatatcttctaagcatcctttcagtaagtttcttgataatattgagaaaataaaaattctagcagagagcaagcatactaatactcaaaaagaacatctacttggtattttatttaccaacgttattacagccttagaaacactttatgttgaactatttatcaactctatagagaaagatgattcttatatttctaattgcatagaaaaagggaaaactgaatttaaagtaagcaaagaaattgctgctttgccattcaaaggagaatctattggaaaaataagagaggaactaataaaagcaataaaagagcatttaattagtacaagttggcataatacaaacatagttgttaaacgatataaggcaacgtttggtattaatatccagagagattggccaatagagaatattgaaatagcaacgataacacgtaaccatttagtacatcgtggcggtaaggataaagatggtaacctggtagaggttacgaagcaaaatttagataatttgataaacgatgctgtatcaataggtgaaaaattaaacgatagcctcaaagatgcattgcaaaagaaaactagcctaaccgaatacgaattttga

SEQ ID NO: 313968 - DNA, 729 bp, Proteus mirabilis
atgataagtgctagttcaagagagcgctggaatactaaaacgataataattataagtcttttggtatcaatagttttgattgtaatttcgtttttttatccaaatgattataatgattggaagaatattcagattagtgtggcttgttcaattttagcaagtaacattatcatgtttttaacctccgaatatatgctgagaagtaaaagacgtacagaaataattgatcgttggggggttgaatctatatacaaaactagggctgaaatgaatgtttccacaaatgtttcgctatcacagtgtaaaaaaaatattgaaattatagcattcggtttgaaatcatttcgggagacaaaaacggtagaaatagaaaatctattaactaatggagttagtataaaaatactaaccttaactcctaattctaaaattttaaatttagttgatcaaagagaaaatttaattgagggttcaacaaaaaaatcaattgaagatttgataagttgggtttcaagtttacaattaaagtcaaaaaagtttaatttggaaattagacattatgattctattccgttggatttctattttaaagttgatgatagaatctatgttggtccatatttaaaaggaatgtcaagccagcaaacaatatcatatgagttttctctaggtgaaggctatatatactggtcgagctatttttcaaaaatatggaatgattgtaaatga

SEQ ID NO: 313969 - DNA, 1716 bp, Proteus mirabilis
atggcgcaacaagcaattaaaagagcaataacgtattcggtcgtaataggtacacttctctcagggcataatgttattgcctcagaaagtgaaacgccactgctattcacatcagaaacacctgcattagtacccgcattcacagaagatgtggcaacacaagatacattaaattcaccatcagtgagtaagcaggaagttagcactaaactacaatcttggttaccaagcgaatataaaccactttactttaagcaactcgtggatgtttatcaaagcaatgatttagcactgatttggcaagatgaacaaattacaaaacaactagagcagcaactggcagaggttgccttaactggaattcaaccacaatttggacgttggttaacgctattagaaacagcacaattaacgccagaagcacgagatattattttatctgacgcttttttaggttatatcagctttgttgaacagattaatcaatcaggaacaacactgttatatcgcgctgcgatacaagcattaccggcaccaactgtgcaagctgtcgagcatttccaactcaatctacaacaaaataccttagggcgctttgtcgtctcctttgcaccctcacacccttactatccattaatgaaagaggaagtgcgcaaacagcttcatcaagaggttatttggcccgtcatggaagggaaaaattcattaaagccaaaccaatcggcagaagaagttattgcattaagacaaatattgcgtaacttaaatttactgcctcaattggctgaaaatgagcaagaagtagcaacaacgatttatgatgagcctttaattgctgctgtaaaatcgtttcaagcggcccatggattagaaactgacggtattattggtagacagacgcgtaattggttaaatatgacaccaatacagcgtgctggaattatggcattaaatatacagcggttacgtttaaccccaccgattggtgacactggaatttgggtcaatattcctgattactccctctatttttatgctaataatcaactgattttagattcaaaagtgattgttggtcgaccagatagaaaaacccccattatgagtagtgcgcttaataatgttgtggttaatccgccttggaatgtacctacgagtatgacgcgtaaagatatagttccaaaaggaaaggctgatcctagttattttagccgtaaaggttatacgatttattcagggtgggggaatgacgcctatccaattaatccttatgatatagattgggaaaacatctctgcggctaattttccatatcgcatttggcaagcccctgggccaactaactccctaggccgatataaatttaatatgccaaactctgaagcaatttatctgcatgacacaccaaaccacaatttatttactaaaaatatgcgagcaattagttcaggttgtattcgtgtgaataaagcggcgcaattagcgacgataatattaggtgatgcaggatggaaacaagatagaattgatgcagccttaaaacgaggttcaacacaatatgcaccaattccagaacgtatccctgtctatttatattatcaaacagcttgggtagcagaagaaaatgcccctcaatatcgagcagatatttataattatgaccaaagcattaataatgcaacctcttttttagagaatattaagaaatatttgtaa

SEQ ID NO: 313970 - DNA, 669 bp, Proteus mirabilis
atggaatattttgtaaaaacatattcaaacgaatctaagtatgaatcaaaggcattatttaatgaatttttagcctttaatcttgctgaaaagataggtttattttggccaaaaggccatattgctcagctttctgaaaatgtaaagagtgatctaaatatatcaacttcatttgttattgcatatgagttcatatatggtttagaagaattacctgaggatcatcaattcagtaatgatcaactgagtgctctttatgggaaatcaatatttgataattggctatcaatacgtgatgcgaaaaatgatacttgcaagttgtcaaataatgaattgctgtttatggatgctggaattgcccttgaaagtgatagtcaagatatatggggtgaagatggtcttatctggaacccaagtaaattagattctgagacagcgccatatcttcatgaaaaattgagctctggagaaggatataaactatggatggatagaatttgtgacatacctgctgattattatgaatctcttgtaaatagtatccctcaagattgggaaattcctgtaagttacaagtcaaaatttgtcgagactttttcttcatcgtgccatatttttattcctatgatgattgaatatatcaagtatggtttgaatcccaagttataa

SEQ ID NO: 313971 - DNA, 1050 bp, Proteus mirabilis
atggggaaagttcaagtgttagataaagaaaaaataatttctaaaaatattctttttgaattatttaactataaattgtgttgttttttaaatacaaggaataaggcaaggcgttggaaatatttttcttatgtaaaatgggaggaagatgtttttgatttaaacttacgtattgaaaaaacaaaattagacctaatacattggtttgataatttatccgactttgaggaaagaaaaacggttatattgaaaagtaaatttacatacaacgatattgaatgtataaaaactttattgtctagatttggttatatgtttagaataaataaaatctgttcagataaagattatcgtttgttttattttgttctacagttaattaatgtaaagaatgataatattggagaaaaacgaaatgatttgatgacttctttatgtcaacagtttttatgtgagttattcatgtcttatgaggatttttctcgatttattgtaaatgaacagggtattttctttgaaactgaaaatataggacatgtgaatttaatcagtattattaatttgcttttttttgataatggaacagaaagttcccatgcgttagggcaattctatttatctttaattgattttttatttgtaagggatggtaggagatatcaatattatttgtgttttaatgataaaaacgaaaaatttattcattcaaatatcttcattgattacttaaatgataaagaaaaacaaagaaaactatttggtttgattgaagatatattaaaccccttacaatcatctagtgagatatttgtttccaatatgttaatcatgaattatattttttatttttttaaggatgagcctagtggtttattaaaaataaaggcttatttagataacgatgagatgttttttcacttttttgaagcaataattaaacgtcgattgattattggcaagcagcattttaataatttagggttagagaattacttaataagaataaaattaaatgaaactcatttttataatatcttatctgaaagataa

SEQ ID NO: 313972 - DNA, 384 bp, Proteus mirabilis
atggttaagccttttatacttggcataactaacttggaatcaattgaaattgcaactgctttaaaagaatatgaagttgaacagtgtgtggtaggtgagctattattggataatagaataaaaaaagaattttcaactattgggttgccgattattataaaaaatgaagaaagtcaaattcttgattgcacttcgggagaaaattatgagctcagtacttcgatagagttcattgttttttctaaaactctatctgatttaggtatcaaagtttttaggaaatccagctgtgttaattcctatattttaaatactccaaatccagccaattatatgcagtcagacccaaatcactattgtataaaatgcggggtatgtaaataa

SEQ ID NO: 313973 - DNA, 141 bp, Proteus mirabilis; identical to SEQ ID NO: 309811

SEQ ID NO: 313974 - DNA, 2967 bp, Proteus mirabilis
atgaatacattctttttcagtaaaactccgaaggtcactatcttcgacaacctcggccagaccgtacgcgatatcgcttactaccgtcatcccagctccccggatgtgaccaaacgcatcacccgacatcagtatgacgtccgtggctttttgacgcagagcgccgatccgaggttgcacgatgcagggcaagcaaacttcaattacctgaccgatctgactggcaacgttttacgtacacagagtgtggacaatggcaccactattacgctgaacgatgctgctggccggccgtttatgacagtcagcaacatcagtaccttcgatgatggtatagaggacaaaagtcaggcgctgacccgtatctggcagtatgaagactcagatctagctggccgtctgctaagtattactgaacaggtgaaaggtgaacccgcccgcatcacggagcgtttcgtgtacgcgggtaactctgctaaggaaaaggcgctgaaccttgctggtcagcctgtcagccactacgataccgcaggtctaacgcagaccaacagcgtggcactgactggcgtgccactttccttcacccgccacctgctgaaagatgcagataatcctgatattgtggccgactggcgcggagaaagtacctcctcttggaacaaccagctggacggtgagacatacactaccctgaccacagcagataccactggcgcgatactgaccaccacagatgccaaaggtaacctgcagcggatatcgtacgacgtggcgggctatctgtcgggtagctggctgaccttaaaaggcggaaaagagcagactattgtcgcattcctaacgtactcagccgcggggaagaagttgcgagaagaacacggtaacggtgtggtcaccacgtactcgtatgagccagagacgcaacgcctgaccagcattaaaacagagcgtcctgctgggcataagtcagggcagaagatactgcagtacctgcgctatgagtatgacccagtaggtaatatcttgaaaatcagtaacgatgctgaagagactcgcttctggcgtaaccagaaagtggtgccggtgaatacctatacctatgacagcctgtatcagctagtcaacgccaccggtcgtgagatggcaaatacaaaaccgcagagtagtagctcaccatccaccacggttccccttcctacagacagcacaacgtttacaaactatacccgcaactatacctatgatgaaggcggtaacttgacacaaatccgccacagcacaccagccactggcaaaagttacactacagaaatcaccatctcagataaaagtaaccgaggtgtactaagcacgctgacaaaaaatccctcagacgtagacgcgcttttcacggcaggaggacagcagaaaatactgcagccagggcaaactctagtttggacgcctcgcaacgagatgctgaaggtgacaccggtggtacgtaacggagctaccggagaccaggaaagctaccgctacgatgggggcagtcagcgacttctaaaggtcggtgtacagaaagctggtaacagtatacagacacagcgtacgctatatctgacaggggtggaactgcgtagcacaaaaatcaacgagacaaaaatggaaagcttacaggtgattaccgtaggtgaagcgggtcgttcacaagtgaaggtactacattgggaggttggaaaaccggacgttatcagcaacaatgatcagctacgctacagctatgacaacctgataggtagcagccaaatggaactggacgatagtgggaatgtcatcagcatggaggagtattatccgtacggggggacggctgtatgggcagcccgcaacgcggtggaggcgaactataagacagttcgttactctggtaaggagcgtgacacgacagggctgtattactacgggtaccggtactatcagccatggtcgggaagatggctctccgcagatctcgagggcccagtagacgggctgaatctgttcaggatggtccggaataatccagtcaagctcattgactacaacgggttgatcagtagtggttcggaagcccgagaattagtgggaaaaaaatttattcttcctctacatatgcctgtctttgaacaaatttctagagatcaaaatattgcaatgagcgtaagggaagctggcgattttactattaaagctctgggggaaggtgccgccgcaaaaggccataatattcttgagaagaccataaaacctagttcactaaaggctgcttataaagataacgctaatttggcttttgaacaggcaaaaaatagcggttttattggccgagtaggccagtggggtatatccggtgtacagggaatttatgcacacaacaaaccgagtggtgaagatttttcttatcccgtcagcctacaagatacttctgctaatgaacttgttaatacatggataaattttaaaataatcacgccctataccggtgattatgacatgcacgatattattaaattctcttctgaagggatagggcatgtacccattgcggaaagtgatgaggaaaaaggtgtaaaagacctaataaataaaaatattgcaatggtagaccctttaagaccctttgagtctacagcgatgaatgttattcgccatggtcctcaggtaaactttgttccttatatgtggaaatatgagaatgataaagtcgtaaaggataagggatatctgggcgcggttgcccgtccgggtccattccctgttgcaatggtacataaaggccaatggactatttatgataacaaagaagagttatttagtttctataaaactacaaatactcctcttcctgaacactggtcccaagattttattgatgttgataaaaataaagggatagttataacccctagacacgctgaattactggctcaacggaaaaccaagcattga

SEQ ID NO: 313975 - DNA, 4287 bp, Proteus mirabilis
atgcaaaattcgaatacggaacaaccacatctgatgcccccttccctaccctcaggagggggaacaataagtggtctaaaaggcgacattgctgcgtcaggccctgatggggcagctacaataagaattccgataccaatcagtactggaagggggtatgcaccctcactagtgttaagttatcacagtcggagtggtaacggtatcttcggtatggggtggggactgaacctccctactattcgtctgcggacaaacaagggcataccatcctatgagggtacagatgaatataccggtccggatggcgaaatactggtacctgtactgacagataagggaataccggaaatccgtttggacacaaaattgcttggcacagaattaggtgggagttttaccgtgagcgtttatcgctctagaactgaaaccacttttagccgaatggaactctggacgcctaaaaaagatacggatactgacttctgggtgatatatgaatcagatggacaagttcatttgcttggccgtaacaagcaagcacgtataagtaaccctactaatgcatcacaaaccgctatttggttgcatgaatcatcagtatcgccaaacggcgaacagatttactggcagtaccgtgctgaagatgaaattgactgtgatgcgacagaaaaatcggcacattcgatagcaacagcacagcgttaccctgtagcagcttggtatggtaacagaaaggctggccgtacgttacccggccttgttggtgtgcctacagctacagactggctattcatcgcggtgatggattatgcggaacgtggtacagaatcaaccattgcaccagtctggctggcgcctgatagcggtcgctggtcctgccgtcgagattgtttttccagttatgagtatggatttgaggttcgtactcgtcgcctttgccgacaggtattaatgtttcattgtatcgccaccttatctggagaaaaaaaagacaataaagatccggagctagtatcacgctttctaatagattatgacgaaagttcgtctgtcaccacactcaaaaatgtacaacagatggcgtatgagcctgatggtactgtacgctgtctaccgccattaacctttggttggcaacagttcacaccaccaatatctagttcaatgacatggcaattacgggaggatatgggacagctaaaccgacaacaaccttatcagatagtagacctgaacggtgagggtattgcaggtatcctataccaggacgaagggatgtggtggtaccgcgcgccaatgcgacaggctggtgaggatatagatgcggtaacctgggaaaaagcgaaggctctgccgttaattccagctctacgtgacggaggtgttctgatcgatctaaacggcgatggctatctggagtgggtagttaccgcacctgctatagcgggtcattatgcccggacacctgagaaagagtggcaacattttactccactttccgccttgccagtggaatatgctcattcccactcattgctaaccgatatcactggtgctgggctggtggacttggtacttatcggaccgaaaagcgtgcgattttatggcggcaatggtgagggatggacaaaagcacagaatgtgatgcaagctgcaggaattacgctgcccgtacctagtataaacgcacaggttctcgttgctttcagtgatatggccggtagtggtcaacagcatttggtagaggtacaagcaggcggtgtacgttactggcccaatttgggacatggacgttttggtacgcctgtgagtatggcaggtttcagtaagccatcggttacgtttaaccctgaacagttgtatctggcagatattgacggtaccggcactaccgatctgatttatgtgttgagagaccggatagagatttatctcaaccaaagtggtaatcgctttgcgacgccattcagcttggttttgccagacggtgtaacctatgataacaactgtagtctgcaggtcgcggatattcaagggttgggtgtgaccagtctgatactcaccgtgtcgcacccaataccgcgtagctgggtttgttatctatcagaaaataaaccgtggttgctgaataagatgaacaacagcatgggaacaaaccataatttgtattatcgcagttcagcacagttctggttagatgaaaaagcggaagccgtggcaacaggaaatattgttccaacctgttacctgccatttgcgctacatactttgcaacgaacagaggtgatagatgagatcacaggtaaccagctgagtaattcgatacgttaccgacacggcgtttgggacgggcaggaacgtgagtttcgaggatttagttttgttgaagtgagtgataccgataccatggcgagtcgaggaacatcagaggtcataagctctccctccatccgccgtagctggtacgcctctgggatatctgctattgatgcccttttgccgaatgaattttggaaaggagataatgctgcctttacgcattttacctctcgttttacgatcggtaacggcgataaagaacagacttatgtgccaaatcacactacggaattctggctgagtcggggaatgaaaggtactttgctacgtagcgagctgtatggcttagatggagatcaagccagtgcgccttataccgtcacagagaaccgtccgcaggtgagactggttgagaaagctggaacgtatccagttgtttggggaaccgttgcggaaagtagaacctactcctacgaacgggtcagtaatgaccctcagtgcagtcagcaagtactgctatccagcgatgagtacggccaaccattgaaacaggtcactatcaactatccacgccgtagtcaaccgatgcgtagtccttatcctgaggctctaccggaaggattatttgccgccagctttgatgatcagcaacagcatctgcgcctaacgcttcaacaagctagtttccataatctgatgaatacagcgaataatatctggataatagggattgtagattgtacccgtagcgatattttcattagtaaagtagtcccacatggtgggttgacattagagtgttttctgaacagtaatagccctattggggctgggaaacaatatacttttatcagtcagcaaaaaatttggtatcaggatattcaaggcaaagagacggatggaactcctgccttcccaccccggttagccttcactgaaaccgcagtactaaatgatgagatgataattcctttatcggactctctcaacctcagcaaggattcactaagtaatacggggggttattacacctcaatatattttttcccaagagatggcgaaaaaaatcaaaatctgttgtcggtacgtcaaggatacagtacttacgcctccgcagagcatttttatctgccagtagcgtttcgcaatacgttgctgaccggtgctatgaccgttatccgagatactcatgattgcgtgatcatgcaaatgaaagatgcggctggactgactaccattgcagagtatgactggcggtttttaacgccagtcagaataaccgatgtgaacgataatgtgcagactgtcactatggacgcgctggggcgggttacatcacagcgcttcagcggtacggaaaacggagtgatagcgggatacagcagtaccaaaatggatattcctgaaaacactaaagatgcactggcgcttgtcgcacctcttccggtagctcagtgcatagtgtatgtaaccgacagctggatgcgccaaggtgcggaaaaattgccaccgcatgtagtgacactgagcactgatcgctacgataacgacaacaaacagcaaatccgacaacaggtaacgttcagtgatggttttggccggctactacagactgcggtccgtcaagagagcggggaagcttggcaacttgcggaaaacggttctctggtcacgggtacggacggtgctccagctgctgcgagaacaactttccgctgggtagtgtctggacgaacagaatatgacaataagggacaggctgtgcgcacgtaccagccttattttttggataattggaaatatgtgcgcgatgacagtgcacgcaaagatctgtatgccgatacccattattacgacccagttgggcgtgaatggcaggtgaaaacgtcaaaaggttggttgcgtcagaggctgtttacgccgtggtttgtggtctatgaagatgaaaacaacacgcagaagtag

SEQ ID NO: 313976 - DNA, 7239 bp, Proteus mirabilis
atggaccaagttaatcaaatactctctaagttaaatgagtatactggtgagggaatggatctttcggatattatgcttttatcattccgtaaattgaaagagctggcaagagatatactgacatgggaagagataacttttctgcatcagttggctagtaaagagctgcaggaaaataaactggctgagtcacgtattctcagtcgagccaatccccagttggcgaacgccatccgattaggcatctatcaatcacccatgcaacctagctatgacgacttattcccacaacgtgccaataattttgtgggcgcgggctccgtggcatcgatgttttcaccagctgcatatttgactgaattgtatcgagaggccctaaatctacacaaagactcgtcaccctattatctgggtacacgccgcccagacctagctaccctttctctgtctcaaaataatatggatgatgagctgtctacattgtctttatccaatgaattgatattgaagaatatccagtcgaaagaaggtaaggactacgatggcgtgatagaacagcttgctacgtacaggttcagtggtgataccccatataatcaaccctatgaggcgatcagtcagtccattacgttacaagatccagagcttaatacgttccgtaataatcccgcagtagcctcgcaaataaaggattttatctcactatcaggttgtgtttctgctataaaccctgagttatataaaattttgactgaggatatcgagtataataaaaatactctaacaacagattctctaataaaagccaattttggcgatactcctatcgaaatattccaaaattgtgcgtatctcgcgcaatggtatgggttatcttataatgaattaggtgaaataattaatcagctaatgagttatgataattacgcactggacatattaggtgcacaatattatcacggaaattacttaagttactttatggaatttgaaggttatctaaagcctttgttgatgaaacgtagtatatctaacaacaattccttactttataccgaattgctccctttatcaaaagataagtatcacttccagtttgctattaatccattaatacagatgtcatcagtcaatactaaagataacgatcagcgtgttattattacagccgtggattcaaactccaattatttaattaaccaagaggaaaaggttgattttaataagatgtatgggtttgatctggaaatagaaccttcatctctgtcaaagattaaatttaaggttagtgtatccgattcaaatgaaccgactggttttcaacacactgatgcgagttttttattaacttctgttgattttgattatactttattgaagctaaacaaatttattcgtctctataaagcaacggggatgaatatatccgatattctcaatattattagcagtattcattataaacaagaaattggaaagactgagcttgatcgtctgcttttggctaaatactatatgaagtgttacggagtagatgcttccgaagcagtgatcctgtcaggtgcccatattggccagatagatcgcgacaaccaagttagtatttttacccgtttatttaatatgcccttgttagacaatagagaattttttgctgatggtgaagaaatagcgctaaaacccgagaatatcactgatacgtttcgtactagtgttataaaacgggcttttggtgtcaatgatacggaactttacacgctttggttactggttaataaaagtaatacatcgaaagattttacctgcacgattgataatctgtctaaattgtaccgtgtcaaattgttggcagatgtaaacggtctaaccataacagaattagccgcactcatatctgtttcaccttatgcttcaatccctgttggtactatggataataaagtactatttacattcgtaaactttattaaccaacatacaaagtggttgaaaaagataaactgggcagtcggcgacctgtatctaatgttgacaacccaattcagtactgtgctgtctccggatattgaaaacttagttgacacattaaaaaatagtctagccaatcaggatattaatcctactgttgaggcagagttgataacagcaatggctccatttattgccgcaggaactcagctggactcagtagagaaagccgaagctatccttaagtggttggcacagttgaaaccacaagggctcacagtagcgagtttcttggccctcgttaacaacgacaagcggacagaaaacgagacagccaacatggtggcctactgtcaagtgatggggcaactctcattgattgtacgttatagtagacttagtgccagcgaagtggcatggggagttacgcacccttctattttcgtcaaaaatgcaaccaagctggatcacaatatctccacagtgtatgacctgacacaactacactcaatgcttacccgctgcgggacatatgcctctgaaattctaacctcactaagtggtaaggctgagtctaaaaataatctaacgataaaaacagttgcaacagcactggagcttgatgaattggcgctagcccaagcgctagaacaaagtaacccgacagaaaataaatatttctataattggataaatctaagcgatgctctgcagtggctgaacgttgctactacctttggcatcacaccagcagacgtagcgaagctgataaaactcactaatatctcttcgtatactgactgggttaacgttagccacgctctgcggtcagggctggatacggagcagaccgctcaattgagcgctaagctggacgaaaatctcagtgtagctactggtgggtactttatcaaaaatattgccccaccatgggtgacaaaccgtgagaaaatttacagttggttactgattgacaatcaggtttctgcgcagataaaaaccacacggattgcggaggctatcgccagtgtgcaattgtacgtaaaccgtgcgttagccggtctggaagacgatgtggttacagatgtgaaggcgaaaagattttttaccagcgactgggatacctacaataagcgttacagtacgtgggctggtgtatcacagcttgtgtattacccggaaaactatattaatccaacccaacgcatcgggcaaaccagcatgatgaatgagatgttgcagtcactcagccagagtcaactgacgagtgatacggtagaagatgcttttaaaacctatatgacccgttttgaagaaattgctaatcttgatgttatcagcggttatcatgacagtgtcaccctcaatggagggactacttatattatcggaagatctgccattggtgattattactggcgttcagccgatattgataaattatccaatggtaagcttccggctaacgcctggagtgaatggaaaaaaatcattgcaggtatatctccagtagaaaatctgatacgcccggtcatcttccagtcaaggttgtatattgtctgggttgagaacaacgatgtgggtgagttcaaagaagatagtagtatcgataagtctgtccggtacgagttaagatatgcgcatattctacatgatggtacctggagcgctcctatatccgtagcacttaataaattgctgcctgtaaaaaaggatatcaacattgcgattacgggtatgtattgtgcgagggatgtaagccgggatgaattatatatctacttctatgaaaagaaaaactataatactataccccaaaatgtcaaaggacttagcctggcctcggacggttcggttaactatattgatgcttccgcaacgataggttatgtctacaaacagtttgatacccttgataaaatcaatctgaattcactttatatcatcggaactgatacatacagcgtaattagctctgaaataattggcagatataagggggattttgattacacatatatcaatagcgatgtatatattacctccgtggaacaagttaaagacagtgttaaaattctttttaacgctagcggagccatctattatagaggcatggataaatacacaattgcccaatttcatatgataaatgctatctcgggtacagaagataagacgtattttataccaaacggggtaagaagaagtaccgttgcacaaaagagtagcagggatttttcatgtgtaatgttaagtcttaatgacaacgcaaatacagcccaaacctatgtaagagtgctagacaccatccctatggtatacaatgatagactttatacgttttacgataattctccagacatattaaacgaaagagccaaattaggaagtagctgtagactatattatgattataaaccaggaatatggaaacctgatatttcctttcaaacgttgactccaaaagattatatttatgcctttatgtcgccagataacttatgggattcacatgttgaattgagcttcagtgattttaaaaaaataaaaacagggatagataaatctaatattaaagttaccactgaaggagagaacggggtcttcgcagattcagttaaaaatcaaaatttttattcttcattgttttattttgaaaaaaaagaatggactatccccgtatctagacttcagcatagtacacaaaatcaatatgatctttatatcagcatagatggtgtcccccataaagatgatgtccgaaaaagcttaggcaaagatatatttcgagtaaaactctttaagcagacagaagacaacattccattaattccactctcaaaaactattcaaggtgcacagtatcttcagtacggcaatgatcgcattagagtaaatactctattcgccaaacagttagttgcacgtgctaatttaggacttaatgccatactgtcgatggagactcaacagttacctgagccgtctattaaaaatgaaaatgggcagtatgacacagaattcatggattttaatggtgccaatgcgatttacttctgggagatgttctactacgtcccaatgatggtctttaaacgtctaatggacgaaaataaatttactgaagctacacggtggattaagttcatatggtccccggatggctatctactagatggagagccagcgccttatacatggaacgtacgcccgttagaagaggataccagttggaatgatgacccactggattcggtcgatcccgatgctgtggcacaagcagatcctatgcactataaggtcgctacctttatggcttggcttgacctattaattgctcgtggtgatgcggcctatcgtcagcttgagcgtgacacacttaatgaagctaaaatgtggtatatccaagctttagacattcttggtgatgagccctatataattcaggattcggattggaataacccaaatctgagggatatggccaataaaagcactcagaaagacatccagcaagcattgatgatggtacgtgaacggactggctctcatgaattacgcactgctaattcattgacaggcctatttttacctcagcgaaatgagaagctggcagcttactggcagacgttggctcagcgtctttataatctgcgccataatttatctattgatggtacgccactatcactgtctatttatgctccatccgcagatccagccgcattactcagtgcagcagtcaatgcatattcaggcggtctgagcctcccaccaaccgtgatgcctttatatcgttttcctataatactggaaagcgctcgtagcatggtgagccaattgtgtcagtttggtaatactcttcttagtattactgagcgtcaagacgctgaagcaatgtcggagctacttcaaaaacaaggcactgaactgatattacagagtattgctttgcaggatagcgccatcagtgaaattaatgcagaaaaaatggtgctcgaagagagcctaaatggggcacaatcacggcttaacagctacactaccttatacaatgaaaacattaatcttggcgaaaaaagtgcaatggatctggcactcagttcctctgtactatcaaatacggcaactacctcttataccgttgctgctgggcttgatataatgcctaatatttacggatttgcctttggaggttcccagtatggtgccatacctcgcgcaattggctatggtattgaaattgtagcaggagcgacccgtacagcatcagaaaatattggtcagttagaaacatatcgtcgtcgtcgccaagattgggaaatccaacgtaatgccactcaatctgaaatagatcaaattaatgcacagctagtggcattggatacacgtcttgaaggtgctcaattacagaagatttatttagagactcaacaatcccaaacacaagctcagatgatattcctgcagaataagttcaccaatacagctttgtataactggttacgcggtaaactgtctgccatctactatcaattctacgatctgacagtttcgcgttgccttatggctcaggaagcctacaaatgggcatcagggatagaatcagcctcctttatccgtcctggagcatggcaaggaacgtatgctggcttgatggcaggcgaaactttgatgctcaacttaacacagatggagcaaaactggttacaaaaagatcagcgagagaaagaggtgatgcgtaccgtttgcttatcggaggtttatgcgaatctctctataaaaccctttacgctagcagacgaaatagtcacgctagtgacagcaggcaaagggagtgtcggtccagtcggtaacggtctctccgtgacggatgacaagcagttacaggccacgctgacactttcaggtttgaaaattagtaatgattatccatcttcattgggtaaaaatcgtcgtatcaagcaaatcagcgttaccttaccggcgctggtcggcccctatcaagatgtgagggcagtattgagctacggtgacccaagaggattagctaaaggatgtgactcattagcaatatctcacggtatgaacgacagcggtcagttccagctagactttaatgatggacgctggttaccgtttgaaggtattcctgtagatagttctggtgtgtttaccctgagttttcctcaggttgatagtcaccaaaaagagttgctactgagtctaacagatatcatcctacaaatccgctacaccattgccagctaa

SEQ ID NO: 313977 - DNA, 903 bp, Proteus mirabilis
atgaatgtaactgatggtaactctgcagatattagacaaagttggatggatgctggatggaaaagaggtgcatttatagaagtaaaaaaatttcctttactaataaaagagttaccatcaaagctacaagcgctgtgtgaaagcaatgagttagtatatcttattcctattttatatgattgcgctttgttagagttatcttttgataaagagccatgggctcaagctattttaggagtggggtgttctggtgatggtaattttaaatatggaaaaaacccacgtaagttacatttgcctataaaaatagatgaaaatgaaaattatctggagttttcttctttaggttttgttcagatagacagagagctactcctttatgaagcaattccttctagtgaaataaattgggttaacaattcaaaagagttgcttttggattgggttgcagatcgttatcgacaagcaacgttccccgattcttttaataaaagaatttttagtaaagataagctattaaaaaggttatggcgtacagataattttattcattactgctctggcgtatatataaaattggacaaagatgaggaaattgaagctatagaaataccatattctgtggagcttctcataaccataccagataattgttcaataagaaaattaagagagggtgggattatagaaaaaatgcacattgacttaggaagtataatttcttcagccaaaggcattaaaattctacatatacattttattgaagaaagtgagtttacaaaaaaattagaaagaaaattcaaaaaattctcacttgaatattatagtcatgtggccgaagacgaagacatggttgttccagctgaaagattagttagcaaagtaaagcgtattactttttaa

SEQ ID NO: 313978 - DNA, 645 bp, Proteus mirabilis
atgacttaccaatgcaatgattttgttattgtaaacaaaaaaacaacaagcctcagaccaaaatctacatatatgaggggagataatcattgttttagtaaaacaacaggtattggttttattaccgcactatttttaagtagtattcttgcgttctcttcagtatctatatgggataatactgaaaaagcattagataagaaaaataaagtagtaattaattttaatggtactgattttgctgtaaatccaaatttattaattaatgaatcgtcacacatagactcgcttacgccagctattttaagtgaaaacttgagaaatactttaggattgaataaaagtcattgggctagaattttaggtgttgaaagaaaaaccttatataactggaaaagtaaccctaatgtgaatatacaagaaagtattttgactagattaaatgtattagattcattttctaaacattttcgcccagagcataacaagttttttgggaaaattcttttaggaagtttaaataataaagaattattaaccgtgtttaccaaaacgaacctagatatagatgagttattagatgcctatgatagcgtttatgctcaattagatggcctcgttgttagagctgatttgaatagttaa

SEQ ID NO: 313979 - DNA, 780 bp, Proteus mirabilis
atgaaccagtatggtttagtttatgttctaatgaaaatagaatttgatagaatatctacaactgatttttatcaaaaatttgatacttttagtagctttttaaagaaaagctaccctatttcgccaccgataaatcaaatcaaagcgtttaaggtggatatgaaaaattttagggaggaacagccagaagtaactcagtttgagataccaatgatgacttttttatccccagaaaaagatttcggtataagagtagctcctgatttcctaattgttcatacgaagaagtatcagggttttaacgatattagagagcgagtaaattctatattaaaagctttaatagatacttatgatatttcttattactcattcttaggtcttagatatgtaaataaatttgagtatagtgaaacttcagaatttaataatttgataaaacgaacagatttcttacagcctaaattgtgtgattggggaagagctggtagcaatatgacatcaagttatttagatttaacgaatgacataacattagctttaaatacaggtgtgatgattaacgctccggttgtttcacctgatttaatagaaatagcctctgattttattgagccaactaaaaggctggatggtccaattgctcatattgatatagatactagtttttcaacagatgatggttctatgaagccactaagtgtagatgaaattatatctaatttaagtatgttgagagatgctgcaaataaagcatataaaaatataatagtgtcataa

SEQ ID NO: 313980 - DNA, 282 bp, Proteus mirabilis
atgcttccaactcattatgagtttactgccgccatatctgcttgttcaaaagagttagtgagagaattatttggatatgcgaaaaataataattcaaaggaaagtttttactgcaagaagtgtgtttcagtgatggagaaaagatggaactttgatgataaacacctagatggggctctgaaaacagtacagtaccacctaggtaaaaaaatgtatatttgcgcattctgtttagaggaacagaaaaccaagccgcgtggaatgtgggaagaagatgattaa

SEQ ID NO: 313981 - DNA, 630 bp, Proteus mirabilis
atgatcctcattcatcacttaaacgattcgcgctcacagcgtattctctggttgctcgaagagctaggccttgagtacgacattaaacgctatgagcgtgattcggttacacatttggcgccaccagagctgttgcacattcacccattaggtaagtcgccggtcattgaagacggcaatttcatcatccatgaatccggggcaattattgattatctcatcagaaaatatgctggagacctcctgcaccctactcctgaaagccaggcgtatgagcaatatgtgcaatggcttcactacgctgagggatcagcaatgcttcctctgctgttgaaggtttatgttgatcctctgggagatggaggtgcagctctgcagccgcgtataaacagcgaactagataatcatttgggttttgttgaagcttcgttggagggtaaaacctttctgctagatgaactgttcagtgccgcagatatccagatgagctttgttggggagattgcaggctcatttggtctattacaccaacgccccaacctgacagcttggatcaaacggctccaagcccgccccgcataccaatctgccttaaccagaggtggtacctaccgttttgtagtggtttaa

SEQ ID NO: 313982 - DNA, 603 bp, Proteus mirabilis
atgaaatcaaaagttaatgttcacgatgtacgtagtcatatcttggaaaccggccagtgtattatcagtggtaaagggtttagtgctgtcggattgagcgaaattctgaagaccgctggtgtgcctaaagggtccttttatcattattttggatccaaagaagcctttggtgaggaattactaaagagctatttttccgactatcaaacgtctctggagacattgctctcgcgatcaaatttgtctggagcagaacgattgatgagttactgggaagtctggctggaaactcagtcggcctgcgacccgaaaggcaagtgtctggcagtcaaacttgcagccgaagttagcgatttatccgaaaccatgcgtattgtgttgcagcaaggaacggatcgagttatcgcaagactagctcgagcggttgaagacggcattgctgatggctcgttatctgctcatctggatgcgaaaacgacagcgtcaactctctatcaattatggttgggtgcgagcttgcttgcgaaaatcacacgcagccgtgagcccttggaatcagcgtttgaggcaacaaaaagtttgctggggttgaaaaagaattaa

SEQ ID NO: 313983 - DNA, 1014 bp, Proteus mirabilis
atgaaagcagttgttctgcgagctccaggtgggttgaatcgattagaactgagagatctgcccgatcctggccaacctggactgggacagatacgtgtggcaatacatgcaacttccctcaatttccacgacttattggttgctaatggcagtatcccaactgctgatgggcgagttctaatgtctgacggtgcgggagtggtcgaggctgttggcgaaggtgtgaccgagttcgctgttggcgaaagtgttgtgtctgtttttttcccccaatggcaggacggtcaggcatttgatgacgtaggcaatttttggagaacgccaggtgatggaatagacggttacgcaactgagtatgtggtgcggccagcacactattttacccatgctcctatgtgctggaggcattccgaaggagcaacgatcaccacggctggcctgacggcgtggcgagcattagtggttgagggtggaatcaaggccggtgatagtgtgttgttgctcggcaccgggggagtatctattgcagccttacagattgctagagtcatgggcgcaagagttattgtaacctcttcttctgacaagaaacttgaacgggctcgggcccttggtgcaaccgatgttattaactatcggacaagtccgaattggggagccgaggtgctcgcattaaccaaagggcgaggtgttgatcatgttgttgaggttggtgggcctggaacgcttggacagtcattgcaggctgttcgcgtcggcggaaatgtagcattgattggcgtattgacaggacgcggtggcgaggtgcccacttcgttgttgatggcgaagcaggcgcgcttacaaggattggtggttggcagtcgccgccagcagcaggaatacgttgcagcattggaacagaataatcttcgccccgtgatcgactgcagctaccctttggaacgtttatcagacgcgttcaaactccaggaaagcggtagtcactttggcaaaattgttgttgagtggtaa

SEQ ID NO: 313984 - DNA, 165 bp, Proteus mirabilis
atgttggctgatttcccaccctgctctaaagtcaccggtatcagcttttcagctgaggccttagctacaacgatagccaacagttatagccccggtaaaggccaacttatccccccggatgggcaagcagtgcttgcccatccgggccgtagccagttacgataa

SEQ ID NO: 313985 - DNA, 1167 bp, Proteus mirabilis
atgaatgtaaaccctctttttgagccctttcgtctgggttcgcttgaactgaaaaatcgtattgttctgccgcctctcacgcgttcaagaagcactcagccaggaaatattccgaacgatctgatggctgactactatgcgcagcgggcttctgctggcttcatggtcacagaaggcacgcagatagagcccagaggtcaggggtacgcttggacgccgggtatttttacagcggcacaaattgagggttggaaaaaagtaaccggtgctgttcatcgtgaaggcggcaaaatcttttgtcagctgtggcatgtagggcgagtttctcataattctcttcagccggacggacaggctccggtagcaccctcagccattcgtgcagaaggtgtgaaagtgttcgtagaaacagcaccaggggagggcgcactggctgatccagatgagccccgcgcactttcaaccgaggaaattcaagagcttgtgaagctatatgctcgcgctgctcgtaacgccgtggaagccggctttgatggcgtagaaatccacagcgcgaatggctatctggttaaccagttcatctcagagcatactaatcatcggacggatcaatacggcggaagtttgcggaaccgcctgcgcttcctggaagagattgtggccgcaatttcagaagaagtgggggctgagcgcttgggagtgaggtttgctcccttattcgagagcacggaagaggcacgtgtttatctgggattggttgaaacagaccctcacgaaacctacctagaagcggcaaaattgttagagcgcatgggtattgcctatatttctatcgctgaagccgactgggacaatgcaccagaattgcctgacagcttctgcagtgcgctccgaggtgcttttagtggcgctctgatttatgcaggccgatacactccggagaaagcgcttcgtatgcttgatgctggatacggcgacctgttcgctttcggtaagccgtttattgcaaacccggatttaccgtatcgaatacggcaagggctgccttggaacgaggttgatcccacaacaatgtacggtggaactgacaagggatatgtcgactaccccacctacgattcgcaggctgcctcggcgcccagaatacctgagaaggtgtcggactaa

SEQ ID NO: 313986 - DNA, 1392 bp, Proteus mirabilis
atggcttatgaaacacgaaacccttacaccggcgaactcttggaagcgtacccggacgcgaccgatactgaagttaatcaagctattgaaaatgctcatgcggcatttttattgtggaaggaaactgagtttgcagaacgtgcctgtgtaatgcactccgccgcaaccatattacgtcgtgacgtcgatttttttgccaagttgttgacagttgaaatgggcaagcttgtctccgaagctaaagccgaaatcgccttgtcagcggatatctttgactattatgctaacaatgcagaagccttactggcgcctgaaaagctgccagtagccgatcccgatgaaggtgatgctgttctgtccgcagagcctttgggggtcttgttggcaattgaaccgtggaactttccgttttaccaagtggctcgtattgcagcgccacaattgtctgctggcaataccatgttgctcaagcatgcctcgaatgttccacaggcagctgcagcattcgaaaaattaatgttggaggcgggtttgccccaaggggcgttcaaaaacctttatgcgacacgttcgcaaatcgaaaccatcattaacgatccacgtgtccatggcgttgcgctaaccggatcggaaggtgcgggctcgattgttgcctcgcaggcaggcaaagcactgaagaaatccacgctcgaacttggaggcgcagacgcgtttgtggtgttggccgatgcggaaatggagaagaccattaattgggcggtctttggacggcactggaatggcggtcaagtctgtgtctcttctaagcgcatgatcgtcgttgatgacgtatatgaccaattttttgaaggttacaccgccggcgttgcgaagcttcgggcaggtgatccggcggatcctaccacgacgttagcgcccctgtcttccgaggctgctgcaaacgagattaaagacaagatacgccaagcagttttttacggagctacggcaacggaagttgggccaaaggttcccagttcgggtgcttttgtacaaccgactattctgactaatctttcagaagataatccggctcgatattgggaattcttcggcccagtctcgatgctgtttcgtgcgaaggatgaggtagatgcaatacgcattgccaatgattcgccgttcgggcttggcgggtctgtatttactgccgacccaaagcgtggtgctgatgttgcgaaacagatttctactgggatggtctttgtaaatcacccgaccatggccaaggctgacttacctttcggtggtatcgggcggtctggctacggccgagaactgatcgggctcggaatcagggaatttgtcaaccacaagctcatttcggtggttgatattgacgcgccattttag

SEQ ID NO: 313987 - DNA, 417 bp, Proteus mirabilis
atgaagattttctacaaaactgcggcaacggcaacgggcggacgctcaggaacttcaaccctgaacgacggtagcttttcggtccaaatggttcgacccgatagcgatgaagatggtgtaaaccctgaacaattgtttgcacttggttatgccgcttgttttgacagcgcgatggagatcaccgcaaagcaactcaagctgaatgccaagggggcaaaaacttcgattgaagtgggtatcggccaacgatccggtggtggatacgggcttgacctcgacatcacagctcacttgctaggaatggcccgcgaggacgcacagcgactggttgaggcgacacatcaactttgtccttactccaatgccatccgcgggaatattgatgtccgtttacatattgaaactgaaggaaactga

SEQ ID NO: 313988 - DNA, 1158 bp, Proteus mirabilis
atgaaaaatttcaacttttacaaccctaccagaattttatttggcaaaggcagcattgcggagctgaaagatcaggttcccgctgatgcgaaagttttgattctatatggcggtggcagtgccgaacgtacgggtgtgctggaccaagtacgcgaagctcttgctggccgagcaatcctggagtttggaggtattgaacctaacccacgctatgctacaacgctaaaagcagttgagatgattcgcgaaaatgccgttactttcttgcttgccgttggcggcgggtcggtcatcgacgccaccaagtttattgcggcggcggtaaagtatgacggtgacgcctgggacattcttacctcacgtggatcagtcattacccaagcggtgccgtttggctctgtgttgacgctaccagctacgggatccgagatgaactctggcggggtgattaccaacccagaaaaagaggcaaaactgccgtttagcagcgttcattgctacccggtgttctcggtgttagatccagaggtgacctataccttgccaccgcgtcagattgccaacggtgtagtggacgccttcgttcatacgaccgagcagtatctgacctatccagttgccgcgccagttcaggacggttttgctgaaacccttctgcgcacattgatcgagcttggccccaaggcgcttgagactcccgaagattacgacattcgatccaatttgatgtggaccgcgacaatggctttgaacgggcttatcggtgcaggtgtacctcaagattgggccactcatatgatcgggcacgagattactgcactgaatgataccgatcacgcccgtaccttagcggttgttctgcctgcattgttgaatgatcaacgtgaggttaagcgcgagaagcttcttcagtatgccagcaatgtctggaatattcgcgaaggctctaacgatgaacgaattgacgctgtgatcgaagcgacgcgtggtttcttcgaacagatgggcatcaagacccggttaggtgactacgacgttgatgcggacggaatcaatcacatcgtcaacgctttaaaggaacacgggatgacttcacttggggaacataaagctattggccccgatgatgctcgccgcattcttgaagctgctttgtag

SEQ ID NO: 313989 - DNA, 1035 bp, Proteus mirabilis
atgaaacaaacagacactgtaaaccgcaaggtcgtattggcggaacgtccaaaaggcgagccgaccgtggacactctacggttagaagaggaggcgattcctgttgtcggtgagaatcagatgcttttgcggactgagtacttgtcactcgacccgtatatgcgtggcagaatgagtgatgcgccttcttatgctgcaccggttgaggtgggtaatgtgatggttggcggcacggttgccaaagtggttacttcgaagcttgatggcttcgcggagggcgactgggtgcttagcttcaatggttggcaggattacgctctttccgatggtgaaggggttaccaatcttggtaattcgccagagcacccatcctgggcacttggaatcttaggcatgcctgggtttaccgcctgggctggcctgacccaaatcggcgagcccaaacccggcgagacgattgtggtggccgcggcgacggggccggtcggtgcaaccgtaggtcaaattggcaaactgctgggctgccgtgttgtgggtgtcgccggtggtccagacaagtgcgcttacgcggtcgacgaactgggcttcgacgcatgcattgatcacaaagcagaagacttcgcagatcaacttgttaaggctaaccccgacggtatcgatgtctattttgaaaatgtgggcggtaaggttcttgatgcggtgatcccacttttgaatccgcatgcgcgtgtgcccgtgtgtggactggtctcgcaatataatgcaactgaactgcctggcggaccagaccgaatgaactggttgatgggacagattctgcggaacaaggtcaaggtgcagggattcatcatctttgacagtttcggtcacctatacccggatttcgccgaacaaatgggggcttgggtggaaagcgggaagatcaaatatcgtgaagagattatcgatggcctgcaaaatgcgccggaagcgttcattggtttactcaatggtgaaaactttggcaagcgggtgatccgggttggccgaaattaa

SEQ ID NO: 313990 - DNA, 597 bp, Proteus mirabilis
atgaaaattcttgtcgctggagctaccggaaaaaccgggcgtcgcttgattggtgagcttaaatctcgtggccattatcctattgcgttggttcgtgaaagttccgatacgtccacactgtcttctgatgttgagctacgctatggcgatttgaccgacttgcaagaggatgtctgtgagggttgtgacgttgtcatctttgcagcaggttccggtagccacacggggggcgatatgaccgacaaggtagatcgcgatggggcgcagcgtctcgttgatatagcagtgaaatcaaaggtattgcgtttcgttatgttgagtagtgtgggcgcggacaaacccgaccctgaacataagctcgcacattaccttcaggccaaacattacgctgacgaacacttgatagcttctggtctgagctatgccatcgttcgtccagttagactgaccgatgaaagcgggaccaggaacatgcgttttggcgattcagttgatgttggtggaatcgctgcgagaggcgatgtcgccgcagttttggccgaggcggtagatgatgaaaagtgggataacaaagcgttaaccatgcagtcaatttaa

SEQ ID NO: 313991 - DNA, 678 bp, Proteus mirabilis
atgaaaattttaatggtactgacatcgcacgatgagatgggcgatagcggcaggaagactggcttttggctggaggagtttgttgcgccctattatgtctttaaggatgccggagcggatattactctggcctcgcctaagggggggcaaccacccattgatccgtccagcgatagtctggaagcgcaaactgacgacactcgtcgtttcaagggcgatactgagacgcaaaagcatcttgcgacaacggtgaaactatccgagataacagcagacaggttcgatgcaatcttctatcccggtggtcatggccctttgtgggacctagccgaggatgcagacagcaaacgcctgatcgaagcctttgctgctgctggcttgcctgttggggctgtctgccacgctcccgccgtattccgccacactcaaggcacaaacggcaagcccttggtctcagggcgacgtgtgacaggcttcaccaacaccgaagaagaggctgttggcctgaccaacgttgtgcccttcctggtcgaggatatgcttaaagttaatggtggcaattatgagaaaggcgccgattgggccagctttgttctgcgggacggcaagctcgtcaccggtcagaaccctgcctcatccgctgccgccgcgcacgagattctggcgttgctgaaataa

SEQ ID NO: 313992 - DNA, 1032 bp, Proteus mirabilis
atgaagattgagctaaccgttgaacagaaatgtgcccttgaagcacagcatcgtcagaatcgtgatcgtaggatatgcgacagaatacggtgcgtactcatttctgctgaagattggtctccccgtatgatcgctcaatcccagcgtattgatgaaaccacggttcgaggtcatctcaatgactggcttcatgatgagaagctgcaatccgaaaatggcggctcacagagtcatctcagtgaagcacagacctcggagcttgtcgcctacctgacagtgaatcttctgcccacgacacaggctatcatcgctctggttgaagcatggtggtctattcgttacatcgtgcctgggatgaataaatggctgcaccgtaacggcttcagctacaaaaaaccgagcggtgtaccccataagttcagtgctgaagcccaacaggcgttcatggaaacctacgaaagactgaagcaggaagccggagatgatgaacccatcctgtttatcgacggagttcacccgacgcagggcacgaaactggcttatggctggatacctaaaggtaaaagcacagagatagaaacaccgggtagccggacgcgtcttaacatcatgagagctctgaatctgactgatatcagcaagatgatcatccgtgaatacgacaccctaaatgcggaaaatatcgcccggttctttatcgcaatacgggaaacctatccggtcgggcagaaagtccatattatccttgacggagcaggttatcacaggtcggagttggtgaaagactgggcttatgtaatgaatatcgagctccactatctgccgccttacagcccgaatcttaatccgatagaacggttgtggaaggtgatgaatgaagcggtgagaaataacaggtacttcaggactgcggcaaaattcagagcagagatacggcgattttttagggaaatattaccggatattgccgggacgttgtcgcgtcgaattaacgataactttcaagtactgaaacctgcatcttcaagttaa

SEQ ID NO: 313993 - DNA, 453 bp, Proteus mirabilis
atgaaaaaaatactattagcctgtgttctcatgagcggctcactaagtgcattcgctatccccaattattggtcggcaaccttcgcacaaggctatatggagtacggcatcagtaatgataaacatctcagtgttattcttgcctgtaatattgctgctgatgaggaatatgataatggcgtttatctttatcaagatggacatcctatcgatacaaacaatatcgcctttgttattgacgatgaagtctattacattccggaggaaaccaaaacgcgtagtgaaggtaatgcctggactctctttacgcaagcgataacaaaagcgaactcatttgcagtgtacgccaatgataaaccgattggtcagtttacccccaatccaaaaaacagggcaaaaatttttgccgactttgattgtaatgccgtattttatcgcgatattgcccgctga

SEQ ID NO: 313994 - DNA, 213 bp, Proteus mirabilis
atgcatcaatgtgttaacaacagtaatgcctttaataaacaggaatgtgaatgcgcattcactcttctgactaaaaaattccctgaagacaaactcgcccaatttatggcatcaaaaatcaatacggcacaatcattaacggaagaacaacgccaatatctcggttattccgccaaagcgcttcaatattgttctcgatatcgtagaggttaa

SEQ ID NO: 313995 - DNA, 321 bp, Proteus mirabilis
atgaactcatcttattttattaaatacctgctaattgctttcgtcattagcgcaattgtcgttgtttataattggatttcgcctaccggtcatatctacggtatttgggcggggattaagtttttcgttgtcatgggattaggcaccggagtgggcatgtttatcggtaatgctatacgactcgcgattatgccagattacatcacaacacgcgaaggtgcgatagggctgatacaagccaagctcttttgggctatcggccctcaaatcattggctggtttgtcgggctgatccctgtgtactctttcttttatggctga

SEQ ID NO: 313996 - DNA, 735 bp, Proteus mirabilis
atgaaaaaagcgtttattgttcccgccctaatggggtgcatttcattaccagcattcgctaacacggatgacagtaaaacggggctttatgtcacgggtaaaatgggcgcatccattgtgcaaatgtctggccagcagtttgtctacagcggctatgctgatgccggtgataatggtacaaaaaatggagatagccatcgtactggcgtatttggcggtggacttgcgttaggttatgacttttccaatcagtttgatatccctgttcgcgctgaattggagtttatggcgcgtgataaagcgaattcaacctacaatatccgcgaccgtgttcgtaatggcgtacatcaaactcgtgatattaaaaaccaaatcaaactcaatacgttaatggtcaatgggtactacgacattaaaaatagctcaaatttcacgccgtatatctctgtcgggctaggctatgcggccgtggattttaaaaccacccgcgctgatgcttatactccaggactctctctgcatgatactcacacgcataccgccaataactttgcctggagtgtcggtgcgggggtgaactatgccatcaatgacgattgggatatggggctgagttatcgctatttagatgctggaaaagccgacatcacgacagcggtaggcgatggggaaaacacctcaaaaatcaaagtgaaggccaatgacatcatgcttggtttgacttaccgattctaa

SEQ ID NO: 313997 - DNA, 777 bp, Proteus mirabilis
atgacatcggtaagttctaaagaaggcaaactagaagagtacagcttcatctatggtgatgaagctgtgacttatgaagtggtgcgtaagcctcatccagaaggtaagaagcgcaagatagcgataaaggtacatcctaattgcgaagttgtggtgaatgctcctgatgatgccgaacgtaatgatatccatgacgctgtcatgaagcgagcgaaatggatttatgctgctttgaaggagtttcgtggtcacttgcaatatgtgcaggccaaagaatacatcagcggtgaaatgcagttctaccttggtagacgttacgttctcaaagtggttgaagaccgagatgctatttctaacgtcaaaatggaacgtggcaaactgctagtgacgctaaaccgctttaacgaagataagcaagctatgaccaaagctttggtttcaggctggtatagcgtgcgtgccgagcatatcttccacgaacgcttagccgcattgttgccacaaaccacttgggtgaaaggaattccgagttttcgggttctgccgatgaccaaacaatggggaagctgctcaacgaagggtaatctcatgctgaatccacatttggtcaaagcacccaaagagtgtatcgactacgtaattttgcatgagctatgccatattgccgagcacaaccacagcgagaagttctggcgtttgctaaccagtgttatgccgaattggaaagaagtgaaaagccgtttagatggaatggcggagttatatttgagtgaataa

SEQ ID NO: 313998 - DNA, 3270 bp, Proteus mirabilis
atgagttcacctttgcctaattttcgcgaagagcacagtgccaaaatacccgcactaacgctgctcaccaaccttggctaccaatttattccgcctgctaaatgcttggcgatgcgtggccgcttatcatcagtgattctacccaatgtgctgcgcagtgtgctgaaacacaaaacccatacctttatgggtaaagcctatccgctttcagattcggctatcgataaaatcattcaagagctggcgaccccagcgatgaatgctggtttaaaagcagcgaatgaaaagctctacaatgccctaacctatggcatcagtgtgactgagtttatcgatggcaaaaagaccaatccaaccattcaaatcatcgattgggaaacaccagagaataaccaattccacttcaccgaagagatggaaattgaaaatgcccacggcacaggtaaacgcattcccgatgtggtgtgttttgttaacggcctgccttgggtagtgattgaagcgaaacgcccagactcttctcatgaaggcaaaccgacgatttccgaagggatttcgcaaaatatccgtaatcagaaaaacgacgaaattcctcatctgtttgcctacagccaattgctgctttcaataaatggtaacgatggtttgtacggtacttgcggtacccccgagaagttttgggcaaaatggaaagaagaagcgatcactgaagcgacctatcttcgcctgaaaaacaccccattagcgcaagataaactcgacctgctgtttaaccatcgtccagccaaagtgcgcgacgaatatctgtcactgattgctggcggtgaactcgttgtcaccgaccaagaccgcttattggtgtctctgctgcgccatgatcgcctgttagaaatgacgcgcctgtttaccttattcgataaaaaagcaggcaaaatcgttgcccgttatcagcaggtctttggcattaaagccctgattgaacgagtgacttcgtttgatgataatggggcacgtaacggcggcgtgatttggcataccacaggttcgggcaaatcgttcactatggtctttttgtcgaaagcgttaatctggttagaagcgctgaaaaagtgtcgcgtagtcgtcgtgaccgaccgtgttgacttggaagaccaattagctcgcacgttcgcgtcgggcggcgcgttatcggataaagacaaaaaagaggcaatggcgacgacgggcaaacgccttgccgagcaaattggtaaaggcaatgagcgaattattttctctatcatcaataaattcggtacagccgtaaccctgccagagtgctacaacgacagtcccgatattattgtgttggtcgatgaaggtcatcgtagccaaaatggttctaacaatatctttatgcagcaagccctacccaaagcagcctacattggttttacgggtacgccgctgctgaaagatgataagaccgaaaacaaattcggaaaaatcatccactcctacactatgcagcaagcggtggaagacaaaactgtcacgccattgttatatgaagagcgtattcctgaactcagtaccaatgaccgtgcgattgatgcctggtttgaccgtgcaacggataagctatcggaaaaacagcgcaccgacctgaagaaaaaattctcccagaaaggccagatctaccaaaccgaaggacgtttggagttaatcgcttatgacatttccgaccatttccaaaacttcaaaagccaaggcttaaaaggccaactggcatgtgactcaaaagcatcagccattcaatacaaaaaactattggataagattggtaaagtcacctcggtggtagcgatatcgccacctgatacccgtgaaggccacgatactgttgatggcgaaagcaaagacttggtacagaattggtggaaagagaacgttggtagcatggacgaaaaagcctacaccaaacagatcatcgaagcctttggtcgtgatgatggccccgacattatgattgtggtggataaactgctgactggttttgacgaacccaaaaacaccgtactttatatcgataaaccactgaagcagcataacctcattcaagcgattgctcgcgtaaaccgtctgcaccagaaaaaacaattcggttatctgatcgattatcgcggcatactaaaagagctagattccactattgctgattaccaagaactggctgagcgcactcaaggtggattcgacattgaggatctcaaaggcttatatagccgtatggataccgaatataaaaagctgccgagtttgtataacgacctatgggctatttttgctgatgtgaaaaacaagcaagatggtcaggcgctacgccaagctctaacacctaagattgaaaccattgatggtcaactgaccgataccaatctgaaaaaacgcgaagatttctattcagcactgacgctgttcgcaaactgtttaaaagtggctctccaatcagcaacctattttgatgataagagcttcgacgataagcgtgatttgtataaaaagacgctaaaatcgatgtctgaactgcgtaagcaagtacgtgaagatgctgaagaaaccgtagattacgatcagtatgccgaagatattcgggcgctgctagataaacatattggtggcgttgaaatcaaagagccagacggtgcttatctggtcggtaatatgggtaaagccgccaaacctgaagagatgagtgacgacgaggcccgcaacaaaaaagatgttatcactggtcgtgtaaccaaaatgattgagcaagatttagcagatgacccttacgcacaagagtatttctctgatctgctgaaaaaggcaattgaacaagccaaagagatgtttgatgcacctgtaaaacaatatctgctatttgctgattttgaagagcaagtgaaagagcgcaaagttgaaggtatcccaactgaccgtttcgccgagcttgatcccaagattaaacgcaatgttcaggcttattatggtttgtttctaaaacaccttccaatcaatccgttatcagaacaggaatgcttcgactacgccgttaatattgatgagtgtgtcaaatcagcggtagcggaattctcaattaatccgtctgaaattgaaaaccaaatcaggctaaaactactgccgctgttagttcgtgacgctgggctaggtttagatgctgccaagcttattcttgccgatatcattcaaatcactcgcttaggcgtggcaggtcatcattaa

SEQ ID NO: 313999 - DNA, 1098 bp, Proteus mirabilis
atggatacaaacgcattggaacgaatgcagcaactcttggctgattttaaaaaactagagccagttgaagttgcagagcccaccatttttagtattaggagtaaggggtattacgaaaatcccactaccgatattttggcattcttttgtgacagcaacggtcaacatcaactcggtgatactgcactaagggcactactgacttgtttacctgaagactatcgttctctagattgcgcattaaccgaagtgcccgagcgagaagtcaaaactcaagcaggcaaacgtattgatttactgctagaaagtgctgattgggtgatggtgttagagaataaaatctaccatcagcaaaataatccgtttgatgactatgagcgttttgttcgagaagagcaaaatcaaacccgctttgcaggtaaacaggttatttttgtagtgctttctccaacaggtgaagcgttaccaagtggctggcatggcatcagctatccctcgttaatttctgctttaaaagctcagctagcggaacagtttctttcccaacctatccataaatggacgctattgctgcgtgaattcatcttacatttggagagccttatgtctcagccatcggttaatcaacaaaccctcgattttgtcttagataacctctctactattaaagagcttcaggaaactaaacagcaagcgataaacgactatcatcaaaggctgaaaacggcacttcagtccaaactaggaaaagagattgcgattcggttacatcattggagcggatatcctgctttgcgatttgctttagcgagctggaaagataccaattcggatgttgtgctatttctttctggtgaaaaaggtgaatcttcaattaatgtttacgcccacctagagggagattctgatgaaagtaaagcagactcgttgattctcactgcttgtaatgttgaacgttggattgaagggaatggtacttatcgcgggtatagaatcaaacttgccaccatgcctgaagatgacattattcaatttattggtgaacgccttcaagaactggatacgtttgaacgtgagtattggggagatgagtcatga

SEQ ID NO: 314000 - DNA, 1245 bp, Proteus mirabilis
atggtgcctaatgggtggtttacgtataagttttcagaaattgtaaaagaaacacagttgggtacgacagaacgacataaaggggaattctgttctgaccctataccgttgctaaaaatgggtaaccttagctggggaggatttaatctaaaatccttggaaactcttcctcgaagcagagtcgatgaatcgttaattcttaaaaaaggtgattttttgtttaacacaaggaacacacctgaattagtcggtaaatctgccgtatggaatggagaattaactgaggccattttcgataataatatcaataggattgtatttcacaattcaatagatccattttatctaggtttatatttaaataatggaagaggcaagtcggtaataaactctttgccagcaggcagtacgagcgttgccgctatttattggaaagatttgaaaaatataaaattaactctcccaccactcccagaacaaaagaaaatcgcccaaatcctctccacctgggataaagcgattgcaaccaccgaaaagctcattgcaaccagccagcagcagaaaaaagccctgatgcaacaactgctcaccggcaaaaaacgcctattggataagaatggggttaggtttagtggggactggaacgcacttaatcttggcgagatattgtccaaggtaagcaatggtgtcacctacgatgcaaagaatgtcgagggtttacctgttacgagaattgagacgatttctacggggaaagtaaattttaataaggttggctttgctcctgacgaagagaacaccagacgtttcaaactgcaccagggagatattttatacagccatattaatagtcttgaacacattggaagagtggcttacttcaatgatgctcggcccctctatcatgggatgaatcttcttttgctgaggactggagaaaagcacgacagcttgtatatctactaccttctgggttcagagttaggtaagaagtacgctaaatcctacgcgaaaagtgcagtgaatcaagcaagcatttccacaacagacgttaaggcctttaggttcctaatccccaatttaccagagcaacaaaaaatcgcctcagtccttaccgctgccgataaagaaatcgagcttttacaagccaaactcgctcaccttaaagatgagaaaaaggcgttaatgcagcagttgttgacgggtaagcgcagagtcaaagtggatgaaaacgtcgccgcataa

SEQ ID NO: 314001 - DNA, 1515 bp, Proteus mirabilis
atgccacataccccaatcaatcaagcagaaatcaacaaagccgtatggaatgcctgtgatactttccgtggtacagtcgatccatccatatacaaagactttattcttaccatgctgttcttaaagtacatctccgatgtgcatcaagataaagtcgaagagctaaaagccgaatacggtgatattcctgaactgatcgccgaaatgctcgaaagccagtcgtttaagattccaacgggcagctcgttctgggatctgtatgaagcacgttttgaagcaggtaacggaacccgcattgataccgcactccacgcgattgaagaagcgaatactaaactcaaaggcgttttccaagacattagctttaacaccgataaactcggtgatgaaaagcagaaaaacgatattctgcgccacttactagaagacttcggtaagccaacccttagcctacgcccaagccgtgttggttctctggatgtgattggtaacgcttacgaatacctgatcaaacactttgccgcaggtagtggtaaatcggcgggcgaattctatacccctgcggaagtctcggatctgctgtcgattattcttgctcctcaagaaggcgataccatttgtgacccagcctgtggttctggttcgctattaatgaagtgtggcaaacaggtgcaaaagaacttcaacggttcgaagaaatatgccctgtatggtcaggaagcgattggatcaacttggtcactggcgaaaatgaacatgttcctgcacggcgaagataaccaccgcattgaatggggcgacaccattcgtaacccgaaacttcaggatgccaacggtggcttgctacactttgatgtggtgaccgccaacccaccatttagcttagataaatggggccatgaagatgccgaaaacgatcactttggccgcttccgccgtggtgtgccgccaaaaaccaaaggcgactatgcgtttatctcgcatatgattgaaaccttgaagccacaaactgggcgtatgggtgtggtggtgccgcatggggtgttattccgcgcttcatcagaaggcaaaattcgccaacaactgattgaagaaaacttgctggatgcagtgatcggcctgcctgaaaagctgttctttggcacaggcattcctgcggccattctgatttttaaaaagcataaagacgataaaaacgtgctgtttatcgatgcctcgcgtgagtttaaatcgggcaaaaatcagaacgtgctgaccgaagaaaacatccagaagattgtcgatacctacaaagcgcgtgaaagcgtggataaatatgcttacctagcgacgttagaagaaattgctgaaaacgactttaaccttaatattccgcgttatgttgatacctttgaggaagaagaagagatcgacttgatggccgtgcgcagtgaacgtttggcgctgcaaagtgaactggctgatctggaagcggaaatggcaggctatctagaggagttgggttatggtgcctaa

SEQ ID NO: 314002 - DNA, 615 bp, Proteus mirabilis
atgattgaaggagtcagctcctcgacattagtgaccttatctgatttggtgaccattcaagcgggctacccgtttcgggggaccatacgcgatattcctagtggttcagtgaaagcggtacaagctaaagatatctctgaacttggcgagttaatctacagcgatttaatcgtcaccgatctaacaggtaaacgtgaacctgattggctcaaaaaaggcgatattttgtttagtgccaaaggggcaaagcatattgccagctatgttgattgcgacttagaaagcacgacctgcgcacctagtctgtttcttttacatcttaaatcgaaatggcaaggtttagtgaacactcaatttttaacctggcagcttaatcaatcccctgcacagcaatattttaaacgcagtgccgaaggcagttttcaaattagcattcgtaagtcagtactggcagcaacaccgattgccttacccagtatcgaaacccagaacaccattgccaagctttatgccgccagcattaaagaaaatgccctactgcataagctaattaataaccgtcagcagcagttaaatgtgattgctactgacctaatgaattcatctaacaattaa

SEQ ID NO: 314003 - DNA, 639 bp, Proteus mirabilis
gtgaaaataataaatgtagtttctttatttcttatatccataatatctataactacctgggctaactcggataatgaaccaatatctttaaaaaagatagcccaaaaaaatactctcagtgatctaaactctgcaccattcggatttagatggggtgatgatttagatgaggttaaaagcaaactagcagagccatatgaaataattaatgatcccaaaagatgcccattcgtagtcgtaaaagccaataacttagatgaaacaataaaaaatactggagaatatgaactgctgattatgcccaaatataatagatttactttcaatgggttacttgctatcagctataaaagtcaaccagccaatgtgaaggactatcataatcttcttggtaaaattattaatagtttaaaaagaaattatggtgtggtaaagcaggcgagaagtatgaatggaatggaacgttattactcttttgaaggtgataattttgtgattagccttacaggggagcaatataaagattctttttatattgatttagagtacgcttttattggctatgaatataatcaagatacagagcttggttattccatcgcaatggaagagtgtaaaaagcaaagaagccagcattaa

SEQ ID NO: 314004 - DNA, 1809 bp, Proteus mirabilis
atgaaagtgcctacacacacatttgctgaaatgctgtataaagtttatgaaatacttggactgtttaaaaaaaacacgaatagaagagatttacgtaatcattccaatttttcatctcaccaaatgttttttgcgaaagctttagatgaaataattgatacgatcgacaatcaagaaagcctagacaaacaaatcagattagtcttgttttacaaatatgaacagctatacaataaatttgtcagtactaatctagtatcgactttaaatgcaaaagagataatgatacgttttactgaaattgtaatacctgcagttatagcattagatatacatataacacttcgtggctatagaaaagaagatccattcaatttttattatcacatacgtaaatttttacttagcgaaaaatacaataaaaataatgaagaattaatatatcagaatgcaaaaaaatatttaaaaaaatacataaagtcgctgaactttgagccctccattgatctcagctcaataatttcattaattgataatattagaaaaagctctaaacagagaacagcatcaattaatacagcaatagatcaatgcctctcaatcgccaacttgatgggatataaaaaaagttataaatttgatctccttagagtagcctacacttcaataaatacattgctattatttcaaaaagaaaccaatttacttgatttcgtttataataactatgaaaaaatcataaaaaaagaaataaaagaatatgaaccaatatcaaagttaaacaattatttgtatgatgggaaaaatcacttaattatattaggaattgaggacgaaattgtcgataaaaactcaactgaagtcattaatagcattattagttatttagatattcctatattgaataatcctattgtcaaagatattatttacgaaatagagcgttttacatttaatttagattatcttgtgccatattcaaaatcttattttaacctactcaaaagacatctcaataaatacgacaaaaataatatattgaaaccatacttaacatttatagacataatactattattacaagatgaaaaaatcgatgctgcctttaattttattaaaaatataaataaaaaaaacctacccttaggttttttaaactcagccatttcaactattgatttggctttacaaataaaattaaagaaaaaaacgataagaaatggttctttaattcctttgattaattcaattttaatcaccaatagcatttatataaaatactaccccattgcttaccacattgaaaacaatagaatcagggaaaatcccattataaaaaacccaaataatattatactaatgcaatcaatagcaagatataacctcatgataagtaaaataaccgatgagaaaaattataaatttgatgaagttttccctcacgcaatcaatggaagtctgaatcaccttgataaattacttgaaaaattaattaaacacgttctaaatttcaatattaaagatgatgttatcgcaaaaaaaatcatagagaaaaaaatatatacgtattcaaatcttaataaaaatctaataaacattcttaatgattgttcattgtacaactgtataggctgcctttcaattctatatgactaccttcaagctccaggagaggagtttgaaaatattcgtctttttataagcaagccagaaaaagaaatcaacaatttacgtaaagcattacatatagctgaaaatatattatatgaaaataaacaaaagaaaaaaagtgctgtcctagataactaa

SEQ ID NO: 314005 - DNA, 231 bp, Proteus mirabilis
atgtccaaccaaaaagaaactagaaatcagacaaattcaccattacgtattttacgtatgactgagttaaccgttattctggggatatccagatccagtatttatgaaaaattaaaccctcgctcgaagtattacgatgaggattttcctaaaccgattaagctggggatatcatcagttggatggctatacagcgagatcgaaaaatgggttgcttcacgtgaagtttaa

SEQ ID NO: 314006 - DNA, 1494 bp, Proteus mirabilis
atgtcaaatggcaatccagaactatgtttgcagttgaaatttttacctgaattttttcagcagttgatcgggcacatacacgctcaaacaggggctagcacagatattattttacctaccctattaggagttatgggtatgggatgtcacgataactttgatgttcaacctatccaaaggattcgctatcccacttcactttatacgcttgtgctcgccaagtcgggcagtaaaaagacgacggtattcagaatgttgatagcaccggttattcagtgggaagaagcacaaaaaagagaatatggttcagcacaggcggagtatcaacggcatgaggctatttggaaaatagagctaaaagctcatgagaaacattatcaaaaaatgtttaaggataacggtgatgtggctgaggctcgtcgtcagttagatgagtgcctacaacaagcgcctgttaagccggttcaaaggcgtttaattatcaatgatcccaccagcgaggcattaactcgggaattagggcaagggtatccagtgttaacactggcctcagatgaagcaggggctttgtttgacggcaatctatttcataaaatttcgttattaaattcactctggtgtggagagagtatttcggtgagccgtgtttcacgcgacagcgactttatttcagatgcccgttttagcatcttgttaatgttacagccggaattgtttaatcattatttgaggaaaaaaggcacgaagtttcgatattctggtgggctagcccgttttttattcgtggatttgaacaattcattaactaggttggatgacctgaacactttacgattagacgcgcatgcatttgatgccttctcttccgttttgatcgcgcacttagacaagtctgcattgcgaagagagtatggtggtgaacgtcagtgtatcacattaacggtggaggcacaaaaatactggtatgaacagcagcgaatcatatcagattgtataaagcaggacacggcattttcacattatgaggattttattgcgcgctatatggaacatgcgtcgagaattgcggcagtgatgcaggtttttatgacaccgaattcaacgctgatcacaaaagaaaccttgaatgcggcattttatatcacacagtggtatctcaatcactttatcgctaaaactgatgaaacgagggagcctagtgatgctgaaaaactcctgttatggttggaggagcatcttgtcagtaataaatcttatgattttaggcgaaatgatatcattaaaaatggcccttattcactgagacgctctgaccgtttgcggcctgcattagaaaaactacagcaggaagctaaagttcaattattcgaaaaaaatgggattaactatgtcaagtttacgggggcaagaatgacacctgaagagctagccgaacgattgaatattccgttgagtagcagaggagtattcatactcaataactcaccaagataa

SEQ ID NO: 314007 - DNA, 978 bp, Proteus mirabilis
atgcgttacattgatgaaactttagcaaaaggtattgtaaaaagagatttgcggaactggaaaggtaatgcttctgaattaatgaaaacgcttgacgtaattgctatggggctaaataacttcaaaacacgtgacttacgtgaagacgcgatttttaaaaaaataaaaaaaatgtctttccctttttttcatcgctatgttcctgcaatgcattccaatacctatggagttttaagtaaagtttatgactccgattgcgttgggatgagtaaaaatttcttgaaaaaatgtcaagacgcagaatcaaaacttttatatgaggttcataagcaaaaaaacagtatggttaatgtttttgttgctttagacgatactgggattaaccctggctcactcgtaatatgtattttcgatttgcattcgaagaaaaatgtatgccactcagtagtcaatatatctcgacattgtttagaaagagtagtgcaacgtttagggtgtcagacacttaccgatgcgcttgaggaaattttgactggcctagtgagcttagaactaacagtgcattcatatataacaaggccttttgagcgaaacaatgggaaaaatgaatttaaaattcacgtacctacaaaaaatggtgctttgttacttaagattgaaaatcctaaaacgcctgacaaagatgcgtttttagatagcaatttagttacatggattaataagcggcaatttttcgatgaacaggaagttacattaagacattttacttttgttaactttattaattatcatttaaatgcgccgaatttagatgatatgcgaaaagattttcaggaaaaggttgataagttaaagatagatggagctttttgtatcgagttcctaattaatggtttttattacgatagcgctgaagtcatgaatgccattaatactggtgactacctggataatattattgcatttgagaggttttga

SEQ ID NO: 314008 - DNA, 171 bp, Proteus mirabilis
atggacttttttcgccccagaaaaccgacagataatccatttattgaattattaaacggtagcctgctggataaacgcctgaacattcactggttcctctcacaggaagatgaacaagaaaaactcgacaactggagctgggaatataataatgagataacgcactcataa

SEQ ID NO: 314009 - DNA, 1128 bp, Proteus mirabilis
atgttattatgggagtccattgaactagacataagggagtatatgggtttagctgaagctttggttagtattccgcagtctgaaagaggcggtgagattgcgcaacgtgggtttgactatcaaacttgctgggctttatctcaaatgctggaatatgaactagatgaaaaaaactatgtgtttatcttcgaatatcatgatgatgttcttattcttgatgacgaagtttctccaactcaacttacatttgctcaagtaaaaacaagagagaaacactggactgcattcaccctaagtaatactacccagaagaaacccgtatctatcatcggtaagttatttattcatcataagaatttcgccgaatattcacctaagctcctttttgttactaatgcttctttcaatctatgtaaggaaaacggtggtaagtcttgttttggtgcaaatgaagtcaaagtggagtatcagacgagctttaaaaaagcgatcaaagatcaagtaaagcttgatgactcgagtatcgatctttctgttatgcgattcattcaatcctcattaagcctagatgaccacattacacatctaaaaggtaagttatgcaatttccttagcaagaagtttggcgatggcattagcctgaatgtcaatgcattagcgtctttacttgaacaatcgtgtcgagaaaaatccaaggtaaaatctgcagatattattaatttttctgaacttatctcgagaaaaggtttctcatcaaaagcattgaacagtgtgcttgattccttgaatgtaagtaatagtttaaagcctgattgggacaaagctagtcccctattcaatgatcttggcaaaacatcgcttcagctcattaccctacaagccatgttttcacaagtttgcatcgaccttaaccaaaacacaaaaaatccttcgactgtatatctagaatatgcaattagcctttatgatgaggcgagtgttcactcggatttgaaaatatacgtatctgaaaccatgcacaaaattgatgcactttgtccagattatgcattgactttaaattcagggaagaaagaatgtatcgttgtttactcaataatccagaaactatttgagggaagtgaataa

SEQ ID NO: 314010 - DNA, 1653 bp, Proteus mirabilis
atgaaaagcatatactttaaaagtgctcacatattatctcttcgcgataagaaaggattctctttcgagttctcacctgatatcaatatcatcacaggtgagaatgatacaggtaaatctagttttattaagagcttatatcatacattaggtgctgatgttcggctggataaaaagtggaaagaagataattttgtttcaaaagttgttatttgtgtcagtaatcgtgactatgcgtttcttcgccacgaaaaacgtatttccattttcgatataacagaaggacaagagcatcacttagtgacctctagctctcgtacagagattgcattaactgtacgtgatatctttgatttcaatttggagcttgtgactaaaagtagtttagttcagggacaagcacaaccagcaagtctttatctcccttattatattgatcaagataacggctggggaaaagtattagattcattcagcagcttggcaatgtataaggactggcaaaacaatatcttgaattttcatgccggtgtaaaaccaaaagagtattacactttacaaggaaagattaatttaatagatatcgatcttgatgaaatccgaacgacgttaaaagctctacagagagctaagaagcggttcgaagagtcatttggaagagtgcttttcgatgtggatgtaaaatattatgaagagctgctggaacgttttcttcgtaaatgccaagacctacatcaagaagagacagaatatagaattaagctcataaaagtattatctctacgagatgaattagtagcagaaatcgaggagtcaaaaagacagctcgatgaaaatgatatagattcgtttttaccatcagcaggcttagaagctagatatgtagtacttgagaacaaagaaaagctattgcaaatcataccaaagttgtatgaggaaaagtctgtatatgatgatcaaatcactaaaatcaaagaagatttgaaaaatgctaaaaacttaagctcagaactcaaaggcatgcttcaggaagtcaaagagcaattgtctcttcaagacgttattaagtctcaagcaagtaagcaggttgaggtaactttcgatgagcaaattaatgaattactgttaaaaattggtgaattggatgtcgctagagctgagctttcaaaaaaaatagcaaagttcgaagataaaaagcgaacaaaagaaatcaatgataagtttaaagagtcactgaagtttgcacaaactgagttaggtatcaaagatcctaaagttggaactattcttcaatatggcccgatttctaagagcgaaacaggtagccgtgctccaagatcaatattggcttatcactatgctcttctcaaaacaatagaagataaatcgacaagccctatgcttccagtagtaattgactcgcctaaacagcaagatccagatccgcgcacaacgaaaaaactatttgatttatgtattaatgggttatcaactaatagccagctaattatcggctctgtttcatttgaaagagaaacgaatcagtttaaaacgcttattatgactgaaaaatacagtttgctaaaatcagagctttataatcaggtttatcaagagattatgcctctttatcaacgagctgcgttatcataa

SEQ ID NO: 314011 - DNA, 810 bp, Proteus mirabilis
atggcgaacacaatgaaaaccaataatcttattttattcacagtcttatctttgagtgtttcattcattcaaaatgcgatttcagcaggaaatcaagaattattctcactatcagaaatttgcaaagcaggattatctgtcgtctatgatagagatattgatacaatgcattcgacctcagtttcaaataatattaatagaattaaatatataagaaaccaagatggtaaatcattttcatatctgtgcagaaaagagtcattatcaagactaagcttcttcgatgaaaatctaccgaatgctcgttggtatggtgctgatctggctgaacctcaggtatttttctctatgacaaacaatatactaacaatcagagatgttgttgacggaagaacattaaaaacatatttttttaataaaagtgattttattcacaatgaggaaataactaagggtgaagtggataaaattaatatctggctagatgaatatatccaaaaaaaaattttaaattcaaagagttgggatgttaaatatatgggtgtaaaacatacgatggataacccagttaatacttacatgctgagttttaataccacagacaaaaaattactaacccttgaaaatgcagatatagatgcaattgcttttgaaaaaaatatatcaagaatatctaattggaagagttttttttgtactgaagatatttctgattttatgattaagtatgaaattgatgtgctgcactcagaaatatccaatgatggaaaaacacaatttattgccacatgctttaaaggtaaatactaa

SEQ ID NO: 314012 - DNA, 1905 bp, Proteus mirabilis
atgaagcttgaagcgattcgtttatctggttttcagtcatttggacatgaatcaaccgaactgagccttgaagatataacatatatcattggtcctaatggttcaggtaaaactgcagttctccaggcgttgtgtcgactctttgcattcgatcctgcattaaggcggatccagcgttcagatttccacgtcccctttgatgaggaggaggttccacttgagcgccagctgtggatagaggctgattttctgtttcccgaactggaagaggacgaggacaacagtaccgtagctccccattttagtcatatgcgactggacgagccggatggggttccgcgtgtgcgttttcgccttaatgcgactatgggcctggatggcgatattgaagacactctggtatatgtcctggaagttgatggagatgacttgcctctgaatgttgctcaggttccacgcgctgaacgtaatcatatccaagtacactatctgcctgccagacgcgatcccgccgaccatattacttacggtgcgaatgcattactcgggcgtttacttcgcgctgttcgttgggacgctgagcgcgaaacgattaaagggctgacagatcaaataagcgacagccttgcggcaaacccttcggtgaatgctttcagtgagagtttaaaggcaacatgggcaacgctgcataaaggtaaattttttgctgatcctaaaattacttttgtcgcatcagaaattgaatcgctgttaaggcatctgtctgtttcatttacccctggtcacgatggctcatttgtcgatttttcaaggctgagcgatggtcaaaagtccatgctttacctttctcttgtcttatcgtctcaggctattggtagggctgttcttgcagaagaagatgtatcgtttgatcccgataaattacgtccaccagtcttcactctggtagcccttgaggagccagaaaacagcctttcaccacattacttgggccgcattgttagctccctgaatgtcatgacaaaaaacctagatgcacaagctctcattgcgacgcatgcgcccacaatgctgcgccgagtgggtcctgaactaatacgttatcttcgtctgaatgagtcacgagagacgtgtgtcacttgtatcaaattgcctgatgaaactgatgaagcacataagtttgtgcgagaagccgtccaggcatttccggaagtctatttttcacggctggtagtgcttggcgaaggtgatagcgaagaaattgtgttgccacgcttgcttcaggccaagggggtaccagttgatgagtctgccatcacgatagctccattagggggacggcatgttaaccatttctggcgtctgcttgcagcattaaagattccctattttacactgcttgatcttgatattgcccgctatgcagcagggtggggaagaattaagtacgtaaacgatcagtttgcaatacatcaaccgcgtaaaaaactccctaaagattacggaattccaaaatggaatgatggagaggaaaaaattcgggacttcgaaaattatctcgatatgcttgaagagcgcggcgtatttttctcctacccgatggatttagactttgcaatgttacttgcgtacccagaagcctataacgttgaggaagagaagcccgacaatgcaactataaaagctgttcttggaaagagtcattacgattcatctcagtacagggatgatgaattagtgctttttaatacctatcaccaacgttttaagctcggcagtaaacccgcagctcacattgaggcgttaactcacctaaatgatgatgagctgcttgatagcatgccggattcattaaacaggctggctgatgccgttattgccaaactcacggaactgccagaatga

SEQ ID NO: 314013 - DNA, 1665 bp, Proteus mirabilis
atgattactgtggaagaatggcagcccgcagatggattgacgctggaacctaatgctaaacgtgcagcgaaagcgcgtaaacgttgtctggcactaactgctggacctggtgcgggtaagacagaaatgctcgcacagcgtgctgacttccttttgcgaacaggaacgtgtcgataccccaaaaggattctggcgatctcatttaaggttgatgccagcagaaaccttacagagcgcgttgaacgcaggtgtggaagggagctcgcttctcgctttgacagttttacctttcacgcatttgccaagcgcatcatagatcgattcaggccggtactcacgggagaatatgccttagatgctggttacgctattgtggacaagaaaagcgaggcgtctcgtcacgaaattgcattcgtcgaactggtcccctatgcaattaagatattgcaaacatcaaaaatagcccgaaatgcaatccgtcaaacttatagtgacattttccttgatgaatttcaggactgcacaaatttacaatatgacttggtaaagctcgcttttcagggaaccaaaattcgactgactgctgtcggtgacacaaaacagaaaattatggcctgggcaggtgctctggacggcattttccagtccttcacaaaggactttaatgcggtaccgctcaacatgtatcgcaatttccgctcaaaaccaacattgctgcgtgttcagaacgaaattattcgtaggttagatcctgactccgtaatgcctgatgaccaactggaaggagaggaaggggaggtttttgccttgaaatttgaagatagccaaactgaagctatctatctggctgacctaattgatggatggataaataaagagcagctacctccagctgaaattgcagtcctggtttcaaaacaaccacatttatatgcagatcacctcttcaaagagttggagcagcgcggaattccctaccgcaatgagcagcaaatgcaggacatcacggttgagcccgtggctcgtttaatcgttgattacttgtcctgtctttatggacagcgggaacctaaagcctggattcgcctgatgaaccagctggttccctttgctgatgaagaaattcagaccagcgtgcgaaaaggtcttgatcaacttataaggaagcatcgtaaggaagtgtctggtgcgaaaaaaacagacaccccctttgctgaatggtggaaatttggtcgagctctcttaaagcacataggtttgcagacgcttgttgcattatctcctgattatgagtcccatgaacgtctgaaacaggttattcacgataccagggcacgtatcaaatatttactggaaatcgaatctgatttacccctcgcattaacacgatttgctgatgatcaggctgtacgaattttaaccattcacaaaagcaaaggattagagtttgattcggttattatcatggcagtagaaaatgaggctttctttggtaaagaagaagaaaatcgctgcgcgttttttgtcggtgtttcgcgagcaaagagacgccttattttaactcatactaacaagcgtgatgaacctgcaaatgctatgtactggaaattttttcggactgctcaattagagtatttggattatattcttccatttgtgaggtaa

SEQ ID NO: 314014 - DNA, 687 bp, Proteus mirabilis
atggctgggcaattagacgaagcagcaaagcagatcttgggaacccttttggcggattttgctgaccgagggttaacagctaaggatttaaaaaatgggtataaagggcctaatattaaggcattagctaccgcagtatgtagtatggctgattttaataccgtcgattttgatgttgcatttggcgatcttgaaaaatccaagatgattaaaactggcccaatagccatgatggagaacgatccaaatagtcatgttgtctttcttgggacatatagcaaacgcgagtatgtttgtctgactgaagctggttataaagagtctcggaaagctccgaaccgtccgaaacatgttcagcgcattgttaataatctaactattactggtggtcatttcagcaatacgcagttaggacagggagaagttgtatctcagtctcagagtattacagccagtactgaatctgaggttgtggcaaagcttatttctatccttgaaaaacaaggacaagtagtgagcagtgctcaacgttctgacattgcagcagttgtgtcagcagcgaatgaaggtgatgggaaacaggccaaatcgttactggaaaagatctgcggtccggtttgggagtcggttcaacccgttatgtggcctattgttggtgaattagtcaaaaaaagccttgggttgtaa

SEQ ID NO: 314015 - DNA, 1227 bp, Proteus mirabilis
atggactttttcgaaattgatgaagatactgatttaaacctccttcatttcaaatttaaggatctgaataaccagttaggatacgtcggcgctaaagaggttgtttcttcttggggaaatgatttttatgatcgcgataaaaaagctaaaaaagaatttcaaacatcgtttcactctactttttgggagctctatcttcacgcagcactgaaggaaatgaacttcaaagttagcgaaaagcacaatcgaccagactttatcgttgaagcccccaaagagatgtacattgaagcagtagtgtcagagattaaaaaagatggtactcctgaaaaactacgaactatagaggatgtagaggccaacttgcggccgattaaaaccaagcgtgagtttacagatatcatcgatgaggcaatatcacgtcactctaattccctaaaatcaaagttagaaaaatacactggatatatacgcaaaaaagataataagcctattaaaggatacgtcgattgtaattgggtttcgcctaaggccccatatatagtagccctatcttcctatgaccaaattgcctatggtagagaatttatttattccatgtttgctttactgtatgggcactattacgacccagaaaataaagcatataccaaaaaaaataaaattaaaaaacccggcactaactcggatttagatcttgggatttttttgaacccagcattcaaagaagtttcagccgttttattttgcaacacactgacattaggtaaactctcttcgctacataaatcagaaaaaataagtttcgatacagttctaaacattagatacttgcaagatgaaccgcattttcgtgtgcatgaagtaacacccgaaaatcccgagcaattacttgatggtctgtacatattccacaacccatttgccaaaaacaaaataaatttcgatatatttaataagttggcacaattctctatggatgaatatgggctacatcaaattggtaattatcctctaattgtgtctaggtttcacaccaatatgttgcctagttcaataatcccaagtataaaggctgatgctttttcaagctacaacccagagtactgtatgcgagaactcaaaaaagagatctgtcttttaaagcccgccaaaggcgaaaggatcaggcaaaagaaaaaaaggacaaataaaatcgctaaggcttcccgcagaaaaaatagatga

SEQ ID NO: 314016 - DNA, 858 bp, Proteus mirabilis
atgttgaaacttaaacaacctgcttacacatatgccgatatgctgactagctgctgcgaaggcataactggtaatccgggcttgttgcagaaagtaaatgaagcaataactgatttgcaaacattggcagcttcatacaacgcatcggcattaactggtgaactttatacaatacaaccactgcaaaacaaagatgaggaagaccctattgttttaggtcggttaaagaaatctgattttgttaagctttatggaaattatgttgttgggaagaaaaaacctgctcgaactatttatgatgccttgatgactgctgctaatgaaaaatgcccattttgtggtgggatcgggcgacctcgaaatttagatcattatttgcctaaagctcactatcctcagttttctatattgcctgttaatcttgtaccggcttgtcgagattgtaatatggatggtaaaggggaagcttttgcaagaaatgaagcagaacagatcatacacccctatttagacgatagccgttattatgatgaacagtggatatcggctagatacttggttggcaaaaatgatgagcccggagttattgagtattttgtttctccgcctgctgattgggataatgcacataaacaaagagtagagaaacattttaacgattttgatttatctttaagatactcgcaagaagctggtgcgaggttagttgtgcttttagctctatataactcagtactattactctccggagataaaaatgctgctaaagaccttatatttcaaacaacaatcaataattcgccttttgtgaatcactgggaacgggttatgtgtttggctcttatgtcagacttgtag

SEQ ID NO: 314017 - DNA, 1518 bp, Proteus mirabilis
atggatatcattattgtaccccgagagcagcgtattcctgacgtaggcattagtacggcttacctgcatgtggatcgttggaatgacttttcattcactacaatgttttacatgtatctgtttgatcagaaaggtgaacggcatgatattgggaatgtcaagattggctttcaaggacaaactaccgaaaaatcaacttactccacgttagggagcaggtttagaattctcccagaaggatatttttccgttggtcaggatgtcgactattatcaggaaatttcgaatttaccagaatccatcaaagtttcattacttgaggcgctcaaagatatagcttatgcgccagaacttatagatcttgttaaggatgaggaggtctttaaaaagtctttgcttcggtatgttagcttgtctgttattaaagggcagtttgcgcgagtgcttgagggaaagaatccactgactaattttgagtttaagttcattcgccctgcacaaggcaaaatttccgatatcgaattatcatttaaggtgaaagtaggagaaaaaccaagcaccaatattcatgcaatcataggtcgtaatggtgtggggaaaacaacaattctaaacggaatgattgaagctgttaccagtaaaggtacatcgaatgcaaaattttatgatctggaggggtggagtgatgacccgattgataatgattactttagtagtttagtctctgtgtcatttagcgcattcgatccattcgagccaccaagtgaacagcctgatccatcaaagggaacttgctacttctatataggtttgaaaaaaaaaggagagtcgctgaaagggctaaatgatattcatgaagactttctacaagctttgaagctatgctttagccagattcctaagcgagaaagatggctgcaggctattgatactttggagtctgatgaaaattttgcaaacatggagctgaaaaatctagcgggatatgatggtgagatgctcgttagtaatgcacggaaacgtataaaaagaatgagctccggtcatgcggttgtgttattaacacttacacgtttagtcgcaacggtggaagaaaaaacgttagtgctaattgatgagccagagagccatcttcatccaccgttactgtctgcttttattcgtgcgctgtctgatttgctacttgatagaaatggtgtctctattattgcaactcactcacctgtggtacttcaagaggtccctaaacgatgtgtttggaaaatcaatcgttcaagattgtcaaccgaatctcgcaggccagacattgaaacatttggtgagaatgtaggaatcttaacaagagaggtatttggtcttgaagtagttaaatccggttttcacgatttattagtccaatcagttaagtcaggtggaacatatgaggagatagtcgatgagtatcgtaaccagcttggtgttgaagcccgagctctattaaaagcgcttgtcacacacagagagcggagcgttaagtga

SEQ ID NO: 314018 - DNA, 255 bp, Proteus mirabilis
gtgcttattaaatctagtttttttatcacattaatatcactatttataagtattgttgttttttacttagaaacagttcatgagtttttctttaaactttatccctattctgtaaactctaaaatagttattgaaattcagaaaatattatcatattcatttttttcttatctgatagctcttgctttaatcacacagattcctatcattgcatatatactggattacactttccgttttaaaataaaaaagtga

SEQ ID NO: 314019 - DNA, 465 bp, Proteus mirabilis
atgaaacactggaaactttacattgtcattgtgatagtgggtattgttgctggtggttgcgtgctgattaatgcacaagctaagaaaattaacacgctggcagaaaacaataaaaagcttaatgcaacacttgaagagcagaaggctatcaatactgactatcaagtacgcatagagcgactcaatcagcttgatacaaggcgcacacaggagcttgttaatgcaaagaatgaaattagtcgcttgcgtgatattagtgagcgtaaccctaagcgggtgtacatcaaagccgagtgtccaaagagcaccagtaatccccccaccagcatggatgatgcaaccaccgcccgacctactgacaccgctatcaggaattattggttactcagagagcgaattacccagtcagagcaaataattaaagggttacaggcttacatcagagcggagtgtggtaggaagtaa

SEQ ID NO: 314020 - DNA, 228 bp, Proteus mirabilis
atgattaacaaagaacggcgggtaggtgtttatccaaaaatcgagtataaccaacttggtaagggacaatttctaagatctaagttctgtgaaattgaaaaagtagtaaagagtattgaacaggactatggaaaagaaaatattatgcatgtcaaaagcacgctttcttttgtaactacaaaggaagaaagctcggtcatagtatcggtattgtttaatgtcaagtaa

SEQ ID NO: 314021 - DNA, 549 bp, Proteus mirabilis
atgaatataaaggaaaaagtgaatacaatacttctttgtgacattgctaaacacttaggtatagattcagaaatagatccagatattattaaatatgctattacatcaggtaatgaatggattattaatgctgaatattcatttttattagatgatgaatcgtctaatcacactaaggaagatcgtgattttcttgtagagatattaaatatgtatagagggttgtctgcttccttaagaaaattttctaaggataaacaccaggagctaatcaagaaaaataatctcaaattaattgaagataatattcaacttcccggttttgatggaaataatgaatataaatacactaatattcttgagggtttttggaaaataaacagattcaccgaacaaaaagctcctatctcaaacacccattctcaaacaattgataactatcgtcgcatgataaactgttataaaagtttaaatgtgcaaaatagaatgtttgatattactgaaagtgaatttcaaaaaatattagatagtgcaccacatggtttttaa

SEQ ID NO: 314022 - DNA, 528 bp, Proteus mirabilis
atggatttaaatccaaaagatgaagttatgccaattgaccatgaggattctgagacggtctcagatgttgatggtgcgatagcgaaaatagaaagcactgtaattgataatccagtaatacttgaaagaatattggataatcctagagtcatggctatcgttcagaaaagagagtcttttagtgggcctttacctcatcctgattttttgcagaggtatgaagaaatattgcctggaggagcggaaagaattttttgtctaacagaaaaagaacaaagctttaggcatgacacgcagaagatggctattaatggtgctataaaaaaggatagtcgcggacaatggatgggtttttttctctcaatatgcgtgttaattattgcaacttattttgctaaagagggagcgtattggttcgcaggaaccctcatcacaggaaatctagtagcattagcagctgtgtttgccgcaggtagaaaaggaaacaagaaccaagacagatctgataatgaagatactccaaattag

SEQ ID NO: 314023 - DNA, 195 bp, Proteus mirabilis
atgacagcaacaatgcgcagatatctcatagctatgggtagcataatggacttggctcctgctacaaattacagacgaatggcagctcaagggcgagaccaagaccgcctaaaaaaagatatcgaagccgtagggaaagatataactaaggttgctgctgggctagaatcttattgtataacaaaaaagaaataa

SEQ ID NO: 314024 - DNA, 1449 bp, Proteus mirabilis
atgcttaagaatattgttgctggcttggttattttttctagtttctcttatggtgctagctttgattgcagtaaagagccaagtaaagtagggcagttaatctgcaatacgcctgaattatcaaaaatggatgatgaactttacgttgattacctacaagcaaagttggtaacgggtaacaatgcagagtttaaaaagatagttaaacaaaactggaagcttaggcaggataattgtgaaacagtagagtgtattgctgattggtataaaaggtctactattctttatcgtaatatagctaacagtggcaaggttaatgactcgtcagaaaattgctatgaagaaggtcagcaaatcactttatctggaataataaagagaacagtattccctggccctcctaattatgaaagtgttgagctaggtgataagccagaaacttactgggttcttaatacaaaagatccaattacatgtgcaaaaggaagtgctgattggggaagtaaaaatcagtttcaattagttcttaatgatgacttgtataagaaatatgaaaatagcttaaataacaacgtgtcagttactggcaaattaatgtattcaatgactggacaccatcacactccattaatgattaatgttcagtcaatacaaataagaaatgaaaaagtaataaatacaaaagtaacgtatgacgcatacggcttacctttgccaagaaacaaagaggcatttaataattttaatactgttgctatctctataattaacgacattgaacgcagaaaacaaaaagaaaatttaataaatgataatgaattaaaaggagttagttcatctgttaatacagcacagttatacaaagaatataagcaaaatgaactggttgcgaataataaatacaaagggaagagaataagagttgttggaatagttgaaagtgtaacagaggattttctaggtaacgcttctgttaaatcaacatctcctgattttatacttggtggaacgatgtttaatgtagataaggaagatccttatgtgttgaatatggttcctggctcaaaggtggacatggtttgtattggcggtggctttgttgtggatagccctgtcttaaaagattgtgtatcgacaataagtttttctaaaacaaataaaaaaaataattacgatgatctgcgaaaatttatgccttatgtactatatatgagttctgaggatatagtggagaagcaatgtataaacatggattcgtgtgtcaaatataaaagacttgcagatttggttatctctggcaatgaggataaaaattccgtaagtgaagaagagttattagatgtcatgaaaaatcttggcttaaatagagagatactcattcaagcagatgaaaacatggataaatttatgaataagtacagtaaggaattactaagcaaatatgagtaa

SEQ ID NO: 314025 - DNA, 2337 bp, Proteus mirabilis
atggctacagttgtggaatcactgattgtctcacttaaattagacaacactgagttcggacgtgcagtaaaacaagcaattgaagataaccaacaattatctgatgcggttaatggtgttggtgatgcgtcaaaagatgcgggtattaataccaacatctacacgcagcaaacaaagaaatccaacgacgaaacagataaagccaaaaagaaaaataaggatttagagaaaacaataaatggagttgtaaaggctttatctggcttatttaccacaatatttgtttcaaccggtttacaaaaactgattgatgaaaccagtaaaaccaatgatcagctctatttcctaagcaaaaacttaggcatgaacgcaaccgacattaaacggtggcagaacatggcagagatgacaggcggtagtgctgatggaatggcagcgagtttatcgggcttgagtcaatccctgtggaacttagtcaccacgggtgatgcttctattttaccttggttcaatgcgctcaatgttgatgtagtgaactctggcggtcaaattagagaccttaacgatatcctgctcgatgtatctgatagcctgtcgaaaatgtcacgccctcaggcatataacattgccaaaaatatggggttcgatgacggcacaataaatctgttgcttgaaggtcgccaggctatgcaacagatgctagaaactcaaaagaatatcgttatctccagcgaagaagagttaaagctaagtcgtcagcttaaccaacaaaacgcattagtcagcaagcagtgggagggtttaaaaacactcattgcgaactacttaatgccttatttcctccgattctctgagaaggtctcaggctggcttgattacctcaataaaaatagagaggtagccaaagacctgtttaagggcatggcggttgtgctcaccgtgtttctgatccctgcactaataaagggtgcaattgcgatggctggcatgtttgcaccgctgttaactggaacaggtttggtgattgcattgggcgcggcattaatactgctatatagggattataaaagatggaaagaaggcaaggactcttactttgattggtctaaatgggaaaagccaatcacttatatactgaaaaagcttgatgagtttaaagcatggtttaaaaacaccactatagggaaatggtttactgacgcaaaaggtgaggttgatttactgaaagcggcattcgctggattagctttgtatataggaactaagtgggtcggaaaaatattaaaagcattcggaaagataattaagggtgctggtaagttaggaagagggttaggctctaagacaataatgggggcgttattatatgaacccgttgatgaaataatgacctctattgttggggaggagaagaaaaaatatcttgattctcacgggctttattgggtatcaacaggtgatggattctgggattttgaattattcaccagtgaagatgatgcaaaaaaaaggcaggctgagatagatggattaaatgacgggttgggggctagagtaggacagattatcaacaacaacagtacctcaaatacgtcatctagtaatacaaaaaatattaacaacatagataatagaaaagggatttcaagaggggaaagaaataacaaccctcttaatatgaacttcgttgggcagaaaggtgctaccttggaggaaggaaaaaacgctagatttgctaaattcaacacaccttatgatggattatctgcgacagttaatcaattacttaggtattatgatggtagatcaagggcggtaggcaataggaaattacagacagtacaggatattgttaaggcttgggcgccagcgtcagataataaccatacagatagttatataagtgcagtttcaagagatttaggtgttgagccaaatcaaaggttagatcttagaaaccctgatgttatgaagtcattaatgcatgcaatgagtaaagtagagataggtagacctatgccttattcagattctttaattacagcagctattaatggaactggcgatccatctgttaatcttgccaataacattaactctattaacaaagccattagtaagccacttgtgtcaaatacagggtttgaggctcaaaacttcttatcccaaactcagaagttaaatagtcaacctaaaacggtaaataataaaaccgaggtaactgtgaatggtggtatcaatgttacaagcacggcagataccattaagggaactgttgaggatggcagaatagcagcaagagaatctctctcacaacttatgccgacaatgagttaa

SEQ ID NO: 314026 - DNA, 567 bp, Proteus mirabilis
atggctaaaagcaagcttgaggaagcgctggaaaagtatctatcgtccggctctaacctagaattaagagcaggagtgctagagggttccacctatgatgatggaacctcagttgctcaggttgcatacatgcaagaatttggtgcaagcataaatcaagcggaaaggactggtgcagtttaccgcagtattagaaaggacggcacctttaacaagagcggacgatttgttaaagctaaaaactctaatttcgcaacagaacacaatattccagctcacacgataaacatacctcctagaccttttttcagaacagttattgctaatgggaaaaaaacatggccggcaatattagctaacggaatagaaagcagagggagtgtaagaggtggtatggagtatcttggtggtgcaatagttgaagagttgcatacatcggtaatgacttggacttcacctccaaatgctgcatctacagttgctaaaaaaggttcaaatagcccccttcgtgattctatgaggttgtctagatcatttgcatatgaggtaagtgatgatcaaagttag

SEQ ID NO: 314027 - DNA, 291 bp, Proteus mirabilis; identical to SEQ ID NO: 312037

SEQ ID NO: 314028 - DNA, 126 bp, Proteus mirabilis
atggcatggggaactaataccgaatcaggttttgattttcaaacatatggtgaaaatcaacgtgatcctattgactttgatggtttgagattagtgttatttaagccatataaagaagatgtataa

SEQ ID NO: 314029 - DNA, 603 bp, Proteus mirabilis
atgaaaccagttagcctatcaagccaaaaagaacttatgctaaacgaattaattgaattcatgaagaattataatgctaattacaaaaaatcaaaatgtgagtttgagatttttgagaatggattccgcaaaatatgtatgttgaattttattaatagagggagtcatttagcattaagaacttttttatatattagtatagatagcataaataaggaattcaaaaaattagcaaaaaatatagcttgtcctccttatatctatggaggtgaaatcactgaaatttgcgagcattttaatataaaaatcggcagagaatatgcagagcagatcataacatctgatacctgtattaatgatataattaccgaatggaagaataatttcattaaaattaatcagttaaaactccctcctttagctttaagcactagcaacagaatattaaaaggaagcttgttattaaaattatcttcgcaaccaaaatattatgtagagcaaataatggcattgtataatgaaatctcaattaacagtaaaaataaaaaattacttgacaactttaatgtcattaaagaatatgtcgagaatagtataaaataa

SEQ ID NO: 314030 - DNA, 171 bp, Proteus mirabilis
atgttgttagagcgcgctcgtttacctttatcaccttactataaagcgaatattcaaatgcgtcatttatgccaaggcaaattaaatgattgtgaggatgaaaaattagttaatagttataagaactatatttatgacaaattaaacgttgccggtggtaaggataattga

SEQ ID NO: 314031 - DNA, 786 bp, Proteus mirabilis
atgattggggttgacatgagttatattcatatagaaagagattttagcaactttaacagatatacaagtggtagtggaagcattagtgtgaatgatgatggacgcatacgcctacaaaactcagataaagaatccaggtctattatcaataaaagtttattgttaatggctggcgatgaggtgacaatttatgcaataggtcaaacaacaagcttggcatctggtcagtgtgttatagcaatagaacacccaaatacaattagaaaaaacatagtaacacttaatcataatgaagatgcagtgttacaccgtgtatcatggaaagtgccaacagagtacccacctagtactgttaatctaatcatagctcttccatacggaactgagggaatcgcttattttacagatatttattttgaaataaaatcacaaaacttaggttctaggagaatactaatggatggcgttgtaaagctaacaaatggcgttgctacattggataactcttacgaccacagaaatgtaggtgaagtaatagcgtcgagtattaacctagatgtaaaaccaaaggagattgtagctctagacagacttcccatcgtaaacataacatcaatttataacgctgatgataaaccagtaagaaacgcaatattacagcctgttgcatcatttacaaaagcgggggcgctgaatattagattgcagcaccctatagatggagtaatggtaggtacaactggagagacaataaacaaaactatctcgttttcagtttatatttaa

SEQ ID NO: 314032 - DNA, 402 bp, Proteus mirabilis
atgaaagaatggcgttatataaaacctttggtgacggaaagccttatttcagatgccgaggaaaaactgggctacaaattcaccgattcctatgtggattttgttaagaaatataatggtggccgacctccggtaagtgtatttagtacgactacatcacaagagagaacgattaaatcctttttatcattcaatcctgatgatgtagaaaatatcatcaggttgaacaaaggtgttgctgaaatatcagaattactcgttgcttttgcaatagataactttggtaattacatatgcttcgataaacaacataacatggtctactttttggattttgagacaggaaaaacagatctgatcgacaagacgttttctgattttttactcaaaatagatagttaa

SEQ ID NO: 314033 - DNA, 675 bp, Proteus mirabilis
atgatgataaatttaatggcaattaaagagattgcaaataaactacacccagaactgtcgaaaacattagaaaatattgacccagtaaacatcgacttaagcgacttggatcgtcctattctaaaagtagcagactcaaagcctgaatgtgaagaaactgaaacccgacccttaacacaagagggaaaggattattatcgagaaaagctcggttgctcaggaaatttactcgaaaatgcaactatcgatgaaaatggaaaaatttacataaaaacaataaacgaaagcaaagaaggtcaaacaggtgacgatggcgttatatatgaacgaaaaactatcgaagtgaatggcgtagaagttgaaggtgtgttcccgcaattaaatagtaccattgatgtacaacttcccgaacagttgacgcaggcaagagattctgcgcaagcagattatgcaaatcaagcgcttaaagaaaaggtagacaacgaacctgagtttgcacaacaattcagcgatgaacagttagaacaaattgaaaatggtgaaactcccgatggctatacctggcatcacagtgaagagccaggccaaatgcagctagtcagcacggaagagcatcaaaataaccgacataccggtggtaaagctatttggggcggtggtagagaaaaccgttga

SEQ ID NO: 314034 - DNA, 3255 bp, Proteus mirabilis
atgaatctatctacgactgaaagggaacatctttattccgaaaccgaattgcttcccgcacaacaaaaggcgttgacaacgctatcagctgctcatgcgctggttaataagagctatcttgctgaactcaaacactacgatgtgttaccagtgggagaccagcaaagcgtgctacttaacagaggcggcgatgtgcgtattttccgtgtggaacgtctggttcaggaaaacaagcaatccgtacttgaaagcaccactgcagcttatactgcattgggcgcagcgggatacactgtattcctcttcctaaaatctgacggaaaagagactctgctctatattggcacacgtggtgagccggggaaaatgctcgggcaaaactcaggcgatttattgcaagagactttcaaagggcattttccgggcagcaaacttacggcactcacaggtaccgacgtagacgcactattagatgggctcagtaacagtgactcaattaaaacggtcactgctgttagcagcgtcccagggctttctacagaagaccaaacgaactttatgcaagggctggaacgttttatcgatgcagcagaaagccgtacttacgaggggctgatcctagccgagccggtatctatgcaagcattgaataccgttcgtacaggctatgagcaagtagcaacgcaactttctgcgctatcgagtcgccaatatagctatggcgttcaggacagtgatgctgtcaacctcagcattagcgaagggttaagccattctttgggcgaaagcatcggactgaccgaaacaataggcagcagtgaaagtacaacgacatcgacttcctattctcacacctccaatgaaagtaaatctttaccaaacaaaaaggataaaataattggaatgggggcgatggcaattggctctgttgtaggctctctcggggggcctttagcagccatggttggcggacaagttggcggacaaatcgcgagcatgttccaaacccaagacacagtaggctcctctgattctacctcaacaagtgaaagtagcagtcattcgaccaaccagtcgacagcaacaagtgctacaacaacaaagactgacacacgtagcacgaccaacacaaaaggcataacccaaacgcacggctcaacacagcaggtcagttttgaaacggcagacaaagggattttaaatatgcttgataaggtcgatcaccacttaaaccgaatcaacgaagctaaaagccacggtggctggctcagtaccgcttactttgtcagtgatagcgcagcctccagcgaagcactatccagtatttttttggggctaactcgcggtactcaatcgtctatggaagattttgctctgaccacatgggctggcaaaaaagccaatgcgataacacaatggttggggcagctagtgcaccctagactcgaacctagttttgcagggaatactcacatcccctaccttactcctgctaccttagtctcgagcaaggaaatggcgctacagctaagccttcctcgccgttctacgtctaccgtcgtggtacaagaaaccgctacatttggccgtaaagtacaaacactgaacgttggtgtcgctgacaccaacttacgaactatatcgctgggtcaggtacgccatttgtggactgacttgccacaaactgtggagttagaccttgaccaactgacaagccataccctgatcaccggctctacaggttctggcaaaagcaacacggtttacgctctgttggatcaagctatacaacaagacattccattcttggttattgaacctgcaaagggtgaatacaagcacgtcttcggaaatcgccaagatgtacgtgttttaggtactaataaccgatttacagagcttttgaaaatcaatccgttttcctttccggagcaaacccatgtacttgaacatgtggatcgcttgattgaagtatttaacgtctgctggccaatgtatgcagcaatgcctgcaattctcaaagatgcagtactgcgaagctatgaagcctgtggatgggatttacacgactctacgtcagcgtattgttctacgtggttcccgacctttgccgatttgcttatccagctcgaatctgtaatcgctcaatcagcttactcagatgaaataaaaagtaactatacaggtgcattagtcacgcgtgttcggtcaatggttaacggtctgaacagccaaatctttgcagctgatgaaatcagcgatgctgacctgttcgaccgtaacgtcattattgatttgagccgggtaggatcacaagaaacaaaatcgcttctgatggggctattgataataaaacttggtgaataccgtgcggagaaaatgctgatgaaccagcagttaaaacacatcactgttttagaagaagctcacaatattttgcgagcaaccccatccagtaatggtggagaaggtggcaacgtcgctgaaaaatcagtcgaaatgttgtctaatgctatcgccgaaatgcgcacgcatggcgaaggctttatcattgctgaccaatcgccgtcagcggtgcatatttcagctattcgcaataccaacactaaaatcttaatgcgcttaccggatgaaactgaccgattgttggcgggtaaatctgcagcactaacggatgagcaagttgatgaaatggcccgtttaccgcggggagtggcagtagtttatcagaatgaatggctcgaagctgtgctgtgtaaagttagccgttatcctggacaagaaaggctttaccgttatcaagcagcaccaaccagagcaataagtgaaatgacatttcgttttaatctactcacccatcttttgagtgagtacaatcaagtgccgtcagaagcaaatgaagagcaattggcagaagagctctatagaagtaatttgcccactgaaatgaaaattcaactcagaaagtatttacactctggcctgactgaaatgctattcagcgacttctcatttcttgtaccatatttattagactgtaagaacaagttagaaaacattatttgccgagctaagagcatagagaaaatgcattttaatcttcaaactctgattttcgaaaagtgccacatcgcatctcaagagcaagttattatgttgattcagcctttgctcagatcattagttcctaatggagagttgtacaccaaactctactctgagtggacacagtttgctaagagtaggcttgcatga

SEQ ID NO: 314035 - DNA, 954 bp, Proteus mirabilis
atgacagaatctacggaatttgttgcactaaatttaacagcagaagagtttaaagcggaaatcatcgactttataaaaagcagagattttaaagcggagttactccgccaaatattgtctgcattgccagatgacaaacgtgcgcttttcgaagaataccgaaccaatagcaccacggatccaattagtgaagacagttataagtgggaacgggaagggggtgcttatttcgccttgcaactccatatggcagaagaaaatttctgtttaaaacgattagagcaccttattcaggtgaaaagtcacctaacagaacgaggtatcgcaggtttttcccgcccggcctctagttcgacaacaagccacgaagaagccaaaagtacaaaggaaaacacaatgagcgctgatttttcatctgttgatttaacagggtttaccccatcacgctcgctaagcaatagcgtgaacagtggtgacctatcttctgttcgcacttcactatttatggaaatgaatgataagcgtctatcaacagcggttattacccaagctatagcttggacactctctaaatatccaaccctttttgttgtttacgaagaaagcgcatattcccagcagatggaacaagacaaggtaaaatgggacacgcactactaccacaaacaagagctatatgcaacatccaacttctcattggaacgtattcgtcatatggtcgtagtgcgtgagcacgtgtttacaattgcacaagaagacactcgccctgcaacattgccgaacactcaaccacaacacccaccgaaacaatcgaccccgtatcaagagcaaccatcaacgagcagcattcatcgccctgaatctaaaccagagaacaatgtactgaaatcgttactgctgattggtggtgtggtggcagctattgccttagttattctggctattattgtttag

SEQ ID NO: 314036 - DNA, 2289 bp, Proteus mirabilis
atgaatcacatcgctataactcataacccatttttagtagaaaccgaatttctcattaatggtcattcaccatctgaaagttcgaacatcacggcatatagctctaaacgcttacaactgtgggtagaacagatttttgatgacctgcaggcactgtttaatggaagtaacgacttctttattgaattcacaggcgtagaatcggacttcaatgacattaaagaagctgccagcaatgcaatccaaaaaggtatgtgtgttgaactgaagttcaatcctgttgtgcctgctgaagagcgcctggaaaaaatcaaagccctaatgactcgtgtcagtgaagagtcaccaaagtttgcggattacttagcgaatagcgacctaaaagccaagcaagacttcgaagacgcattgaacaatgagtttgatgcgtatgtggttgccaccatgtcttcaggcaaatccacctttattaacgctatactggggcaagacttgctgcccgctgcgaacgaagcaacaactgcaaccattgcccacatttttgacgacaaatccaaaggcgacgctttttacggagaacgtttcgaccgcaatggcaattgcattgagcatatggatgatgttgacttggcaatcatgaaggagtggaactctgactgtgaaaccaaaaccatcaggttgacaggtaatatccgcgctatcaaagaaaacaacaatgtccgtctcgtgctgaccgacactcctgggcctaataacagccaagacccggaacaccagcgtacaacactgggatttattcaggattcgaagcgtaatccacttattatttatgttttgaatggaacgcaattaggtacaaccgatgatgctcagttactaaggcttgtttcagacacaatgagtaaaggtggtaagcaaagtaaggatcgtttcctgtttgtggtgaacaagatggacatgttcgaccctgaaaagggggaagacatcggagaagcgctaaatcgcgtgaaaagctatctcgaagagaatggtattcacgaccctaacctcttccctgtttctgcgcggatggcttatctgctgcgcaagcaaggtgaattgacccgtgcagagcgtaacgataaaacaaatattgccgacctgttgcttgaagaaccaagtatggcgttcccacaatatatgtcggtcagtacctctgtaatgtcaacaatgcaggaaaaggcgcaaaatgatgacgctttacaagacaaagcgatgtggcgtgctcttctgaacagtggcttacctggtgttgaagccactatcgatgagtacatcaataaatacagctttccaatgcgactcaaccgcgctcatttggccatgaccgcagcgattgaatgtggaatgcaagaggcagagttaatcaaacaactggagattgatgaacacgcactttcaatacttcagtcagaaattcataatctaaaagtgcgccgtaaccagggcttcaatacacaggcctacaaagaacagttgaaaaaagaaggccgggatttgccaatggacgtgcacaatgatctaaatgatttagaaatagacgtcctctcacgtatcggagaattgggcgacttgtttatcggtgatgtcagtagcagagaggcagaatcgaaaatcgatgttgcatctaaagatattaaatttctgtttaatcgcagcataaacgagtacgagaaggcattcttgaactcacaagaaattattaaacaggagttgcatcaagagtatcaaaatcatatagcgcaactgtttcctgagagtcgaacattggagttacccgtatttcagtcactgaagaaatctataagctctttctctctcaatattgaattgaaaagtgatgaagtgcaaaccaaaagagtggtggttgattcatacgaaagaagtacttcgaaatggtataagccttggacttggggagatacagagactgttaaagtatatggcaataaagaatatgttgatcttccagaactttggaaggaacgaattatcgtaatccgcaatcagtttgcttccttaaagagtaacgctattcaacgtatcagagaagacaaggacaagctaattgataactaccttgtattcttggaaggcgaatttagcactaaatttgctaatattcttgccgatctagaacaaaaagttgaaaaccagactcagcgagaaaatgctattgcccaagcaaaaattgatatcgacgaaattcgtgttatcaagcaagaactggaagccattttacagttttaa

SEQ ID NO: 314037 - DNA, 915 bp, Proteus mirabilis
atgaagccctccccaaaattcatactcgttgcggcatctatgagtgcaggaaaatcctctgtaattaatgcccttattggtaaagagttactacctacaggcaacgaggcgacgaccgccaaagttgctcgcataatcgtaaccgtgaatactaaatctagtgtaaaagcttattgccacacaggaagcgctgttgaaacaagtaacaccctatgccctgagaaaatcaggctatggaaccgatcagacaaaatcgcaagcattgatatagccgttccgctctcagggagaatactaccttcaatgctggcagggtacacgttaatcgacactccgggagccaataacagcatggatattcgccataaagaacagtttataaatgccgtaaaggcttatccggcaagcccaatccttttcgtgctaaatgcaacacagctcggtactaatgatgacgcagagatcattcgtaccattcgtgaaataaatccaaaacagactgtgatctttgcgctaaacaaagtcgatgaattggatgaagaaaagggtgaaaccgccaaacattatgtagctttagcgcgcaaatacctggaagggttcggttacaataaagcccaaattatacctctgatggcacagtccgccttgatagcaaaaaaattactgaataacgttgaactgcggcgcacagagcaaaatatccttagagctgaattagagcgctttcgagaaaaccctttccacttcagaagtgcagcagtaggcgtgccacaagtgttgaagaaaaatgtgcgaagaaggctcgtaaaaatatcaaaaggaaaaattcctgcgatgagtaaagaagagctgcatgcctttgttgactacaccggcttaagtacggtgaacgctctcatcatgagtgcagtataa

SEQ ID NO: 314038 - DNA, 900 bp, Proteus mirabilis
atgaaaagcaacattcttgcaaaccgtttagccgaaattactgctatggcttatgctggacagccactaaatattattgaattggctgaaaaatttcatgtcagtacgaaaacaatttaccgggattttaaccgtttacgttctattctcgaccgttgtccaaacacaggaaattacctgctttcggcatctgctcggagccaatataacgaacaagatcttgttcgcttggttgatgatcttgggctgaaaaaagcacttccgcttaaagctgctcagtttcttcgcagttttattaatgactcaaccagcgattgttatcactttcaagagcaacctcttgaagctgactttatttcttcgcttcataaaacctttgaagctgcgattaaaaatcgaagaaacgttagcttcttatacaaagataagtctcggatggtttcaccatatctcatggtttacagccatggcagttggtacttagcagcaacttcagaaggcatactcaagactttctcacttgctcgtattaagttcatgtgcgtccaaaaagagtgctttgactatgagccatcgattgttgagaaaattaaaggacaagacaccatttggtatggacagcccatttttaacgtcactcttgaagtgtcgcgagacgttgcattttactttgaacgtaaagcacttttgccaaaacaaaaaatcattgaaaaacgtcaggatggaactctcgttatttcatcttcagcatggaattacaatcaaatagcaccaattattcaatattggatacctaatattcgagttatctctccgtgtgagctcgatacatacatacgcaaaaatcttaggtcttggttagaccaggtaaacatcgaaatggaagacgaaatgttatga

SEQ ID NO: 314039 - DNA, 897 bp, Proteus mirabilis
atgatgaatattaaagctaaacgagatattgcacataaaacaaaaatcttaaatcatgcccgtgagagcaaaaatattgctaaaacttgtcgtcattttgggatcagtagagaaactttttatacttggaaaagagcttatgaacgtgatggcgaaaaaggattaatcaacaataaaccctgtcctgaaaatccaaccagaagagttgcaaaacatatcgaagagctggttatttatctgcgtacgacttaccattttggcccccagcgcatcgcttggtatcttctgcggtttcataacatcaagatatcacgctctggctgttactatgtattactaagaaacaaattaaaccaacttccccaaaatcagcgaagtcgctctaaaccactatttaaacgttatcagaaacaagtgcccgggcaccatgttcaagttgatgtgaagttcctattttttaatacgccagatggtcaacgaattaaacgttttcaatatacggcgattgatgatgcgacacggatcagagcacttaaaatttatgaaaagcacaatcaggctaatgccattgattttattaattatgttgtaaataaatttccctttagaatcaaaacgattagaacggataatggtcacgaattccaatcaaagtttaattggcatattcatgatctcgggatggagcatgtttatatcaagccagccacccccagattgaatggaaaggtagagcgttctcatttaacagataaacaagagttttatcaattaatcgattataaggatgatgtcgatttacatgaaaaattagctgaatgggaggctttttataattgtcatcgccctcactcagcgcatgctggtaaaacaccgtatgaagtgttaaaaaaataa

SEQ ID NO: 314040 - DNA, 1059 bp, Proteus mirabilis
ttgaataaaaaatacacaaacatccagtatattgagcacacattctttaatgtacgaggcggcaccgcatacattacaacagaacattataattactctgaggcttatgctggtagtggtgaatttgcggttatttctttagtctctaaaattcactctgcccccttaaattccctaatattattggatgaacctgaagtctctttacatccatatgcacagaaagaattaattaactaccttatacagcaagctaaagtaaaaaaacatcaaatagttatttcatctcactcacctgaaattatagaaaaccttcctgatgaagctatcaagttattccatgaagatcctaatactggatatgtacatgtgcacaatgatgtaggtaaattaagtgtatttcatgttataggaaaaaaattcaacaaaattcctattttttgtgaggatattttagcaaaaaaagtaataatgaaagctatagaaaatgatgagaatttaaaacatagtttccaagtggaattttacccaggcggttctagctctatcgtttctcgatttaatactctaattgaaactaatcacagtttattagttttattagatggcgaccaacaaagtgcattatattccgaacataattcatttcctgatgataccgatatttcagataaaaatctgcacaatattatcgaacaattaggtttcgatgtctctttttcaaaaaatagcaattctagttctgttcctcaaatgaggaaatttttacaaggcgctaagaaatacatcgcttacttaccttttgattctcctgaatattttatactacaaagaaattcattatgtaacgaatttctttgtaataagaaggcaaaagaatgttttagacagttatcaattgacttgtatggagaagatgattcggatgctaaagcaatattgtttactcagttaatgtatcttaataaaattgattataattgccaagaattcattgggataagaaaactattaaaattttatttagctcactcaactataaataattggaataaatga

SEQ ID NO: 314041 - DNA, 705 bp, Proteus mirabilis
atgagcagaatagctactgattgggcatggagcctagacttaaaagctcctcaaaaaatactgatcttatctttagctgatagagctgatgagtatcactgctgttatccaagtatacagcggttagtaaaggatacagggttagataaaaagactattggtaaatggataaacctaatgattgaagatggcttgatatcagatacaggtgaaagaaaagggccaacaaaaagagtaagagttctacgtttaaacattgagtttgaatgtacccaaaaacgggatgataccaaaagtgggaatgtacccaaaaacgggtctttgaatgtacccaaaaacgggtctttgaatgtacccaaaaacgggtcacagaatcagtcactagaaacaaacaatgaaccaaagaaaaagggatttgatgcgaagaaggaatctatccctgactggttagatcgtgaaatttggtttaactggattgattacaggaatgaaatcaaaaaacctttcaaaactaaaaagacctttgagttacaggttaagtttttactggaatgtctcgaagagggttattctcctgaggaaataattaatcaatccatagctaatggatggcaagggctgtttaaacctaaaaataaccatcaggcaataacatcacagcaaggtagctggaacacgccggaggcatggagggatttcatttga

SEQ ID NO: 314042 - DNA, 219 bp, Proteus mirabilis
atgacagataaaacaggtggagcagcttttccgattccagcaacagagttacatggcactaccgcaggcatgacgttgcgagactatttcgctgctaaggctatgcaggggatgctttcaaacgaacaatgcaagccatttgatatgagttttagtgaagaataccacgcaaattgcgcataccgcatggcagatgcaatgttaaaggctagggggtga

SEQ ID NO: 314043 - DNA, 1878 bp, Proteus mirabilis
atgaatgtaaaagagatcattcgtcatgaaccatttggaacattactcggttatgcaccaggtggtgttgccatttactcttcagattacagcagtatagataaagaagattatgccgccaatgattcattccgtagttatattggtaatgagtatatggggcataagtggcaatgtgttgaatttgcacgccgttttctctatttacattacggggttgtttttactgatgtgggaatggcctatgagatcttctcgttacgtttcttacggagaacgattgatgacgatattttacccttgcaagcttttgcaaatggcagcaaacagccaccgacggtaggagcgttgcttatttggcaagaagggggagagtttaaagtcaccggtcatgtggcggttattaccgaagtattagaagataaaatccgtattgcagaacaaaatgtgatccacactaggttaccgcgaggtcaacaatggacacgagagttaccgcttaaagtgagtgataatggctattttatcgaagatacctttgataataccaccttgctaggttggatgatccaaacagaacctaatgcctacagtttacctcaacctaaagttgctcctgaattgttagctattcatgaggctaaattagccaataaggggcaatttgctggaaaatggctagatgaaagcgatccgttagaaaaagcctatgtgctagcacagcacggtcatacgattaatcaagacagctatgaatatttcactatttcagaaagtgctgagcatgaacttatacgtgctagcaatgaaatgcatttgatgtatttgcatgcaacggaaaaagtgctgaaagacgataatttactgcgtttatttgcgatccctgaagtgttatggccccgtatccgcctatcatggcaaaatagacgtcatcaaatgatcactggacggttagatttttgtatggatgagcgcggtatcaaggtgtatgaatataacgctgattctgcatcttgccatactgaagccggattaattattgaaaaatgggctaaacagggcggcattaaagcaggttataacccaggtgaacgtctattagatgcgttatcagatgcatggaaacacagtgatgcgaagccatttgtacatattcttcaagatgatgataatgaagaagattatcatgctcgatttatgcaacaagcactgactaaagccggttatagcagcaaaattctgcgtggattaaaagagctgcattggaatagtcgtggtcagttaattgatggtgataaacgtattgttgaatgtgtgtggaaaacatgggcttgggaaaccgcgttagatcaactaagagaagagagtgaacaacagtcacttattcctattcgtattggtgatccggcgggagaagttcgtttagttgatgttcttttacgccctgaaatcacggtttttgaacctctttggacacttattccaagtaataaagcgatattacctattttgtggcaacttttcccagataatccttatctacttgatactgagttcactttaaccccacgtttgtcacagagtggttatgcggttaagcctattgctgggcgctgtggtagtaatattggtttagttgatcaccaagaaaatgtattaggtgaaaccagtggtcaatttgaacatcaagaaaatatttatcaagaattatggtgtttaccaaaagtgtctaaccgatatattcaggtttgtacctttacggtagatggacattatggtggttgttgcttacgctctgatccgacattagtgataaaaaaagacagtgatattgagccattaattgtccttgaagataaacactttttagcggattaa

SEQ ID NO: 314044 - DNA, 945 bp, Proteus mirabilis
atgtttggatcttctaacgtgattttgagaaataagcgcttatccagttatcaattagcacgacttcacacttttgaagcaacaggacggcatttatcattcgctttagccgctgaggaattgtccttgacgcctagcgcgatcagccatcgtattaatacactagagaaagaattagggataaagctatttaatcgctttcatcggcgtattgaattaaccgaagaaggtgaacgtatttattgggcattgaaaaaaacacttgaagatattaatcaagagattttagatatctataatcaagaaatatctggcgtattaacggtgtattctcgcccttccattgcgcaatgttggcttgtacctcgtatttctgattttactcaacgctatccttctattgaattaaacttacttactggcaatgacgatattaattttcgtggttatggtatcgatctcgctatctatttcgatgataaacacctgaaaaatctctattgtgaagatttaatctcagaatcaattattcctgtttgtagccctgaatatgctgctcgccatgaattagtaggtaatatccatcatcttgctaattgtactttgttacatgatagacaagcttggagtaataactctgattttgatgaatggcgcgcttggagtgaatatatgggattaggattatttccaaataaaagtaatatttgttttgatcgctctgatttagctgttattgctgccgttaatcattccggtgtcgcaatgggacgtaaacgcttaattcaaaaacaactcgcaaataatgaattaatagtcccttttgataattgtgagtttttttgtgcacaacgctattatctggttacccgcgatgaaaagagtaacgctaaagtacaactttttattcaatggctgaaaaaacagatcttacaagggatgtga

SEQ ID NO: 314045 - DNA, 621 bp, Proteus mirabilis
atgagcaaatatagtttagatatccagaaaggaaaaatcggtaataatggtttggcagaaatcgcaggttgggttaagtgttatttagcccatccaattacgcgtgaatatatgggcgcaaccatggaaaatgtcatgtttgatgtttcattatctgcgggggcttatttagatgaaccaccattacccgaaaaagaaaataaagccgttagacgtagagaagatggtagtgcatgggagattgttgacgattatagagggacaactgcgtacgatacccaaaccatgaaatctattaccgttgattttatcggatcgttgcctgatacattaacgctattgcagcctagcagcgagttcgataggtggagtggtgaaagttgggttgctgatgagcgagctattaaagaagctcaaattaaatcagccaataaacaaaaaacagagttatcgcaagaggctgaaaatcgtattactcagctagaaagaaaagtgcgattaaatatggctagcgatgatgaaattgaattgctgaaatcatgggaaatttacaccgtcaatcttgatgatgtaaatccagagctggcgccagaaatcgaatggccacaaaaacctgagtaa

SEQ ID NO: 314046 - DNA, 252 bp, Proteus mirabilis
  misc_feature (237)..(246): n is a, c, g, or t
atggatattcgtgttttacgctattttattgaagttgttcaattaaatggatttagccgagccgctgatgctttatttattacacaaccagccattagtcgtagcattaaaaaattagaggatgaattaggcactgttttattaataagagaagtggatggagtaaaattaaccgatgacggtgctattttatatgagcatgcaaagcagatcctcgctcaatttaatagctgtctnnnnnnnnnngaataa

SEQ ID NO: 314047 - DNA, 714 bp, Proteus mirabilis
  misc_feature (44)..(53): n is a, c, g, or t
atgagcatgcaaagcagatcctcgctcaatttaatagctgtctnnnnnnnnnngaataaagcattaaatgataaagatgaacctttaaccggcgccttaaatgtcggattacctcctgttatagcctcaacctattttgctgatattatcatggcgtttagctctcgccatcccaatgttgaacttaaaatttttgagctgggcaccaaacagatggaagatgcgatgttagaaggcacggtagaaaccgctgcagtgatgttaccttttaatgataaagattttgaattaaccattttttcagaagatcacttgatgttattagtagcacaatcccatcctttggctaaagataagaaggttaattttaaacagcttattacagagcggtttatctttttttcagaagattttcgtattaatgatttggtacgtagtgcttgtgggatttataacactgaaccacaaattgtggggagaagtaatcatttagatttaattattgcaatggttaaagccggtgtcgggatcacactgttgcctaatagcatgtgtaataaatatcctatcgatgatttagtggttattcccattacttcccctaggttatcttatcaattagctttagccaccaatcaaaatagttatcaaagccgtagttgccaagcatggaataatttagcaatagagaaattaatgaaagagaatatttaa

SEQ ID NO: 314048 - DNA, 318 bp, Proteus mirabilis
atgaaatttgaagaattaacagaagcatcacaacaagcagcaagacaggttttttctgaaatgctgctaatcaaatttaagtcggaactagcattgcctgatggcacagttaaatatttaggtcgcagagttagagaagcatttgtgtccttggaaagtgaagagcctaaaactgaaatgtgctgtgggtctgatatttgtagcggtttgtcaactgacgctccattaagtagcggaggtctcggtattcaacagggcgttggacttgctatgaatagcgacacagcaaaccagttaaagcggaaaggaatgctttag

SEQ ID NO: 314049 - DNA, 252 bp, Proteus mirabilis
atgattaaatttggggttgtagccgttattttattggcttcacttttagttataaatatcaaaatacaaaatgataaaatacaatctattactgatgaaaatcagttcgagtgtatcaagcataaccatacaaaaaataacggaaatcatcctcattctcacaacaaacacctcacgcctcaatttaatatcaaagcaatacaagaaagttgctatgaaaggtggagcttaaaaatggatcgccactactaa

SEQ ID NO: 314050 - DNA, 396 bp, Proteus mirabilis
  misc_feature (198)..(207): n is a, c, g, or t
atgcattgtggtgcatgttgcgcctattttagagtctctttctattgggctgaaatgaaaagtggtggtggtgttgttcctgacgaatttaccgaacccttaaccccttttctatcatgtatgaaaggaactaatgagaaacaaccacgctgtgaaaaattgattggtgaagttggtgaatgcgtgagttgtgcaatnnnnnnnnnngcctcaagtgctccttcaatcggtttagcaaaatgtaccacttgtgcaatttatgaacagagaccatccccttgccgtgagtttgaacaatcttgggctaatggcgtaaaaaatgaagcttgcgatcgggcaagagccgcttttgggcttcctcctcttcctaatatttctctaccgcattctgcgtag

SEQ ID NO: 314051 - DNA, 378 bp, Proteus mirabilis
atggtggattttaaaccaacaataacactcactaatagcatgcagatcaacaaatttgtggcatctgcggtaagtagtattaatgagttaatagagaaaatacctgagtctgatgaagctcattttgctttgaaagaacttgaaagttcattgatatcaattgaagctaatacagatcaagaatcagtaagaagatcatctgccatgagcaaattcaagagacttatagataaaatcgctgacactggtagtaatctcaacctagcaataaaaaaagctgataaaggatgggaaatattttctgatttagcgaatagatataataaattagcagagtggtgtggattaccagtagttccttctgcactgttaaaataa

SEQ ID NO: 314052 - DNA, 900 bp, Proteus mirabilis
  misc_feature (880)..(889): n is a, c, g, or t
gtggtaaaagataaatatagttccgaactatcagaaatagtattaggattagatgatttatttcttgacgatactgctgtattagctgtgccagagaaaacttctattagagctcattgggaacaaatcatgtatcaaaagggctgggaaataatagatcgaatccattacacatctgaaggtactcggataaatattagtcgactcggaccgattaaaaatggtttgtgtgcggcgatccaaatgagacctgccttttcagtttttgataatttaagctcatggatttttcaacaaactacacttgctattagatatgatctgattaaaatgccagtgttgttaattcctatccgtgattttataaaagagtcaaatagttccgctatgcgacaagataattttgagatgaatttagaacgacttgaaatgttatctccgttaagtcataggtacccttttctaatccttggttataccaatgattcttctgaacatgcgattgagcctgaaattattgagctaccatttgattcatatgttaaatatgataaaccggtgattgataggtgtattgaatttcctcctgaatatcatcaagcgggattagatattcttaactattttgggacatacttaagggaacaatacccagaagaaaatgctttggtaaaaattgagcagaaaggtctctttgtccgattaataattgaaacaatagatggaaaatctgaagtaatagaaaaagctttacatgaatatgaattaattattaccggaaatgaaccacctgaaaaattcactaagaatgataaacttgttattgagttaaaaaatgaacttcgcattgccaagttcagaattgaatcgcaacaagatnnnnnnnnnnattcaaaataa

SEQ ID NO: 314053 - DNA, 270 bp, Proteus mirabilis
atggataaatcaagacagcagtttgaagagtggtttgcaccacagaaagaagaaatgaagcggaatggattaggtatgatttcgataacgagaatgcaccagcgtcagttatcagcatggcaagcatcacgagagagtttggagattgaattgccagagcctaaccctgaagattctgggagtcctaacttttacgacgggtataacactgcaataagtgatattcatgacgaattaatcagcaatggagtgaaaataaaagatgaataa

SEQ ID NO: 314054 - DNA, 132 bp, Proteus mirabilis
atgaacgcgaaaaatcagggaaatcatactcacgcgatacagcgtcaatggaagcgtgattttgtggtgtgccttctttcattgcgtcttgctgtgatatttcctgaatctgttgcaaccaaatatcaataa

SEQ ID NO: 314055 - DNA, 573 bp, Proteus mirabilis
atgcaacatatcattaaatcaatgactaatgcgtatattgaaaaaggctatattacttcacaagcttttattgccgatcaagatctctcaaatcatcaattaaccattaacgtaattgaaggaaagataaaatcaatctttattgataacatgacttctcccatggttgatattctatttccttcatatcaagataaacgacttaatttacgtgagttagagcatgggcttgaacaacttaatcgattaacaacatcacaatatagattagatattcaacctagtgacaggataggatactcgactatttttatttataaggaaaacaaaacgcatcctttcagaaatcaacttactattgataattcaggttcaaaagcaacaggtgaaattttactgacgaataccacaacaatagattcgttatttggatttggagagcagtgggatctctccttaaacagtaatacagatttattatattcacattattatagaggctatacagcgagtataaacattccctatggctattggttttatcaatatcagctgtctcttatacacatctga

SEQ ID NO: 314056 - DNA, 459 bp, Proteus mirabilis
atgattaaacaaatctttcggtttataattggggatagatttatccctttgaaaaatatagataaaaacgattttaatcgactttcagattttgagtcagtagagtggcgagtcagagttatccaaaatggggggatttataaaagggaatggcagaaacgccttgataatgaaagggaaggaataaaaacaaaaccgaaaatcaaacctgaaaagattaaaatatcaaggaaagattacgagataatatctaaaatcactgatgcaggatatattattttaaattttccggcagaggacaaaataggtcgattatctaatgttgataggattctgttagaccatctttcaaatgaaattaaaattgaattattaaattcaaaattaagtcttactaaccttgatgaaatcgaatatctacatttggctgtttttttagataatgtggtaattcaataa

SEQ ID NO: 314057 - DNA, 141 bp, Proteus mirabilis
atgagcaaatttgccctgatagggctgattactgtgtgtatcacagttctgtgcttctctttgttaatgcgtgatcgtttatgttcactcaattttacaagcggaggtacggtggttcaggcaacactatcatgtaattag

SEQ ID NO: 314058 - DNA, 579 bp, Proteus mirabilis; identical to SEQ ID NO: 289155

SEQ ID NO: 314059 - DNA, 393 bp, Proteus mirabilis
atgaaactgacaatatccttgcctttcattctgataactacgctgatctcagtgccagcgttgggtaatagttattctgcaatggaagggattgaaggacagcgatattctgatttagagaaatacaaagccaactgtccagcttgtatgagtgttgtacaaaacattaaagatatccgctatcgggcatgtgcacaatcagtcacgacagatgatgtgataattagggacccattatatggctatttgaatagtatgaaatttatgctaaataatgatttgtataatcaagtattgtctatcgttattaatgagaaggactgtattgatagcttaaattggcttgaacgagccaacttaaaaattgaatcattggtaaataagccaatttag

SEQ ID NO: 314060 - DNA, 855 bp, Proteus mirabilis
atgaagtatgtctttatcgaaaagtatcgggcagagttcagcattaaagccatgtgccgggtgcttcgggttgcccgcagcggctggtatgcctggcgcctgcgtcgccatcaactgaatcaccggcagcagttccggttgatttgtgatgccgctgtccaccgggccttcgctgaaggaaaacagcggtatggtgcaccacgtcttgcagatgaactgccggaatacaacattaaaaccattgctggcagcctgcgccgtcaggggctacgtgcgaaagccagccggaagttcagcccggtcagctaccgcgaacatggtctgccggtgtcggaaaatctgctgaaacaggatttttacgccagtggcccgaatcagaaatgggcaggtgacatcacgtatcttcgcacggatgaaggctggctgtatcttgcggtagtgattgacctgtggtcgcgagctgtcgttggctggtcgatgtcgtcgcgcatgacggcacaacttgcctgcgatgcgttgcagatggcactgtggcggcgtaaacgtccggaaaatgtcatcgtacacacagatcgtggcgggcaatactgttcagcaaattatcaggcgctgctgaaacgtcataatctgcgtggcagcatgagtgcaaagggttgctgttacgataatgcctgtgtggaaagcttctttcactcactgaaggtggaatgtatccacggcgagcgctttaccaaccgggaaataatgcggacaacggtgtttaattatatcgagtgtgattataatcgctggcgacgtcacagtgcctgtggcggtctcagtcctgaacaatttgaaaacgtaaacctcgcttag

SEQ ID NO: 314061 - DNA, 300 bp, Proteus mirabilis
atgacaaaatcagcaaccgtaagtaagaagccgcgtaaacagcactcgcctgaatttcgcagcgaagccctgaaacttgcagagcgtatcggtgttgctgccgctgcccgacagctcgagctttacgagtctcagctctataactggcgcagcaaaatacagcagcagaaaacgtcgtcagagcgggagaatgaactcgccgctgaaaatgcccgcctgaagcgtcagctggcagagcaggccgaggagctggccatactccaaaaggccgcgacatacttcgcgaagcgcctgaaatga

SEQ ID NO: 314062 - DNA, 3027 bp, Proteus mirabilis
atgaaagagattaaatcaggccgtattcaaattttgactgaacaggaaattcatgagctctattctcgtccaatatttaatcaaattgagcgtgaagaatatttttcattagatccgagtatcaaaaaaatcctcgctaaaatgggaaaaattgaaacgaaaatatatttaattcttctgattggttattttcgcgcgaagcctgttgtcgctcaatttaaactacgagaggttaaacaagatgtcgactatatttatgcgacacattttccaaatagaaaaccgaaatatccctttattgctaaaagcactcgagcgacattgattgctaaaatgcatgaaatactaggtttttcgcggttattaaaacgagataaacaagccttgatagagcgtttgagtgatgttgcaacaatctgtacatatccaaaatatatttttgatgaatgccttgcttttttaggacaaaacagaattggattagtgggttattccactttgcaaaatatgatcaccacggttttagctaatgagaggcatcgtaccgagttgatcctgtcaaatagcgtgccctcaataatacataaaaaattaaagaagatactgcatacaaaaggggtattaaatagtctatctggtcaacaaggcgcagctaaagattttacaccgacagagctcgcaagtgaaattgaaacgcataacaccataaaaagtgtgtatcccgacgtaaaacgtcttgttggtgaattgggattatcattaggtaatttaagctattatgcatcgattattcaacatcaatcgatttataaaattcgtcgatttcccgaatggcaaggcatgttatatctggtttgttatctattttttcgctatcaagaaactaatgataaattggtaacggcttttttgtatgtgacgagaaagcaaagggaagctgcgagtgcttcagctaagttacgcattgcagaagaactggaaattattcgtgaaaagttaatgcatgcgggtaatattttacacctctttgttgatgaaaccgtcagtgacaatacgcaatttggtgatattcgccaaaatgcatttacaatgatctctaaagatgaaattcagttaataagtcaacatcttaataagaatagttttgataaaacccattatgagtggctatacattgatacacaatacagaaaaattgcgaatacgatgagatcactttttctcgctattgatatcgaatgcgaaccaggattacaactgctgtcttcccaattattaacagcaaaattagaacttcaaaaagataagcacatttctaccgtcgatcagcgattgctattaaaaaacgataaaccttttattttgatagatgaacaggttaatacccaacgatttgaatactatttataccaaaaagtggctcggatgattgagagtaacaatatttacatcaatgaaagcgccagtaacaagcgtttagacgatgatttgatttcagcctccgagtggaaaaaaagccatgccatcattcaaaaaacaggattaacacgtctcaatacaccgatagaacaaacgctttcggaattaaagcaaaaactgagcgatcaaatggagcgtattggtcgtaatatctatgatggagccaatgatttcgtgacacttcaaccgcgttcaaatcagttaacatggaaactggcgaataaacgttggaaagatgatattgataatcccatatacaatcagctccaacatatggggatcattgaaattatggactatgttcatcaaaaaacaggctacttagatgcgtttaaaaatatcgcatcgaaaaagaaaaacactaaggctaaagaaggcgatttgcttgcttgcatatttggaaatggctcaaactatggtgtccatcatatgtcatcaatatcagatcgtgctatcggtgtgcttagagctgttaatgacggctatattcgacctgaaacaacgagtgaagccaatgatatgatatctgatgctttagcaaaactctccattttcaaatattatacgattaacgaaagtgccccatttggtagcattgatggccaaaaacatggttgccgaatcaatacatttaaagcccgtttttctgctaaatacttccgaaaagggaaaggtgtatcggcactcacattagtttcaaatcacgtaccaataaacacgaaagtgatttcagccaatgaatatgaggctcatcacgcattcgatttactctataataataccagtcatattcagcccaaaacattagcaacagacacgcatggcgttaacaacgtaaactttgctatccttgatctctttgggtatcagtttgccccgcgatatgcaaaatttaaacacgtttttaatgaattgtttgacatcgagtatgatgaaatcctttctctgaaacttaaaaaatcgctcaacttatcactcattcaggaggagtgggaaaatattcaatggataatttgttcattaagccgtaaaacgacaacacaaagcacggtgattactaagctttctaacagtaagaaaaacaatcgcaccttagcggctcttcgtgaatatgacagattaattaagtgcttatacgttctcgattatgttgatgacaaaatgctcaggcagtttgtccagcaagcacttaatcggggtgaggcttaccatcaattacggcgtgcaatcgcatcaattaatggtaatcaatttagaggcggcgatgattaccagatagaacaatggaatgattgcgctcgtatcattgctaactgcattatttattataattccgcattattatccagtttgattgaaaaatttgcgcgtgaaaataatcaagaagcagtaaatatgatagctgaattatcgcctgtcgcatggcagcatatacagttggctggtaattacacttttggccttaaaaaagataatattgtgctggaaagattactggagaatttagatcctctcatttcagaagaatcattaagcttagcggcatag

SEQ ID NO: 314063 - DNA, 645 bp, Proteus mirabilis
atgtatagtgcactgatgaatacaacaacacgaatttatgggtatcttcgcgcatcaacgcatgagcaggatgcgtctagagcaaaaaatgaactactgagatttgctgaaggaatgggactacaaattgcctgctggtttgaggagaatgaatcgggtgctcagcttcaccggccagaactctttcgtttgctcaatgtggccatgcccggtgatattattttagttgaacaggtggatagaattagccgattgaatacggatgactgggaaaaattaaaatatctcattggccataaagggttaaaggttgtgtctttagacctcccaaccagttatcaatttatgaatcgcactgatgagtttacagaacgaatgcttgctgcccttaatagtatgatgttagacatgctggcagctgtcgctagaaaggattacgaagatagacgtcgtcgtcaagctcaaggagtacaaaaagccaaacaagcaggaaaatataaaggtcgtccgatcaacagaatattacaccaaaaaattgaaggtctgctgatggagggaaaaagttatagccagatagaaaacctgataggttgctcaagacatacgatttcaaaggtatcaaaatcgatgaaagcagcgaaataa

SEQ ID NO: 314064 - DNA, 462 bp, Proteus mirabilis
gtgagcgcgtttcagcaggattttccggtcacccttgagggttcggctctgggagggcatcagctccttcctgaggcccttgcgcaccttctccagggcatcgttggccatgcgcaccacatggaacttatcgaccacgatgcgggcctgtggcagcaccgccttgaccgctgctcggtagggattccacatgtccatgctgacgatcttgaccttctgccggtctttcatcttcatcaggtagttggtcaccacgtcctgacggcgggtggccagcaggtcgagcagggtcctctcctcgatgttggtcaggatgcagcggtagcgcttgttcaggtacaactcgtcaatgccgagaatgcggggcgtctcgaagcggtgccagcgccccaggaattcggcgcgggcgttgaaaatgtcgcgtaccgtcttctcgtccaggcccgtggtatttatccatag

SEQ ID NO: 314065 - DNA, 351 bp, Proteus mirabilis
atggcactttatacagattatttggtatatgagtatggtgaggacttggagcatgattatgtttttatttctttaaaagaaggctattttggaaaaccactaaagtaccaaagtgttcttgatctagttagaagaatagttaaaagaactagaatagagtttacgccgcatatgctacgccacactcatgcaacgcagctaattagggatggatgggatgttgcacacgttcaaaagaggttgggccatgcacatgttcaaacaacgttaaatacctatgttcatctttcagatcaagatatgaaaaatgagtttaataaatatcttgagagaaaggaacataagaaatga

SEQ ID NO: 314066 - DNA, 315 bp, Proteus mirabilis; identical to SEQ ID NO: 19841

SEQ ID NO: 314067 - DNA, 1416 bp, Proteus mirabilis
atgacagcagagctattagtgaatgtgactccctctgaaacccgagtggcctatatcagcgggggcatactacaagagatccacgttgaaagagaagccaaacgaggtcttgtcggaaacatctacaaaggtcgggtaagtcgtgtattacctgggatgcaagctgcatttattgacattgggcttgagaaagccgcttttttacatgcttctgatattatgcctcacacggaatgtatcgcgggtgaagagcagaaaaaatttaatgttcgtgatattgcgcaacttgtacatcaaggtcaggacttgattgtacaagtggtgaaagatcctctaggtacaaaaggggcacgtcttacaacagatatcacattaccatcacgttacttggtgtttatgccgggtgcttctcatgtgggtgtttcacaacgtattgaaagtgaagaggaacgtgagcgcttaaaacgcttggtagaagagtattgtgatgaaaatggcgggtttattattcgcaccgccgctgaaggtgtcggcgaacatgaaataaaacaagatgctgcttttttaaagcgcctatggaataaaatcattgagcgtaaaaaaagaaataaaacgcgcattcaaatttatggtgagcttgctttagcacaacgtattttacgtgattttgcaggggctgaattagatagcattcgggttgactctaaattaacttatcatcaattacaggagtttattggtgaatatattcctgaattaaccgctaaacttgaattacaccaaggtaatcaacctattttcgatctttacggggttgaaagtgaaattcagcgcgcgttagagcgaaaggtcgagttaaaatcaggaggctatctgattggtcatcgtaatttagaagagacgatttttaataccaatgttgaggcgagtcaggcgatagcgcggcaactgagattacgtaatttaggcggcattatcattattgattttattgatatgagtaatgaagatcatcgccgtagagtattagcttccttagaacaagcattgagcaaagatcgcgtgaaaacgaccatcaatggtttttcacaattaggtttggttgagatgacacgtaaacgaacccgtgaaagtctcgagcatgtactttgtgatgactgtcctacttgccaaggccgtggtacagtaaaatcagttgaaacggtatgttatgaaatattacgagaaattgttcgtgttcataaaaccatagacgcagatcgctttttggtttatgccgcccccgctgttgtggaagcactaaaaggtgatgaatcacatgctttagccgaagtggaaatttttgttgggaagcaagtcaaagtgcaaactgagctactctatagtcaggagcagtttgatgtggtgatgatgtaa

SEQ ID NO: 314068 - DNA, 255 bp, Proteus mirabilis; identical to SEQ ID NO: 289247

SEQ ID NO: 314069 - DNA, 1422 bp, Proteus mirabilis
atggattacctacccttatttgtggaattaaaacagcgcccagtattactggttggcggtgggcatgtcgctgcgcgtaaagccgtactgttattaaaagcgggcgctcggttacgtgttatcgcgccacagttatgtgatgaattgcatcttgcttatcagcaaaatcaaattgagtggattgcagggcaatatcagtcagagtatttacttggcatgatgttggtgatcgtggcaacagacgataaggtattaaatcaacaagtgtatctagatgcgcaagcacgccacatttttgtcaatgtcgtcgactctcaaccccaatgctcttttatctttcctgccattatcgatagaaatccgatattaattgccatttcatcagcgggcaaagcccctgttttagttcgtatgatacgggaaaagctagaggcattattgcctacctcattagggactatggcgactattgcggggaaatggcgcaataaagtgaaacaaaaactgactggttttcaagcacgttgccacttttgggagcaagcgtttagcggcaaatttgcctcattagtggcaagtggtcaattaatacaagcgcaagcacagcttgaacaacaactgtctcatccagatagcccacaaggtgagcttgctttagtgggagctgggccgggtgatgccgggttattaaccttacgaggtttgcaagttatccagcaggccgaggtggtactttatgacagtttagtcagtgcagacatcttagaactggtacgccgtgatgctgatagaatttgtgtgggtaaaagagcggggcaacacagtacgttgcaagaagaaatcaatcaattgatcgtgaaatatactcagcttggtaaacgagttgtcagactaaaagggggcgatccttttatttttggacgcggaggagaagagcttgaaattgcggtacaacatggcattccttttcaagttgttcccggtgttaccgcagctagtggggccagtgcttatgcgggtattccattaactcatcgtaactatgcgcaaagtgtcacttttatgactgggcattgccaatcaggggggatagagccagattggcaagctttagcgcaagctaatcatacgttagcaatttatatgggaacgacgaaagcagaacttattagccagcgtttaatagagcaaggtcgttcaccactcacccctattgccgtcattagttgcggtacacgccatgatcaacagatcttaacgggaaatttaacacaattagcgcaattagctaagcaagctcccaccccggcattattaatcgttggagaagttgctgcattacatcaccaacttgcgtggtttggtgatagacaaactcaacatacctctgccatccactcatctttggttcattttgcctaa

SEQ ID NO: 314070 - DNA, 1581 bp, Proteus mirabilis
ttgccagaaagtggttcggcttctgatgtgttgattgaattggcaaaacctactggtgcttctaatatagaaagtgcggaaggtaacttacaagatgccttatatttatcagtacacggtatcagattatctagatacaaacataatagtgatcctctaaattctgccttagaagcatcaagagaattaaagctaccattaatcgttgatatggactgtgattacagcatttttgtagttaaagcgggagataaaattattgggtttggcgatcatacactaacaaaaaaagggaatgacatccctagtctccctaaaaatcagcaccctgatagacctattggcgtactttctgacttcaatgttgatgcagggatagttgtttatcacgaaccaaataaatccgcacagaatatccttttacaagggtttagattagaaagcaaaaatcattctcgatatgctatttatgcaccatctattagtgttagcaccatagaaagagtcagtcagcttaatttcttgacggggttaaggtttaagaatgcatatttaatgacggtacgtgattttatgtctttgtattggtactcagagagtgacgtttatacagataatatttgttatgatttttctgatggcagctacaccgctggaactagtttgatactagaaaaagtttattgtacaaattataaatggccgttttatgcaagaaatttagagtatagtacatggactaattgtggtggagagggcgttaattctcataatcaatctacaccaacaaaccttcctcgtgtgtttgaatttgttaattgtacaaacttagttttaaatacaccgagtacagagaatttgtatggtggatttattcgtgctgtttcaacagttgatgggggaagccagggtgcttcaactattactattaataacccacaggctaccgcgggaatatttggtacgtataatgatgtaattaatgcaaaacttttagatatagatggtctcgttaactgtatagtgaatggcggggttatgactggagccgcacctggatattatcttaagtttggaggtgcaaagagtgattcatgtttaattttaaatgggatggatatgcgatttgtgtggaatgaaataaggaaagatatagagaaatatggaggaataacatatacaaagggtacaaacccagttcaatgttggagagttggattaaataatcctcaaggcgataatacgattgcagaatggaaaaaaacaactgttgattattatggtatggcaatcggaaatcggataaaaacagtgctaggtggctggtatgatattgaagtgagtgtggtgctcagcgctttatctaatggagctgtactacttaaaatagctgatgatgaattgtctgatggtgttgatcacgctgctacatatgttagcaaaacagacggaaagaagtcagtaaagttaaattatacgggtagacttgcgtctggtaaatatatatatgtatcgctcgtaaatgcgcagtttgattcaacatgggaacaggattcgctaattaaagtaatactaaaatag

SEQ ID NO: 314071 - DNA, 666 bp, Proteus mirabilis
  misc_feature (635)..(644): n is a, c, g, or t
atgcaaaaaccaatcctttcttgtcttttgattatgggttttttaggtagtgctatgtctgttttggcacatggacatcatcatgaaaaagtacgcacacaagcacaaatagatgctgcgaatgggatttttgaggacaaggacgttctcaatcgctcattaagcgattgggatggcgtatggcaatctgttgaaccctatctgcgtagtggcgaattagatatcgttttgcaaaagaaagcggagacgaagcaagataaaacagtagaacaatatcgagcttactatacacaaggctataaaaccgatgttgatatgattggtattgagaataatatcgtagagtttcatcgtggtgataaagtcgatagctgtgaatatcactatgatggttatcgtattctacattatcaatcgggtaaaaaaggtgttcgctatctgtttagatgtgacgatgccaacagccaagctccacggtttattcagtttagcgatcatattattgcaccagaaaaagcacagcattttcatctatatatgggaaatagttcacaagatgaattacttaaagagctaactaattggccaacctattacccttattcaatgaaaggggaagatattgttcatgaaannnnnnnnnngaaatgctttatcactaattaa

SEQ ID NO: 314072 - DNA, 726 bp, Proteus mirabilis
  misc_feature (674)..(683): n is a, c, g, or t
atgttgtttgccgcggggatcgggattgacttaatgtttttctcagtcgctgagcctattacccaatatatgctaccgcctactggcgaaggtgaaacaatagaagcagcccgtcagtcgatggtgtggacattattccactatggcctgacgggctggtctatgtatgcactgattggtattgcactcgggtattttagttatcgttataatttacccttgaccatccgctcggcactttatcctatctttggtaatcgtatttatggccccatcggtcatactgtcgatattgctgccgtattgggtactatttttggtattgccaccaccttaggtattggcgtagtacaacttaattatgggttgaaagttctcttcgatttaccacaagggttaggtgtacaaggtggtttaattctactttccgtaattatggcggtgatctcagccacatcaggcgtcaataaaggcatacgtattctttcagaattaaatgtattactcgctttagggttaattttatttatcctatttgctggtgatactgaatttttattaaatgcgttagtacttaatgtcggtgattatgtaaatcgattcttaggaatgacactaaatagctttgcttttgatagaccgacggattggatgaatagctggacacttttctnnnnnnnnnncttttcttctgggcttggtgggttgcttggtcaccttttgtag

SEQ ID NO: 314073 - DNA, 975 bp, Proteus mirabilis
ttgatcatcccttttgtattcacgctattatggttgtctatctttggtaatagtgcactttatgaagtgatccacggtaatcaaacctttgctgaaacagtattagcctcaccagaaaaaggcttttattctttacttgaactctatccgggatttggtttaactgcttccgtagcgactattacaggattacttttctatgtaacctcggcagactccggttcattagttttaggtaatttcacttctcaactgagtgatataaataatgatgccccaaattggctgcgcatattctggtctatcgctattggtctattaacattaggtatgttaatggcagacggggtttctgctttgcaaaataccacggttattatgggattaccttttagctttgttattttctttattatggcaggactatataagtcattaaaagtagaagattttagacgcgtcagttcattaaacaccaatgcgccagcacctctttatggtaacaccaccatgaactggaaacagcgtctaggtcgtgtgatgaattttccaggtactacctatacccaacggatgttagatttagtttgtaccccagcgatgcaagatgtggctaatgagctgtcattacgtggtgcaaatgtctcgtttaatctttacccgctggaagaagagcctcgtttaaaccatttagaattagtggttgatttaggccaagagcagcattttatttatcaaatatggccacaaaaatactcagtacctgcatttacttatcgtgctcgtcgaggaaaatcccattattaccggctagaaacctatttatgggaaggttcacagggtaacgatttaatggactacaccaaggagcaagtgatcagtgatattctcgaccaatatgaaaaacacttaaactttattcacttaagtcgtgaagcgcccggtgcaacattaacatttccagaatcaaattaa

SEQ ID NO: 314074 - DNA, 168 bp, Proteus mirabilis
atgaaaaatactgatctagaattaattattaatgaaaagctaagtattgagaattttcacgactacgcacctaatggtcttcaagtagaagggcgccctcatattcaaaaaatagtgacaggagtaacggcttgccaagctttacttgatgaagcggtacgcgtttaa

SEQ ID NO: 314075 - DNA, 342 bp, Proteus mirabilis; identical to SEQ ID NO: 301151

SEQ ID NO: 314076 - DNA, 1581 bp, Proteus mirabilis
  misc_feature (1193)..(1202): n is a, c, g, or t
atggaaagtcatgttaatggtgaaatgattgctgtatttgcagaatatcaagatattcaaatcattgctaaacaatgtcatgttgaattagctgcaattaatggccataacaacttatcattcgcggggcaacccgatgatatgcaaaagtttactcaaatattgaaagcaaagaatattcgatttagagaaatgaataacgtgtgtgctgctcatacctcttatattgataatattcttgatcaattgatggaatttactgagtcattatcagcctcacaaggaaaaatagccttagtctcaggctatacagggcaattaatttctcaaaaagaacttcaacatccatcatattgggctcagcaactacgcaatacagttatgtatcaagatgcaatacaaacgttagtcaatcatggtgtcacccatgctatggaattaggaccaacttctgtattaagtgatcttggtgaacgtgaaggcattactgagattagttggataccaactgccagaatgggagttgatgaaattcagatgaaacaacaggctgcaacaaccctatttattgcaggctatgatttaccatggcagtcactgtttaaaactcaaggaagttatataccattacctctctatccctttgaaaaacaatattattggtatgaaaaaaaggatagtgaaaaatatcaaccacaaaaaagcgcatttgatttacctattagccaaggtcgtgaaacggcattaaaagcgcttacaacactcgatcttcctcgtttaaactcatttaattcaacacttaccactttacataattattacgtcgataaaatgatatgctcgtgtttaggccatgagttgaatacccccatgtctgtaatcgatattatgcgagcaggacgcattttaccccgctattatcaattattagtacgtttattagaggcctgtgttgaggatggatattatatttaccaacagataaatcagcacaactactataaaaaaataaaatctatttctagtgataaattaccattattattccatcaattacaattagatagcgaaggtcttcaatctattcctgacaccgtcaagcgagcaggagagcaactctacgatatgatgacaggcgtgattgaacctgtttcagtgatctttcctgaaggtgcatctcaaggtgttgaagnnnnnnnnnngttctctatcaagattttagttttggtcgttattttaaccaaattgctgccgcggtacttaaaggattactttctcactaccagcccactgtggctaagcctttgcgaattattgaagtcggtggtggcacgggaggaaccacctcttggctgctacctattttatcaaccatacaacatgttgaatacgaatttaccgatatttcacctatcttcacccgacgtgccgcacaaaaatttagtcaatattcatttgttaactatcgagagttcaatttacaacaatcccctgaaatacaaggttttcaatctgattattatgacattattattgctgctaatgttattcatgccactcaacatattggagatacattaa

SEQ ID NO: 314077 - DNA, 5637 bp, Proteus mirabilis
atgcgcgaaataaccaaacaagctcgcttatttgattttgtttttggcccactggtgttacccctccatgatgaaaagatccgtaaaggaaaactatttttatcaccagaattatggcatcaacagtgtcgcttagcaggatttcaacatattcgctggttacctgatgcattaccagaaaccaaagatatgtgtgaacatattattctcgccagtgtttcgacagaaaacgatcactttgatcaagagttacctagtgacaccaagatacaacaaagttcacactaccaatggcaattaacaccttgtgtggaacaagatcttatcaagccaacattaatatttaaccatcaacaaacattgccttctgaaatcacagctattttatccgctattggatgtctttctgaacagggcgaaaatcaattaatcgttgccaaccttgcagatcctttaattatcgccgagcagatccgccaaatattactgtcatcgtctgatgggtttgttgttatcacgcaacaagcctgggcattaactgccatagaaacggttaatccagcacaacgtagtattcgaagtttattaaaaactattcaaaaagaatatagctcaaggttaattgccattgttgatttaggtataaatgcctcatggtctgaattagttcctgcttttatacaaatagaacaaggtaataatgaaattattgttcgtaaccattgctgctacttaccacaattaaccccactgccctcatcttctacgatcatagcgcagaacatcatggtatccccgcgctggcatattattactggtggttttggaggcttaggtcgaattacagcaagttggttagtaaggcaaggtgctaaacgtatcgctattttggcaccacgagctgatagcagcgcattagattggatgaataacttacagaaatctaaccagctagaaataaaatggctaacatgtgattgtcgtgataacgctcaatgtcatgcagcactcactcagcttgaaaatgaaggtggcattgaggggcttatacacagtgcaggtattttggatgatgcacttatgacacaactcacccctaagcgtatgtctgacgtattttctgttaaagcgatatctgccaagcaattttgtgatgctttagaaaaaacagatgccagttaccttattttatactcctctgccgctgcaactataggctctgaaggacaagcagctcattccctcgcttgtggatatttagatggattagctgaatatgcacgtcgcaatatcaagggattaaccgtcatttctatcgcttggggggcatggcaaagtgttggctttgtggcagaaaaacaactccatgataaattacaacacaaaggtatgagtacgcttactactgaggaaggactggcacatttagatgcttgtctgctagataatacctcttgtcgccttgcaatgcgcttagcgactccacctttaatgacacaaaaaacgcctttatttcatcagactaatcataatgatcattatgataaccatgaaattaatcacactcgccagctttgtgaaaccccaactcaaacggatcaaacagagccggtaagccctaacagggttgattatcgcgttggtgataacttagaacagtggctaacagcatgtatcaaacaactgttgcgtcttggtgatgaacatattgatactcacattgaactattccaattaggactagattctctctctttcctcgatctcagtgcggaaattaagaaacagtttgcggtcaatattgacgctgaacaatcttatgatgatatgactattgctggtttagcctcagttattcgaaccgcagcacctgagaaatttactgtgacagaagcactccataatcaagacaacatttcccacacaatggagtcagaacgatatgccccatttccattaacaccaattcaacacgcctattggatcggacgtaaaaacctctttaactacggaggcgttgcttgccatgcaatttttgaatgggattgtcaacgccatatatgggagccggcctcacttgaaaaagcttggaataaagttattcagcgtcatgatatgttgagaatgatcatagatgatgatggacaacaacgtatcttaaaagaagttccttattttcattttattcaacatgacctaacaaatttaacccaacaagagcaacaagagagcctaacacagataagggaagccctttcttatcgggtattaccgactgagtcatggccattatttgaagttgaaatttcttggctaaataacgattgttacagattacatatcaatctagatttactgcagtttgataccatgagctttaaaattctgtttgatgatctatttaacgcctattcaggacaagaattaataccacaaacatttaccttccgcgactactgcttaaaaaatcaaacaaatcgtaacagtgatgagtggaaaatggcatggtgttactggcaggatctattatctgatttaccttctgccccatatttaccgataaagaattcatccattactgaacaacctcgttttacgactttccaacatcatgtttctatagcgcaatgggacaaattaaaacagaggtggaaaaagcatggtattacaccatcagcagggcttttaacactttttgctttagttttaggtcgctggacaaaatacccagcctttacactaaacttaactttctttaatcgtcaaccatggcacccagatgttacacaacttattggtgattttacctctgtactccctatagatatttatctagataacgactgtacattaaatgagtcaatggcaaaaatacagcgcagactttggcaacatttaagtaagtcccaagtaaatggtgtagagattttacgtgaatggggacgctataaaggggatagtagccaatctctgttacctattgtatttactagcatgttaggtatgacactagatggtgacaatattgatgaagcattaaatcagcttttcggccaacccgtatatagcttcgcgcaaacacctcaagtttggttagatcaccaagtaatggaaggaaaagaggggctaacattaaattggttctgcatggatgacatctttgctgacggtttattaacaatgatgttctctgattatcaaagcttgatcactcaattatgccaagatgaagataataatcaatcagttgataagattattgcgcaacttccttcatatcaacatttagcaatagataatcacctccaatcacgctatcaacaactcgagcaaacattggaaaatcatccgcaaatcaaacgtgctcatgctatggtaatggtaaaagacgatacgaaagtagagcctcctctacaattactgtttgaagcctcttctgatattccactatccgttattaaacagcccaattggttacctaatttactttcgccatcagcttcactcagtgacattattgaaaagagttggcaacgatttgaggaacgagcacggtatggcatatgtcacacactgtatcgaaatgctctttttaccgagctaaacacaccaatcaccctagctgaaatagtggctcgtttaaaagcaaagcctcagtatgagaggctacttagtcagtggctagatttattatgcctgcatcacttattaaccaaagagggtgatcagttttatgccacaacacagtttattaacttatgtttatctgccccagtatttcaacaacctgttaatgattgggaatatgtactttgggattaccttgaacaatcactaacccaacatgaattactctttagtggtaaggtttctcctctttcactactttttaattcagatgaaattaccacagcactatacgccaaacaccctgcactaaattatttaaatcaatgtgcaaaagatattgttagtgcaatggttggtgcaacatcttcactcaatattttagaaataggggcaggtacaggagctaccactcaaggtatagtcgcagtacttaagaatacgcattactcatacacctttactgatatatcacattacttccttgataaagcgcgaaaaaaattcactgctgtaggagaaatgcgctatcaactctttgatattaatgcaccaatacaattttctcatcatccagataatggctatgatctgatcattgcatctaatgtattacatgatgcatcacatatcggccacgcactaaaacggattagaagcctgttaaaacctcaaggctatttattatttatcgaagcaaccgagtgtcaaagtgctatgcaaatggcgactgttggctttattgagggattaagtgcatatcaagataagcgtatattgacaaataaagcgatgcttgatagtgaaagttggcatgatattttaatcaatactggttttgaaactattggtcaatggccccaaacagattcctcatctttgcgacaaacactctttttagcctctcccactcgtggaggaaaaccttatttaggtaaattacgtgattatttatctcattctcttgatcagaatatcgactcttttgagttgttccaatgtgaaaatattgaagcaacccttaatggcatagcaacatcatccgctcaagagctaaatgaacagatacaacctgttgcaatacctgatgtaccaaccaatatgattaatgaaatcattgcattatggtctgagttattaggtcgtgaggtcaatagtacaaatgatttcttccgttctggaggagatagtttgattgcaaccaaaatgatcagccaattacatcaacggggatatccagcaacattacaacagatttttacctatccatgcttagccgatttttgtgctcatttagagcaggaaaagcaatctcaacgagagtactcctctttgatacctctaagcgctgtatctgctccaaaaccttaccactactttatggtacatgcttctgatggtgatcccggtgtttacctacctcttgctgagtcgttaaataatacagtgtggggattaacagttacagatgcttcaaaactaactgatttggatacattgttatcattacatttatctagcataaaaacagcacaacagactggcccttatattcttattggttggtcatatggtgcttttattgccagttaccttgcagaacaactctcgcaacaaaatcattccgtattattagtattaatagatcccgtctatcgacatgattttattaaattttgtcatgatgactcagatagttcatcagatgaaaataagcagcttgcatgcactaaaagacttatgtcattcctacctgaaagtgacctaccattatctgatgatatcgcctgtttatggctggaagccaccaaccacccaacagaatggacatcacctgaaaaagagtggtaccaacgattaccgccacatacccaacatcactatttttcaggggagcactggtcaatactgcaagatcgcgctaccagcacacatctggccgaaatcattgatcagtgggtgcaacaaaaactttctaataacggatatccatccgaaggaggtaattaa

SEQ ID NO: 314078 - DNA, 198 bp, Proteus mirabilis; identical to SEQ ID NO: 14615

SEQ ID NO: 314079 - DNA, 585 bp, Proteus mirabilis
atgtcagagacaattaataaattagcgcaagagtaccgtgttgttttagtacatggtaatgggcctcaggttgggttgttagcattacaaaatcttgcttatcaagcggttccagcctatccgttggatatcttggtcgcggaaagccaggggatgattggttatatgatgatgcagaaaatcaatcaaaataatcctacgcaagcaattactacagtaatgactcgtgtttctgttgatattaatgatgaggcttttagagagccgagtaaatttattggtcctatttatgaggaagcagaaaaagaagaattaataaataaatatcaatggacatttaaaaaagatgggcaatattatcgccgtgtcgtaccttcaccagcacctcaaaaaataattgatatagaggcagtaaagcttttattagataaaggtcatattgttatttgtggcggtggaggaggtattcccgttaataatataaataatgaatttattggtagtgaagccgttatagataaagatttaactgcagctttaatttctcgtgagttaaatgcagagcactattttaacagaggctga

SEQ ID NO: 314080 - DNA, 555 bp, Proteus mirabilis
atgttaaacgaacaaaatcgtgctgagtttctgcaaactattgctcaaaaattaggacgtgaggtgacgcatacgccaaaaccacaagatccccctattaataatttagctaaaacacgcttaacaaatttaacccaagatgaattatgcaaagaatttactgattttgcacaaacccagcaagtaagatgcgttatcactaaaccagaacaagtgataaatagcttaatagcgctttgtgaaagctatgattgtcaaggctcagtgataataagtggagatgagcgcttaaatgcacttggtgtaacacaagctattagtgaaaaatatgaaacttatatttgggatcctaaactcggtcatgaaaatattattcatgctgagcgctctcaaatagggattgtctttgcagaagcgggattaacagaatctggcgggattgtgctgttttctttttacgcaaaagtgacattttaccgcgagtggctcaacttgcagagcgtttacacaaaatggcacaagatgggatcagaatgccttcatgtatcaatttaa

SEQ ID NO: 314081 - DNA, 276 bp, Proteus mirabilis
  misc_feature (181)..(190): n is a, c, g, or t
atgtcagactatctatcatttttactgggaattgttcctttagccgttctgatttttatgattttaaaaatgaaatcggccgttcatcacgctgtcctcgtttcgctaattatcactgtggctctcgctatttttcattggaataacacccttcaatttgcctctgtatctgtactttatnnnnnnnnnntttgcctctgtatctgtactttatggtgcggtaaagggattatggccgattattatcgttattctggcggctatttacagctataa

SEQ ID NO: 314082 - DNA, 348 bp, Proteus mirabilis
  misc_feature (322)..(331): n is a, c, g, or t
atgaacaataatcgcgcactactatgtctggaaaaaattggctttcaactcgatagcaaaattattctagataatgtgactttctcactacaaccttctgaatttaaattgattacaggcccttctggctgtggaaaaagtacgttattaaaaatcattgcctctttattatcaccgacaagtggcacacttttctttgacggaaaagactacttaaccctttctcctgaacaataccgacaacaagtttcgtattgtactcaaaccccgatgttatttggtgaaacggtttatgacaatcttaaatttccttatttactannnnnnnnnncgcaaaatcgccgttga

SEQ ID NO: 314083 - DNA, 846 bp, Proteus mirabilis
  misc_feature (770)..(779): n is a, c, g, or t
atgtcagataatgtcatctcctctatcggcaccaatcaaactggtgttaataaccgtgttcaattacgcaaaacattgacgctaatgcaagtcgtcatgatggggttggcatttttacaacctatgacgatttttgatactttcggtattgtatcaggcataaccaatggtcatgtggcaacatcatatgctattgcgttaaccgctattttatttaccgcagtgagctacgggaaattagtcaagcgtttcccttcagcaggctctgcttatacttatgcacaaaaatccatgagcccacatgttggttttatggttgggtggtcttcattattagactacttatttatgccaatgataaatatcttattggctaaaatttatttacaagccatattcccaggcgttgatccgtggatctttgttgttgcgttagtcgcgttaatgacattttttaatctacgcggaattaacgttgtggctaacttaaataccgttattgttgttattcaagtagctgtaatggtggtatttgttggtttattaattcatggcgtatataacggcgaaggtacaggggagttatggactttccgcccatttgcgtcagtagatgctgaattaatcccaatgataaccggcgcgacaattttgtgcttctcgttcttagggtttgatggcattagtaccttatctgaagaaacacccaatgccggtaacgtgataccaaaagcgattttcttaactgcgttaatcggtggtttaatttnnnnnnnnnnagggtttaatttttatcgctgtttcttattttttacaattatatttcccagatatttcacgttttaa

SEQ ID NO: 314084 - DNA, 1536 bp, Proteus mirabilis
atgcaatctactcactcaaaatcaagccgaaccttttttggccatccataccctttaagctctctgttcttcacagaaatgtgggagagattttctttctacggtattcgcccattattaatcctatttatggctgcaaccgtttatgaaggtggtatggatattcctcgagagcaggcatctgctattgtgggaatttttgctggtggtgtttatttaacatcattgccaggaggttggctggctgataattggttgggacaacgtcttgcggtttggtatggctctatctttattgcattagggcacctttctatcgcactttcagcgttttggtctcagaacctattttttatcggcttattgcttatcgtattaggtacaggcctatttaaaacctgtgtcactgttatggtgggaaccctgtataaaaaagatgatacacgccgcgatggtggtttctccttgttttacatggggatcaatatgggctcatttatcgcaccactgatcaccggcttcttagtccgtgattatggctggcattggggctttggtattggtggtattggtatgctagttgcactactgatcttccgcttttatgccgtaccgacaatgcgtcgctttgataaagaagttggcttagattcaagttgggatcgccctactgttgtgcgtcgtaatgtcggacaatgggtattagcacttgctgtgatattaattgccattgttggtttaattatttcaggcactattccatttaatccggttattgttgccaattttatggtttatgtgatctccggcagtgttatcgcctattttatctatttattcctatttgcaggattaagtagtagtgaccgttctcgcctgtttgtttgcttcctattattagtttcagcggcactgttttggtctgcattcgaacaaaaaccaacctcatttaacttatttgctaacgactatactgatctaaattttatgggctttgagatcccagcggtttggttccagtcagtcaatgcgctatttattattattcttgcccctgtatttagctggttatggccaatgctagcacgcaacaatatgaatttaagtagcatgagcaaatttgtgattggtattttattcgctgcaggtggctttaccgtcatgatgtacgcctctgaaagcgtgcttgcaacaggcagtggtgtttcaccattatggttaatttccagtattttattgctgaccctaggtgaattatgtttaagccctataggacttgcgacgatgaccattttagcaccagcaagaatgcgtggacaggttatgggtttatggttctgtgcgagtgcattaggtaacttagccgcaggtttaatgggtggaaatattcgtcctgataaacttgatgttatgcctgatttcttctctcacgtctctatagcattggttatttgtgccgttgttcttgcagcattaattattcctgtgcgtaaactgttacaaagtgcagatgataaagagaatgcgcaagcataa

SEQ ID NO: 314085 - DNA, 510 bp, Proteus mirabilis
atgtctaacaaaccattacatagaattgatttgaatttgttagtcatatttcaaattcttttacaggagcgcagtgtcaccttggccgctaagtggttatccatttctccttctgctgtgagtaaagcattagccaaattaaggatatggtttgatgatcctctttttatccgtagtccacaagggttgatcccaacaccattatcgttaagtattgaagattctttatctgattttattaatattagccaccatatagccaataaacgtaatacagaaattcctgttggacttaaatttaatttagttttagaaacaccgttacatcaggtcatgttaccttctttaccacaacaaatattatctcattacccaaaatccacacttcagataaaaaattgggaatataattccctttctaatattattgatggagaagttgatattgggcttgttggacgagaatactattcacgctcaaaagagttactagagctacttcctgattga

SEQ ID NO: 314086 - DNA, 1575 bp, Proteus mirabilis
atgcaaacaaaaaaacagggaggaagtcgttttctacgcacagtggaatggcttggaaatgcactcccccatcccgttattttatttattattttaattgctattttacttgtatcttcagcggttggtgaatacttcggcgttacagtgcaagatccacgaccagaaggcgctaaagggcgcgctgaagatggttatattcatattatcagtttacttgatgctgatggtatacgacgtattcttgctaatattgttaccaattttacagggtttgctcctttaggaaccgtactggtggctttactcggtgtcggaatagctgaacgagcgggattattatcagccgttatgcgtttagtggttatgaaagctccacgcaaaatgaccacattagccattgtatttgcaggtattatgtcaaatactgcagctgaattaggatatgttgtcttgatcccgctatcggcaattattttccattcgctaggtcgtcatccattagcggggattgctgctgcgtttgcgggagtatctggcggatattcagctaacttactgttagggactatcgatccattattatcaggtattacacaacaagcagcacgcattattgacccaagctatattgttggtgcggaagcaaactggtactttatgtttgtcagcacctttttaattacatttttaggctacatcatcacagaaaaaatcgttgagcctcagttagggccttataatggtaatgaattagatgatgaagaaactgatctaaaaaatgctgcgcaagttacccctcttgagaaaaaagcactatgggcagcaacaggaacatttattgtgatggccatcattctggcattcactgtcgtacctgaaaatggcatattaagaaaccaagaaacaggtttaattggtaactcaccattcttaaaatccattgttgtattcattttcttattttttgctatccccggtattgtttatggttggatagctaagactatgcgttcagataaagatattgtcgatgccatggcaaactctatgagcacattaggtctttatttagtaattattttctttgctgctcaatttgtggctttttttggctggacaaatatagggcaagtgatcgctgttaaaggtgcggctttacttaatagtattgatatgccaagtgggttgctatttttgggctttattttaatttgcgcctttatcaatttaatgattggttcagcttccgcgcaatgggcagtaacggcgcctatttttgttcctatgttaatgctggcaggttatgcgccagaaactattcaagcagcttatcgtataggtgattcggtgacgaatattattacgccaatgatgagttactttggtttaatcttagcggttgccacaaaatataagaaagatacgggtattggaactatgatctcgatgatgttgccatattctattatcttcttaattggttggtcactgttattctacctttgggtatttgttttccacttacctgtagggcctggatcgccaatttattattcaccgcatgcgggataa

SEQ ID NO: 314087 - DNA, 672 bp, Proteus mirabilis
  misc_feature (631)..(640): n is a, c, g, or t
atggccagtagaccgagaagaaaggaatttaggcatctacctgactttctttattttgataaatcagttaaacaatatcgccttacattaactaatggtttaagaaaatgcattggtgcagataaagcaaaagctatcgcaatagccagagaatacaacaatattatgcgaccagaaaaatgcgtttctgttaactcattaattattgactcgggagggcaatatggagaggccctccctctctcagaacatttagacaagttatttttgcggatcactaatgatgagaaaccatcagacagtacacttagtaactgggttaatgacttagagagaattaagatcttttttaaagatgtccccgcaaatgaaatctcactggaacatgtaaatggctatattaatgaatatcatgccgatgcttctgctaatgtacaaaatcgtaaggtaagctttctaaagaaaatttttagttacgcaatggatgaatctcttatgtttgataacccagctgaacgtaagaaaatgaaaagagtcgatgggaaaaaacgtagaagattatcttatgatgattttcttaaaattcgagcatctgcagaaccttggttaagaacagcaatggatctggcgnnnnnnnnnnctggcgttacaaacaacacaagcaaggcttga

SEQ ID NO: 314088 - DNA, 816 bp, Proteus mirabilis; identical to SEQ ID NO: 46213

SEQ ID NO: 314089 - DNA, 183 bp, Proteus mirabilis
gtgaaagagataaaaatagttatcgctgattggatagcaaaattagtggcaataggtgagcgagtcgtcgagctatattttacaatagccccttgtttttctaaacgttctgctaataaaaagggttcccagacaaattcaccagaacctaaaaccaatattttttcaccctcagaaacatga

SEQ ID NO: 314090 - DNA, 264 bp, Proteus mirabilis
atggcacaatatcgcgatttaggtgctgttggtgtcatttgtggtcgattctatgatgcacaaggtaatcctctgctttctgatatcgaccttagaattatgggaattagtcttgcacagttaagacagatcccacagcgtatttttattgctggaggcgttgaaaatgttgctgcaaccataggcgcaataaaagggggatatgctacagatattgtcatcgatgaagtgacggcattagcattattggaattgagtatttaa

SEQ ID NO: 314091 - DNA, 3693 bp, Proteus mirabilis
atgaatacgaacaacattaaaaaatacgcaccaaaagcgcgccgcgaatttatggatgcggtagctaaacgattaaatacctttggtatcaccgcgaataaaaagggcgagctacaaattgcagaagcgaatctacaaggttctgtgcttcaaatcgctggtaacagttttgacggtaaactggccgagcccagaaaacgcatagtagccagaagccagaaacttgggtatgcacaacttattgaacaagtagcttatacctggttcaaccgtctgtgtgctattcgctatatggaaatccatgactatctaggccacggttttcgtgttttgtcgcacccagacaaccctaaaggctttgaaattatcgaccatgcccaagacgctgcggatgaactcggattagatagagctcgcattgttgaactcaagcttgcgggcaacaaagacgaagagctttatcgtgaattgttgttaggccagtgccataagctacatgaggcaatgcctttcttatttgacgcattggacgatgaaacagaacttctgctaccagacaacctaacgcgtaccgactcaattctgcgtggattggtagacagcattcctgaagaggactggcaacaagtcgaagtgattggttggctttaccagttttacatttctgaaaagaaagatcaggtaatgggtaaggtggtcaagagtgaagacatccctgccgccacccagctatttacacccaactggattgtgaagtacctggtacaaaactcagtcggtcgccaatggctgcaaacctacccagactctgccattaaaacgcagatggaatactacattgagcctgctgaacaatctgacgaagttaaccaacagctaaaagctataacacccgaatccatcgagcctgaaaccatcaaagtactcgatcccgcttgtggctcgggccacatactgattgaagcttacaacgtactaaaagccatctacgaagaacgaggtttccgctctcgtgacattccaaagatgattctggagaacaacctctacgggctagacattgatgatcgtgcagcgcagttatctggttttgcgctgatgatgatggctagagatgacgataagcgtatttttacccgtaacgtgcgactcaatgtactgtcattgcaggaaagtaaccatattgatctaccgaccttatggaaagcactcaacctatcgggaagttggcaaagcggcacatcacaaggcttgttctcagatgaagagcaagatttaagctcgttcaatgcagacaaccgttaccaactgctgaagcgaacattggcaagatttactcaagccaagacctttggttcattgattgatgtaccaagcgatgagcatgagcagctaaaagaactaatgagtactcttttcgaattgcaagagtcaggtgactcaatgcaaaagccagcagctaagcagttgattgaatttgttcatcaggcattggttctgtcgattcgttacgatgctgttattgctaatcccccatatatggggagcaatggcatgaatgcagaactgaaagatttttcgaagaaaaactttccaaatagcaagtctgatctgtttgccatttttatggagcgagcatttaaattgctgtcgcaatatggatttaatgctcaaataaatatgcaatcttggatgtttttgtcgagttatgagcagctaagaagcaatttattggaagaccatacatttataactatggcgcacttaggcgctcgtgcctttagtcagattagtggtgaggtagttcaaacaaccgcttgggttattcaaaaagagcacattaagcaatatcaacctagtttttataggctagtcgaaggtaatgagcaagaaaaacaagatgctttgcttaacagagaaaatgaattttccgctacagttcaggaagactttgaaaagattgcaggaaatccgattgcttattgggttagcaaagaattgagatatacatttggtaaattcaatagtttttcacatttttcagacactcgtattggactaattacaggtgataacaatcgttatattcgacagtggcacgaaattacgcatgccaaattaggtctaaattttactagagactcatctaagaactccggctgtaaatggtttcctcagtcaaaaggaggggaatttcggaaatggtacgggaataatgacactgtcgttgattggtctaatgatgggtttgagcttcagacaagaatgcatgattctggcacaagaacactggcacataatttcaatttagataaaatttttgatcctgcaattacatggacaaagatatctggtggatctttttcagcccgttatcagcctatggggttcttatttaatgatgcttctgcaaacgctttccctaaaaatgaagatgactgttgggttctgcttgcatttttagcatctaagctacctgttgaaatgcttaaagcagtaaatcctactttaaacttcctaccaggtaatatttctatacttccaatttcaaatgaaataatgaccagtgaaggtatcaaaaatagaactaaaaagcttgtcgaaatggccaaggtagattgggactctcaagaaacctcgtgggacttttgtaaattgaattggggcattatttctgatacgccgagtttgttacgtgaatcttacaattcccaacgaaaaaaatggagtgagtattctagtgaggttcagcaattagaacaagataacaataaggaattaataagtgcatatggccttgacgcagaaattactccgttagttcctttgtcagaaattactcttatgtgcaatccatattatcgatatggtaataataggaccgatgatgaattagaactaatgttgcgttgcgataaaacacgcgaattagtttcatactcacttggttgtattatggggcgttattccctcgatcgtgaaggtttagtttatgcccattcagctaacgatggttttgaacagctagttgccgaaggagctttctcaacctttcctgccgacgaggatggcattatcccgttaactgaccaagaatggtttaaagatgatgcaaccaaccggttccgtgagtttgttcaggtggtttgtggtgaggaatacttacaagaaaatctcgattttgtcgccgaatcactatgcctaaacgccattaaaccgaaaaaatctgaatcagcgctggagacgatccgccgttacttatcgactcagttctataaagatcatctgaagacttacaaaaaacgacctatttattggctgtttagctcaggcaaacagaaggcttttgagtgcctggtttacctacaccgttacaacgagggcacgctttctcgtatgcgtactgagtatgtcaccccgttactaggcaaatacgatgcgtatgcagagcagcttgagaagcagattgaaacggcagactcgaccagtgaagcgaaccgcttcaagaaagagttggatgctttaatcaagaaacaggttgagctacgagagtttgatgacaagctaaaacactacgcagatatgcgtatttcactggatctggatgatggtgtgaaagtgaattacggcaagtttggtgatctgttggctgatgttaaggccattaccggttcggccccggaggttaactaa

SEQ ID NO: 314092 - DNA, 705 bp, Proteus mirabilis
atgatggtattaaccctgttaacaaagcagattgatggtgagtttacggtttactggaagaccggccttcgaagaggtggtgaactaaaggtcgatttaggtgagcaatacgacaagctaactgagcagcaaaagccaattgcagctgagctctatgcgattcatcacctactgtcagtgaaagaggtgatggggagtaaccgaagcggtaatgggcttcaaatccgggtcagtaaaggagctatcaaaaagttacagaaacaacgctcaactcagcattcactttacagcctgactaggtttttgctcactcgataccaggaagcacagatatcggtagagaaacgggaagattggctctcatattccttcgaagaatacagcgtcgataatgctaccgtgagagaaatcgatgaggtcatcaacgttccgaacattgggcctgtcgtggtgactcgtcatgcactggaaaggtttgtggaacggctttcaggcggtgtacctaagcatccttggaaggctttgtgcgctaaattgtgtagcacagaattggcaaaatctttattgccagaatgtatagcttcaaagaaagcaaaaaaatatttcgtacaggcagagttttggtgtcatgggagctctggtatgcactttgtgatggtgccatcagccaaagcacttacgttagtaacagtgtttaatagatag

SEQ ID NO: 314093 - DNA, 147 bp, Proteus mirabilis
atggaaaataagcatgaccgaatgagattctactcgacctatagcagtaaagctgagaaaaaacacatgcgagacgttgaagtaaaacgcttgatggcacttggtcacacaaagaaatttgctaggcaagcggcaaggcgtgtttag

SEQ ID NO: 314094 - DNA, 279 bp, Proteus mirabilis
atggaatttaaaggtagtaaatcaccatggaattatgatggaaacgtccgtggcgctgtagaaggctatattgatgatttggttgcgtctgtttatccaatgcactatgaaaatgcagaagaaatgaaagctaacgcccatctaatctcagcggcaccagagttattacaagccctacaattgattgtaaattatcacgacgatggaaatgaaggtttgcatcgtgaagatttagaaatggctcgtaaagcaatcgcaaaagccctcggtcagcagtaa

SEQ ID NO: 314095 - DNA, 186 bp, Proteus mirabilis
atgaaaattaaattattaaatgacggtggttatgagtctttatcgggtattaaatttccattaattgttaacgctgagcctcatcataactaccctgtgtatgttgttcattctaaagaatttggtctagaaaaagatactagctatttatttaaatatattagcgttgaggtaatcaatgaataa

SEQ ID NO: 314096 - DNA, 315 bp, Proteus mirabilis
atgaataaatacaccgaactatctgacttcgagattaataaaaaggtttctgagaatcttaaattaaacacaattgcatacgaacgtactgaaatagttttgtttgatgatatggatgcaacgcctttcgacccatgcaacaacccagccgacgcaatgccgattattaacgaatatggcattagccttgtatatcaagacagaaaattccagtttgcaactaatgacggaaatatagagtgtggtgatagtaacccattaaaagcagcaatgattattttcttgtgtatgaaggatgcggagaatgaaggctga

SEQ ID NO: 314097 - DNA, 912 bp, Proteus mirabilis
atgcctattaactttgattttgaaaatgtgaatataactgagtttggtcttggtctggatagccctaatcgagattttgtgtttgttcctgtcgatgaagtcgtacagaagtcattagttgaaatggttagtttaactaaatcacaaatgcaggatagggcaagtagtgtgggtaggtatcaaccttcagaaaaatatgcgtctattgaatatcttaccttttcgctcaatgatccattggtacaagagcttaaaatccttcatgagtccgaaaatgtaccagaagattgcaatgcttttgacaatatcaatcaatgtttcgcgtactttgtaaagctcacagataacaacaggcagaggataactgctgtacgtcgctcaactcagtttaaaactttaataaagaaaaggcataggctggttcaatatgtggataatactttaaagtctttagaggaaactgtttttaaactggataatgatttcgactttattattcagaatgatctaattcatattctccgtcctagtggtctagagtttacagcacaacttcagaaggcaattatggatgcagttccagtaaacattgcgagtattgcaagtgaaattgatttcgttaactttgatagtatttctcagtatgctcaaaaccacccgagagctgcaagatatattgcttctattaaatctcaatcagaagcaataaatatcagtcaagataagctagagcgttactgcgaaaaaactaatgttgtaacaaaaaaagttgatgggaagattaatttagacagctctcagattatggggtttttagaagtcctagataggcgtcgatacgaaatagacctaaaagacgatggtgagtccgaagtttatagagcgccgagcagaagtcgagtgaatagttag

SEQ ID NO: 314098 - DNA, 564 bp, Proteus mirabilis
atgacaataaataatgaaggtttgtcgctcgctaggctattaatggtcttgagtagtatgtccccattattcattctttgggctattaaggggtgggggataaaaggcatttcggaaatatattttctttctttttgccttttttttattatggtgccaaatttattcttatggttccgcgtaagattagtcaaaaaaagaaaagatcgaagagaagtgactgcaggagaatgtgaagatcacagagatcacctacttgtttacctttttgctatgttacttcctttttatagtgtcaatatcgatagtattagagacttagcggggcatctagcggcaataacgttcattgtttttttgttctggcatctgaatatgcattatatgaacattttttgggctgtgaaggggttcagggtatatacgttaaaacccgattcagaaaataactctattagtggcagaattcctatcgtattaatcacaaagcgctctcatattatcaaaggggagagaatttcagcttacaggcttagccaaacggtatttttagaggatgaataa

SEQ ID NO: 314099 - DNA, 1032 bp, Proteus mirabilis
atgcctaacctcagcctacaagaccaaacctcagagttcttactctataccgcgcctaatggtgaggtaaaagtcgaagtgttactcagtggggaaaccatctggctaacgcaaaaacgcattgcacagctgtttggtgtgggggttcctgctatttcaaagcacttggataatatttacgattcaggtgaactacaacgcgaggcaactatttccattttggaaacagttcaacaagaaggcaaacgcgaagttaaacgcaagctggaatactacaacctagatgcagtgatttcagtaggttaccgagtgaactcagcacaggcgacacagtttcgtatttgggcgactcagttgattaaggactacatcatcaaaggctttgccatggatgatgaacgtcttaaaaatggccgcttctttgataaagattactttaaagagctgctggaacgcgttcgctccattcgtgccagtgagcgacgtatttatcagcaaatcaccgatatctttgctgaatgtagtattgattacgatcctaaatcagaaactactcgtctgttttatgcccatatacaagacaaatttcacttcgctattacagggtacacagcagcggaaatcatcgcattgaaggctgacgccaaccaaccattaatgggcatgacgacgtacaaaaacgccccttcaggtcgtgtgttaaaatcggataccactgttgccaaaaactacctcagtgaagacgagatcaaaaaacttgaacgtgccgtttcggctttttttgattacattgaaggcattattgaacgcagaaacacctttaccatggaggcgttcgccgaaagcgtcaataagtttttggcctttaatgagtatcaggtacttgaaggttatggcagtgtttcacgcaaggttgctgagcaaaaagctcatgccgaatatgagcaatttaacaaacaacaaaagatcgagtctgattttgatcgtgaaataaaaaaattgctcaatgagggtagaaagaaaaaggactag

SEQ ID NO: 314100 - DNA, 126 bp, Proteus mirabilis
atgagtaacacactaacggaaatagcagcgctgttgcaagcgtccaacaaaaaagtgcggttgattttacttgtgtattttttaaaaaacgacgcttttaaaccgcaaggagaagcgaatgcctaa

SEQ ID NO: 314101 - DNA, 1179 bp, Proteus mirabilis
atgagtcatttgaactatttagagaaactcttggatggggttgaagttgagtggaaggatttaggagaggtaacacaatacgaacagcctacaaaatatcttgtaaaaacgaaaaactatgatgattcgtttgagactcctgtattaactgccggcaagacttttattctaggatatacggacgaaatagacgggataaatcgagcttcagagaatcccgtaataatttttgatgacttcactactgctaataaatgggttgatttcgactttaaagctaaatcctcagcaatgaaaatgattaaatctagtgatgagtctaaattcatgctgaagtacgtatattattggatgaatacgctaccgagtgacttgattgacggtgatcataaacggcaatggattagtaattactgtgttaaaaaaatccccatcccctgcccagataaccccgaaaagtcgctggaaatccaatctgaaatcgtgcgaattttggataaattcactgccctgacagccgagctgacagccgagcttaacatgcggaaaaaacaatacaactactaccgcgacaagttgttaagttttgaagagggtgaagttgagtggaaaacgttaggggaagtattcaatattttcgcaggcggagataaaccaaaaaacgctttttctgaggaagaaaccgatgaatttaacgtgccaattctatctaatggaataggtttaaaatctttgtatggttggacaaactcaccaaaaataaccgaaccaagcttaacggtttcagctagaggaactattggctggacaagttatcgagatcgtccatttttcccgataatacgattacttgttttaactccgaaaattggcgtcaatacaaaatacgcttattactatatgaaaaccattgaaaataattatcccgtgccaccagctgggatacctcagctaaccaaacccatgatagagaatgtaaaatttccgattccctatccaaatgaccctgaaagatcgcaggcagagcaagcgcgcattgtcgctattctcgataaattcgacgctttaactagctctatcaccgaaggtctgccccgcgaaatcgagctacgccaaaagcaatacaagtattatcgtgacctgttgttgagcttcccgaaatcagatgaggcagcttaa

SEQ ID NO: 314102 - DNA, 924 bp, Proteus mirabilis
atgataaatgatgctctgaaacaaacggtaggggcgaagtcacatagggcttcggagatagcacagttgccacaagcaatccgggatcgcattgctcacatcgatttcaccttattgtttaagggggaagcgctacgggcagatttagtcgatcgcttcagcatagcggctacacaagcaacgaaagacttcgcgctatacaaagtgcttgcaccaggtaacattgagtatgaccaaaagctcaagctgcataagcgaggtgaagcatttgagcccttgttcgactacgacgtcgttcgaacattggcgacgattagccaagggtacggagatggctttactggcaaggtaaaaccgccttttgcgtgtgaagcgccttatcaccttaacaaaccgagtttatcgatagtggcgaaagttaccgaggccatccataaaggcaaagccttgcgtatcacctatgtgtcgttatcaagtggtgaaacaatacgtgaaattgtgccgcatacgctggtggacaatggcctgcgttggcacgttcgtggttttgaccgcaagcatagtgagttcagagactttgtattgactcgaattaaagctgcggttgtgcttgaagactccactttgtctgaaatggagctcgaaccccaagaccggcaatggaatcgctttgtagagctagagttagtgccacacccacgtatagagcacagcgaagcgattgagctagactatggcatgacggggggcgtgatgaaagttgagattagagctgctactgctggctatttgcttcgtcaatggcatgtagattgtaccaaagcacatagccttcaaggtcctgaatatcagctttggttaaagaataccccgacactttatggggtagccaatttgaatttagccccagggtttgacggatga

SEQ ID NO: 314103 - DNA, 2229 bp, Proteus mirabilis
atgatcagcgaaatccagattaacgcacccgtagctacttatcagaatattacaaaactcactgatcttcgtcgcatcaattatattttcggcgctaatggtacaggtaaaacaaccatcagtcgtgtaattagccgtgctgtagggcatgaacattgcctaataacatggcaaggtggaattgaacttcaatgtatggtgtataaccgggatttcgttgagcagaacttttcacaagaaaatcctcttcaaggtgtatttaccttgggtgaaaatcaagtagaagcagaatatcagatagctagcctgaaaccagaaatagaaaaaacaaataaccaaatattaagcctcaataatcaattaattggtgaagatggtcgttctggtaagaataaggagttagatactcttgaatctgtgctaaaggaaagatgttggaagcagaaacagctacatgatgaatattttcaggtggcatttatcggtgtgcgaaatagtgcagaacgtttcaaagataaagtacttgcagagcaagaatcaaattcagctgaattgtgttctctagaagaattgaaagaaaaaacaaaaactgtcttttcaagcaaacctgagcgtatagctcttattgcaaatgtttcagcagatacttttattacattacaaaaaaatgcattattacaaaaagcgattgtaggggagcaagatgttgatattgcagcactcatagatcatttgggaaatagtgactgggtaaagcaaggtcgacagtatcatgaacagcaaccagatacatgtccattctgtcagcaagctacagataaacaatttacaaaggatcttgcagcattttttagcgaagcctatgacaatgatataaaagccctaaaagcattacaggcaaattatcaccaagaaagtgaacaactattgcttaccattcaagggtgtttggagagcggtaatccttttcttaatatcgagttacttagcgtggaagttgaagtactaactgaaagattaaaaattaatcatgatatattagctcgtaagattgaacaacctagccacaagtttaaattagagcccattgagtcattaataacgaaattacaaggttttattatagaggctaatgaagcgaccaatacatataaccagacagttgctaatattgtgtctgaaaggcgtatactgacttcgaaaatctggcgttatgtactgaatgaattgaaggcagacatacagtattatgagcaaacaaagactcgcttgattagcacaatagagggaatgaatcgaagtctcactcaaaaacgatctcatcttcgtgatatgaatgaacagctcaaagaactcgaaaagtatactacgtcaattcgaccaactattgcagctattaacgatttattaatgaaatttggctttaactctttttctcttggagaggcggatgatggtcgttattatcggattatccgggctaatggtgacgatgccagcagatctcttagtgagggtgaaaagacgtttattacctttttgtatttttatcatctaattaaaggtgctcaatcaccttctggaattacagtgaatcgagtagttgtgtttgatgaccctatatcgtcgttagacagtgatattctttatattgtaagtagcttgattaaaggtgttatggaggaaataagagacccgaatagtcagataaagcaagtatttgtgctaactcataatgtctattttcataaagaaataagcttcaacagaagcagacctatagataggttgcttactgaagagagtttttggcaggtcaagaagctacagcaaggttctgttgtcgaacgttgtgaggagaatccggttcgttctgcctatgaactgctttgggatgatgtgaagtctgacaatatttcgagtatcagtttacaaaatacattacggcggatactggagaactatttcaccatgtggggggggatgggtaaagacgaaatttgtaatttgtttgaaggtcgtgacaaattgatatgtcagtctcttttttcttggatcaatgatggttcccattcgattcatgacgatttgtacatcaatcatggagagcaaactaatgaagcgtatttgcgggtatttagagatattttcgacaaagcagggcagattggtcactataacatgatgaaaggcattagctttgaaccagtcgcggcacagaatagttaa

SEQ ID NO: 314104 - DNA, 387 bp, Proteus mirabilis
  misc_feature (322)..(331): n is a, c, g, or t
atgatcccaaatgagaaattgagagtaacactatgtggagccggtcgtacagggcatcttgcggcaattttatttagcttaaatcctgcgattgacgtcactctttacagcagtcgctcagaaactgtgacagcatataaagaaaatgatcatcaacttcaggcggtgatgcctgatggtcaagttattaaaacccgttcggttaggatgacagaagccattgatgaggcgtgctctaaggcagatatcatcattattacgacaccaagtcatgtacgtgaaagtttacttcaacgtatggcgccaatactgccgaaacatnnnnnnnnnntgtgggcgccattcccggttttgctggctttgactggctggctgaaaaaacgttag

SEQ ID NO: 314105 - DNA, 273 bp, Proteus mirabilis
atggctgacggtaatgtatctggtaaatatttttcaaaaattattggagagatgcgtcagctaaaccgccataaaacactagatcaggtatctggctggttagtaaatatttatgggtacctttcagcgcctggcggtggcggggttcgtcatggtgccgatatattaaattatgacgagttgacagtcagcgaggcgcggctattttgtgatctcgcccgtagctatatatcttattttttacatgaacatagcctgttacagagaacttag

SEQ ID NO: 314106 - DNA, 888 bp, Proteus mirabilis
gtgtattcctgtagtcttaactgcatgcgtataggcataggaaaagcagaagtgattgatgatccgttaccagagaactggcaagacctccagacaggtgttcaacgtatattccgtaatgttggcttgcttgcagaagttgaggtcgatttagaaaccccgcgaggttcggtgaatgtggatgttctcgcgacagatgttaggagcgtggacaaaatcagatacatcgtggaatgcaaaaactggggtactcctataccgcagactgtggtccattcgttcaccacggtaatgcatgaaaccggagctaacattggatttattatttcaaagcatgggcttcagcaaggtgctaaacagtacactcaaaacaccaatattattgggatgacatacctagagttccaacaaaggtactttgaggcttggtggaataggtacttttgtccacgtatcggtgatgccgcagacgagtcgcttcagtacgtcgaaccaatcaactctgagcgagatcgcgaatacgccaagcttagccttcaatcacagaagaagtttgatcagttaaggcaagaaaaaagtgtatcagtaacggttctctctatgtttaattacaagtttatgtcgaaagcattaaactctggcaacttgctggaagtcccaaagagtctggatgattttaagaccagggttctagctctaatttgtcctcatattgaacagcattgcgatacgtatagagagctgctagagatcatactggaatacttatcagacaccaaagcagagtttgatgcgatatttggtgaagccatctttggtccgccaagtaatatcacgggggttactgccgcaggcccccctttggaagaaggtatttatcatcattag

SEQ ID NO: 314107 - DNA, 219 bp, Proteus mirabilis
  misc_feature (180)..(189): n is a, c, g, or t
ttgttaaataaaataattcatcaagatgtcaactcgatggaggatgacagcggtattcttcgctttaaatcttattcaaatattgcatttccgacgcgagatgttatttccattgaaaaaaataatgtcgaacaatatgaattagaagtcgcttttttgggcttacaaggaagtcagtcnnnnnnnnnngtcccccctaccaggctattatctggatga

SEQ ID NO: 314108 - DNA, 183 bp, Proteus mirabilis
atgtcccgtcctacatttgtaaaattattagatacacgagcgataccctactctagaaaaggaaatcgtaggaaagttgcttatgctgatattgttgcttataaaaatgaattggagcaaaaacgacttgatgcccttgctgaattatcgcaattagatcaagaaatggatatggggtattaa

SEQ ID NO: 314109 - DNA, 981 bp, Proteus mirabilis
atgtctcaatattttgatccaataccttgggctaagaatccccatttacagacacttttgcctcgaatagtgcgaagaacgccgctattaacgccttattggcaacggcttaatttgcctgataatgattttgtcgacttagcatggagtgaagaacccaaaacagcgcaacataagccccgtttagttatctttcatggtttggaaggtaactttaatagcccttatgttcacggcatgctagccgcggcgaaagcgcgaggatggctaggtgttgtcatgcattttcgaggctgcagtggcgaacccaatcggcaaaaacgtatttatcattctggtgaaacagaagatgcccgctattttctgaattggttaaaagagcaatttggcgaacaaccaaccgcagcggtaggttactctttaggaggcaatatgctggcctattatcttgccgaaagtggtgaaaatgcggtattagatgctgctgttatagtgtcagcacctttgatgttagaaccttgctcaaccaaaatagagcgaggattttcgcgcttctatcaatggtatttactgaaagggttaaaacgcaatgcaactcgcaaattgatccgctatccccagtcgttacctattagtctattaaccattaaatccattaaaaagttacgtcaatttgatgatctgatcacggcaaaaattcacggtttcaaagacgcccttgattattatcgtcaatgtagcgctctccctttactcaatcagatcaaaaaaaatacacttatcattcacgccaaagatgatccctttatgtctacagaagtgatacctgatatcacaacattacccaaaaatattgaataccaattaacagaatttggtgggcatgtaggttttgttagtggaaaactctctaagcctgtaatgtggcttgaaaaacgtatccccgactggctatcgacctatttggagaaagtaaaatga

SEQ ID NO: 314110 - DNA, 771 bp, Proteus mirabilis
atgaacccctttttaagaagtgagaaagcggatactttccaaataggttttaatagttatcgccctgatttaattgttgctggagacagctttcgcttaaaagcactttggtatcatactaaagttaaaaactatatttccagtgattcttataatgtttgtaaagggggtaaacgctgtaaaatcgatggcacttttactgacgatgactacagtggcatggaatacgatggaaatatctatttatacacaaatagccttgatcctgtcacgatgagaggctatgaactacaagtaaactatgatgctgatgtattctataccacactttcttatagcaatgagcgtacctcacaacccacttctcttgcgatgggggattttgggcaaagtcctgcatcagaacttcccaaatactacgcaacgattgatgctggtgtgaggttattcgatgaccgatctctcgaattaggcaccatcattcaaattaccggtaaaagtcgtaaagcttcagctgaagggtttgattttgatacaggcactattcccatggtcgaacaagaaaaaatccctaccgtgatcaacgcgtatgctaactatcaaatgaataaaaatgtgtcattaaaatttgcggtacataatctcatgaataaaaattattcaaatgcacttgatagaagtaattcagcgccaattatggatgaacagggacaaaataaacaaacggctagaggcagaagtttcctgtttggtggagaaattcgtttttaa

SEQ ID NO: 314111 - DNA, 279 bp, Proteus mirabilis
atggatatccgtcatccattaaaagatctcgatatgcagatgattgattgggcggtggattcagagcttccgactctcgtcttgctcactaaagcggataaattagcatcaggggcacgtaaaaagcagttaatggcggtacaaaatgcactgtcagaaaaatcaggtgatatacgtgttgaatgtttttcttctttgaaaaaaataggcattgataaattacgtaatacgttaaatgagtggtttactgatactaacgaaccagagacagaagcttaa

SEQ ID NO: 314112 - DNA, 645 bp, Proteus mirabilis
  misc_feature (567)..(576): n is a, c, g, or t
atgtatcatttacgaacccctaagacgcaagcagaattagcagcttattatacttttcgttgggaaatgcttcgtaaaccgttacatcagcccgaaggctccgaaaaagatggttatgataccttagcgcatcaccagatggtggttgatgacagtgggcaacccgttgctattggtcgtctctatataaatgccgataatgaaggtgcaatccgctttatggcggtacgtgaggatgctcaaggtaaaggattaggctctttagttgccatggcgttagagtctttagctcgccaagaaggggtaaagcgtattgtttgtagcgccagagaagagtctgttcgtttctttgaaaaattaggttatgagaattgtggtttagtcacaggccctcaaactaccccgatcaaacattactttatgaaaaaaagtattgaatcattagatgatattctccatcgtcctgattggtgcgcggagttgcaaaaacagtggcatcagcatatccccctaagtgaaaaaatggggttacgtattacgcaatatacgggcacccgtttttatacnnnnnnnnnnccacgatccctgaatccggtaatcaaaacccacaccatactatttttgccggtagccagttttctttag

SEQ ID NO: 314113 - DNA, 504 bp, Proteus mirabilis; identical to SEQ ID NO: 296274

SEQ ID NO: 314114 - DNA, 861 bp, Proteus mirabilis
gtgtggcgtgttattaaattgatgggacccgctattttaggggtttctgtcagccaaatttcgctgatcatcaatactatttttgcctcattcttggtgtctggctcagtctcttggatgtattacgccgatcgcctaatggaacttcctactggtgtgttaggggtggcattaggaacaattctattaccttcattatctaaaagttttgccagcggcaacacacaagaatatcagaaattaatggattggggattaaggctttgttttttattggctttaccttgtaccttgggtttggctttattatcaggccctttaaccatttcgttatttcaatatggtaattttaatgggcatgatgctctaatgactcaacaagcattagtggcgtattgcattgggttaatggggttaattattataaaaatattagcaccgggcttttattctcgccaagatattaaaaccccggttaaaattgccattgcaacgcttattttgactcaattaatgaaccttgcttttgttgggagtttaaagcatgtgggactggctctttcgattggattagccgcttgttttaatgcaggaatgctattttggcaaatccgtaaacaagatatttatcaaccattagcgggttggcctatctttttattaaaacttgctattgcgttagctgtgatgagtgctgtattagtcggcatgctatgggtgatgcctgattggcaacaagggaatatgctaatgcgtattttacgtttattacttgttgttgtagctggtgccgcaagttattttgtcactttatatgctgttggatttagaccgaagcatttttctctacgcgcattataa

SEQ ID NO: 314115 - DNA, 777 bp, Proteus mirabilis; identical to SEQ ID NO: 31903

SEQ ID NO: 314116 - DNA, 222 bp, Proteus mirabilis; identical to SEQ ID NO: 31904

SEQ ID NO: 314117 - DNA, 1026 bp, Proteus mirabilis; identical to SEQ ID NO: 31905

SEQ ID NO: 314118 - DNA, 711 bp, Proteus mirabilis
atgaacccattcaaaggccggcattttcagcgtgacatcattctgtgggccgtacgctggtactgcaaatacggcatcagttaccgtgagctgcaggagatgctggctgaacgcggagtgaatgtcgatcactccacgatcaaccgctgggtattggcttatgcacctgtcatcgagaaacggctgcggcagtttcgtcgaccccattgcggctcggtccggattgatgagacctatgtcaagatccgcggcaaatggcgctatctgtaccgagccatcgataagcatggcaatccggtggatttcctgctgaccgctaagcgcgatctcgacgctgccaagcggttcttccgaaagatgcttaaagatgaacccttgttgtcgccgaacaggattgggacggacggggccaacaccttcccgtcaacgatcaaaacgtcggttgatgatgggcttctccatcccgatcccgtgcattatgtgaccaaacatctccagcaggggattgagagcgaccatttccgggtgaagaagaacatgccgaagatcggcggtttccaatcctttaacacggcgcggcgaaccatcgcgggtttcgaggcgatgctgtggctgcggaagggctttggcttttcaggcggctggaccgtcaatgaccagaatgatttgcttgcgcgcctcttcggactgcaaaaggttaacaaagcatga

SEQ ID NO: 314119 - DNA, 1221 bp, Proteus mirabilis
atgacgtggagaacgaccagaacacttttacagcctcaaaatctggacttcaatgagtttgagattcttacttccgtaattgagggcgcccgaattgtcggcattggcgagggcgctcattttgtcgcggagttttcactggctagagcaagtcttatccgctatttggtcgaaaggcatgattttaatgcgattggtttggaatgtggggcgattcaggcatcccggttatctgaatggctcaactcaacagccggtgctcatgaacttgagcgattttcggataccctgaccttttctgtgtatggctcagtgctgatctggctgaaatcatatctccgcgaatcaggaagaaaactgcagttagtcggaatcgacttacccaacaccctgaacccaagggacgacctagcgcaattggccgaaattatccagctcatcgatcacctcatgaaaccgcacgttgatatgctgactcacttgttggcgtccattgatggccagtcggcggttatttcatcggcaaaatggggggagctagaaacggctcggcaggagaaagctatctcaggggtaaccagattgaagctccgcttggcgtcgcttgcccctgtactgaaaaaacacgtcaacagcgatttgttccgaaaagcctctgatcgaatagaatcgatagagtatacgttggaaaccttgcgtataatgaaaactttcttcgatggtacctctcttgagggagatacttccgtacgtgactcgtatatggcgggcgtagtagatggaatggttcgagcgaatccggatgtgaagataattctgctggcgcacaacaatcatttacaaaaaaccccagtctccttttcaggcgagcttacggctgttcccatggggcagcacctcgcagagagggtgaattaccgtgcgattgcattcacccatcttggacccaccgtgccggaaatgcatttcccatcgcccgacagtcctcttggattctctgttgtgaccacgcctgccgatgcaatccgtgaggatagtatggaacagtatgtcatcgacgcctgtggtacggagaattcatgtctgacattgacagatgcccccatggaagcaaagcgaatgcggtctcaaagcgcctctgtaaaaacgaaattgagcgaggcatttgatgccatcgtctgtgttccaagcgccggcaaggacagcctagttgccctatag

SEQ ID NO: 314120 - DNA, 702 bp, Proteus mirabilis
atgcgctcacgcaactggtccagaaccttgaccgaacgcagcggtggtaacggcgcagtggcggttttcatggcttgttatgactgtttttttgtacagtctatgcctcgggcatccaagcagcaagcgcgttacgccgtgggtcgatgtttgatgttatggagcagcaacgatgttacgcagcagggcagtcgccctaaaacaaagttagccatatcgggagttaaattgaaaatttcattgatttctgcagtgtcagaaaatggcgtaatcggtagtggtcctgatattccgtggtcagcaaaaggtgagcagctaatctttaaggcgctcacatacaatcagtggcttcttgttggaaggaaaacatttgactctatgggagttcttccaaatcgcaaatatgcagtagtgtcaaagaatggaatttcagggtcaaatgaaaacgtcttggtttttccttcaatagaaaatgctttgcaagaactatctaaaattacagatcatgtatatatttcgggtggggggcaaatctatgaaagccttattgaaaaagcagatataattcatctatctactattcatgttgaggttgaaggtgatattaaattccctatattacctgaaggtttcaacttggtttttgaacagttttttgtgtctaatataaattatacatatcaaatttggaaaaaaggctaa

SEQ ID NO: 314121 - DNA, 660 bp, Proteus mirabilis; identical to SEQ ID NO: 35583

SEQ ID NO: 314122 - DNA, 1191 bp, Proteus mirabilis
atgaaatctaacaatgcgctcatcgtcatcctcggcaccgtcaccctggatgctgtaggcataggcttggttatgccggtactgccgggcctcttgcgggatatcgtccattccgacagcatcgccagtcactatggcgtgctgctagcgctatatgcgttgatgcaatttctatgcgcacccgttctcggagcactgtccgaccgctttggccgccgcccagtcctgctcgcttcgctacttggagccactatcgactacgcgatcatggcgaccacacccgtcctgtggatcctctacgccggacgcatcgtggccggcatcaccggcgccacaggtgcggttgctggcgcctatatcgccgacatcaccgatggggaagatcgggctcgccacttcggtctcatgagcgcttgtttcggcgtgggtatggtggcaggccccgtggccgggggactgttgggcgccatctccttgcatgcaccattccttgcggcggcggtgctcaacggcctcaacctactactgggctgcttcctaatgcaggagtcgcataagggagagcgtcgaccgatgcccttgagagccttcaacccagtcagctccttccggtgggcgcggggcatgactatcgtcgccgcacttatgactgtcttctttatcatgcaactcgtaggacaggtgccggcagcgctctgggtcattttcggcgaggaccgctttcgctggagcgcgacgatgatcggcctgtcgcttgcggtattcggaatcttgcacgccctcgctcaagccttcgtcactggtcccgccaccaaacgtttcggcgagaagcaggccattatcgccggcatggcggccgacgcgctgggctacgtcttgctggcgttcgcgacgcgagactggatggccttccccattatgattcttctcgcttccggcggcatcgggatgcccgcgttgcaggccatgctgtccaggcaggtagatgacgaccatcagggacagcttcaaggatcgctcgcggctcttaccagcctaacttcgatcattggaccgctgatcttcacggcgatttatgccgcctcggcgagcacatggaacgggttggcatggattgtaggcgccgccctataccttgtctgcctccccgcgttgcgtcgcggtgcatggagccgggccacctcgacctga

SEQ ID NO: 314123 - DNA, 279 bp, Proteus mirabilis; identical to SEQ ID NO: 33086

SEQ ID NO: 314124 - DNA, 339 bp, Proteus mirabilis
  misc_feature (311)..(320): n is a, c, g, or t
atgaaaattcaatctatattgaattctcaatttttagtctcattggggattagcgtgttgacattgtcaacagaaggaatggcggatcaaagtcaacatcaagttttaaaaacagagcaacaggcattagaacaatcactaatcgctgaaaatgctcaagaatggaaattaacagagaaagaatggcaacgttatgaaatgctaaaaaaggggaaacgagggctgttttcaccgaatttagatcccttaactttattaggtattgaagctcgtacttatgaggagcgacgttattttgctgaattagtggnnnnnnnnnnggcttcgtctttatcctga

SEQ ID NO: 314125 - DNA, 369 bp, Proteus mirabilis; identical to SEQ ID NO: 311474

SEQ ID NO: 314126 - DNA, 147 bp, Proteus mirabilis
atgaatcgtcgttcatttttaacatcatcaagcttagtgatcgggggactttcattaagttcgtttgttagcgctgcctatgccgcagaaacttcaaaccctaaacagctatttaatgcagaaaatcctttactgaaaactcgctag

SEQ ID NO: 314127 - DNA, 411 bp, Proteus mirabilis
  misc_feature (350)..(359): n is a, c, g, or t
ttggttaaaaaatatattacttatgacgatcatattttgattagcttatcccctacacacactttaaaagatatatatcaatcaatacttcgaaaatgtaacgttgtactcaaaacttcttatacagaaggtactggagaaaaatataaagcaactggtaaagcatcaattcaaggagctgtagcactaattgctaaagtaaatgcatctttcacaatacaagatgaaaaaaatacaagcaatacagaacactacgatgaaattgaattcaatttagatctgcctgatgatgttgcgtatttgattcatcatgttggtagtaagaaaatcataatacttgaaaattttcnnnnnnnnnngaggaaatacaaagagcatttgcttttgatctccgtacatttcatgatttga

SEQ ID NO: 314128 - DNA, 753 bp, Proteus mirabilis
ttgaaagtacggtttattatattgggagtatggaaagaagctaatcgacttacccaattcaacggagaactacaagatagaattagtgaaatacctgttgaaccttggctagaggccgattttaggagtatagcaaaaaaaggtggggatcttttaaatatagacattacacctgcgattattgaaaaatgtatctccaactcattcggaagtgtaggtgtttttcaagaattattaaagggatcatgtattgcggatggtattctcacaaaacaagaaacaacaaaacacttcattaatatagatgcagttaatactgcaatagcgatgaaaacaaatgaatattctggacgtcatttacgaaacttagaaactatggctgttgcaaatagtgcatctataactaaaggcaatcctttaccatatttcctaaattattatattgtaatgcacattctttccctaggatatcatggggtaaatggtggaattagcaaagaaaacatccttcatgcattaaaacaagtacatcatagaaaagatgaactaaaaggacaccagttagttactgctttgaagagtctaactgggttgcaggctagtaaaggaataactcctcctgtaattgcgtatgattcaaattctcgacaactaaagattgtagattccactttttacttctttttaaaaaattctgatttagaggaagttaaatcagagataccttgtccaatggatgggctagatgtataa

SEQ ID NO: 314129 - DNA, 822 bp, Proteus mirabilis
atgtctgcaacagaacttcgtcttgcggtagtgggggctggagggcgtatggggcgccagctgatccaagcgattaatcagcaacaaggtgtggtattaggtgctgcttttgaacgtactaattcttcattgataggggctgatgcaggagagttagcgggaattggtcatatcggtatcactgttactgataatttattagctcaagtcgggcaatttgatattttaatcgattttacgcgtccagagggtacgttgtcccatctggcattttgtgttgagcatcataaaggcatgattattggaactaccggttttgatgaagaaggtaaaaaagccattaattgtgcagcacaaactattcctattgtctttgctgctaactttagtgttggcgttaatttagtgcttaaattattagagaaggcagctaaagtgatgggatcttatagtgatattgaaattgtagaagctcaccatcgtcataaggttgatgcaccatctggtacggccttagcgatgggcgagtcgattgcagagactttaggtcgagatctgaaagattgtgcggtttatcaacgagttggacatacaggagaacgtgatcctcgcagtattggctttgcgactattcgtgcaggggatattgtgggtgagcacactgctatttttgcggatattggtgagcgagtagagattagccataaggcatcaagtcgaatgacctttgcaaatggtgcagttaagtcagctatttggttaagtgaaagaaagtctggtctttataatatgaaagatgtgctttctttagaagaattatga

SEQ ID NO: 314130 - DNA, 312 bp, Proteus mirabilis
atgttatctcagcaaaatgcgaatatatctttatcagcaaccagaactgaacgagatagtggttatcaagatgatgctattaatctgtatttaacaataccattatataaaggccatagcatttcattttctgaatcatattctcgtattggtaaaagtaatcaatatagccatagagcaagttatagtggttatagtgatcgcgataattatagtctgaatgtgggctatagtcatggagaagaaattgatagccaatcaagtatcagtggttattattctcgcgacttatgtaccacaacaatatcgtag

SEQ ID NO: 314131 - DNA, 249 bp, Proteus mirabilis
atggaatttaagcacacccccgctccgtggcggacggatgattggattaggacaggggttaattcagaaagcaagcatatcgcaatggttaattactgtagtgatgtttttggtgatgaacataaagccaacgcccatctaatcgcagcagcgccagagttattagaggcattgattgaaattcgtaaattagttgcacatcacgataaagctgatttagcaatcgcaaaagccctcggtcagcagtaa

SEQ ID NO: 314132 - DNA, 369 bp, Proteus mirabilis
atggataaaataccagttgtatatagcaatagttacccgtctggctcttttcttaaaaatgtcaaagattccgaagctgcatattgcattgtccacttattaggtgttattgaaaataagtctaaagatttaattgttcgcggggcaatgctcaatgatggaaatatgataattcgagggatggtaaatcacgcaatcgagaaaacattatgcgcgatgcttcatcaatatgattgcaatattgccaatgaagaccacaaaagaaatacagaaaccatggctgatgttatattgaatggcggatatgataaagatattactgattcaatcattggcattatttctggcattaaaataaacgaagaataa

SEQ ID NO: 314133 - DNA, 375 bp, Proteus mirabilis
atgaataaatacaccgagctatctgacttcgagattaataaaaaggttgctgataaattaggtttgcttccatatctatttattgctaacgatgtgggggagttaatttgggatgttccatcaaatgataactaccatgggttcattagtaaaagaggatgtgagctagatttttgctataacccgtctaatgcaatgccgattattattgaaaacttgatatcgttaatggcagatatgtcagatgacggagggtcaacttggtggtgtgcaagtgatattttaaatgggatcacatcgagatataaatcaaacccactgcgcgcagctatggaagtatttttgatgattaaggatgcggagaatgaaggctga

SEQ ID NO: 314134 - DNA, 2370 bp, Proteus mirabilis
atgtctacaattccaacacaaaatccagttccaagtgaagcaccaagagatcttaaatttaattcagggaaagttgacgagttcgttacgtcaaataatcacttttacactgaccgttttggtaaaaaacattatacaatagatggtattaaccatttatcaaaacaggcaatgcttaactatggctatatcacgaagagttcttttgagtcgggtaataccatcatcaaccctaatgatgctcttctctgggaagttaatggcgagtactacaaatggggaggtaagctccccaaagtagttcccccgaattccacacctgactctaccggtggaataggagggggaaaatggctgagtgttggtgattcatcattaagaactgatatcgaaaagaataaatatatagatgacgcaacttcaatatattttattcctggagttgatttatctaatgaaactacagataacagagatgcaatatatgaatttgatggcaacgtattcatacctcgtggagttagtgttcgttgcaatctgcttccagacgatgatgtaactatatttaagggtttcgggagtataaaaacaagagatatatttggcaaggaacatatctttgatgttgaaaaggctaatgataaatacactttaggtgtctctgctttaattaataaaaaagccagattaaatgaagtttgtacaataggaataatcggcgattcaataactgacggagcatatggtgccggctggaaagagaatccaacagatgaaaatggcaatctgtcttctacagattataatcacaacctaaacggaggagctggttcttggttcaggacatttacagacaacttaaataatctagttagaagaaattatttcggattccatgcatttaattgcgcctcttcgggaaagaggttgattgatggttgggctaatagaaattttgattatggatttttccagaattctcaatatggtaaaactgctcctgatatttgttatttagccatgggggttaatgatgatggccaaatagaatctattggttttgataattacttgcatagattcgtggagtttatcactaaagctaaagggtatggctgtgaagtttgtgtagttagtctaaatcaaaatactagtaaatggtcgctgctagagaactcaattaaggctcatatagagaatatattcccatcagttgagttcttagatctttcctcagaaacaaccaggatgtatacagggataggggagctaacggcggatgaagtggcaggcagaccgacgggtgttttagatatcactcattttggaattcaaggtcataggtatataggtgcatatgcagcagtaaaaactttttataagagagtgtatgccgcaagagttagcgataatttagtgccaactactccattatcagccaatatatggggatacccatcaaataaaacatatgaaatatggctagatagaatggatggtaatgattttttatcttcaattggggggtgggggtgcgtttctccagactcggaaaatataactattcgctatcctatatatattaatgaaaatgacatacatcttgtggtctatgagccaagatcatcagtgtttaccaattcctctagaaatcactcaatgagaatcatacagagtgatctaagaaacaacccatacatatcaataaacccttttagtagagggaaagagtctttctctgaaaaattaaccacttatgtaggtaagttacgcagagggttgaattttattgaaattgtttatgatggtcagccaagtaaagtgtttgttcctgggctgttatttagagcaggaataagaacatgcattgatcttaaatcttcattcaatgtttctggaagtgatttgagatatgtaaatggaaatattttaaaatcaattccagacacaaactatcaatatataatgagcgatattgaggatgaagcccctgactctgcgtatggtttgtctggaaatcagataacaactttatcattgaagaaatttaatattggactatctgttatatttaactacaagacaaactgtagctcaggatgtggtattaggagggttgacagtaataaaattgagacttttaccataaaaaatggtgaagaaagtcttgttgagtcaaaagaatttagctttggagttgatggtatcgatatcactaagtcaggctcaattattaagatttctcaaggagaaaacaccatggaatttaacatttctggattctatggaggagtgacattagttggatcaccgacaggtggtaacgttagtgtaagtatggaaagctaccgttcttttttttcaagatag

SEQ ID NO: 314135 - DNA, 294 bp, Proteus mirabilis
atgattttaaagaaaaattctctgattatatcaaatggtgatggcatggatttattacagaaagagtgtattgcaagtgtaactctatatgatgtgagagcttcagagggagagttaatggtttacgaaggatgcattgattatgtattagctaattgctctgatgcagaaatactcaaaatcacaggttgtgaaaatggggaagaattatcattttaccaggaagaacttattagattaatcaaaatggtcggaaatccagaatatcttcctgatagatataaagatctataa

SEQ ID NO: 314136 - DNA, 522 bp, Proteus mirabilis
gtggctccacaccgacagccgccaatcccaaggcagcaccttatagacaccggtggaaaccaaatacctgaacaagggcgaactgatacaggcggaaatcaaattgttgaacctgagcgaacagatacgggtggaaaccagatcccagaaccgctcgaaaaactacctggaacacctatccctgagactccatctttagatgatcttgcttacttagacaagatcacacaaggcgagcatgcggggatcagaaacaaagaaggtcgtccagttggctctgtcattaatgatgttcaaaaatctaggccttcagatattttagttcaagaagatggtcgttggattgttaaaggctcaggaggaaaagttcatataattgagccagatggagaagttgttacttctttttataatccgaaagcgaatacagataacagagttaaaaaaggtgagtggcagcgaccttctaatgagcagctagatgattttaaagaaaaattctctgattatatcaaatggtga

SEQ ID NO: 314137 - DNA, 354 bp, Proteus mirabilis
atgaatgagaaatggagtttactatcgttgcaggaagaagttattgatgaactagatggtttcttatttatttcagcaatagatatccctgttaaagggtgtataacagattcagataacataaatagcatcgatagttgtactaagattgttttatcagaaagtgatgttcaaaaaatttttgaacaggatgaaacattcggaagtttagttggtagtgaatacttctattttgctatgcctgttaaattgaaagatgctgttgtgcttcagaaaaataatgaatttatgttgaaaggcagtagcgtcttaattttaatggaagatggtatgaaacaagaaatatttatttga

SEQ ID NO: 314138 - DNA, 855 bp, Proteus mirabilis
atgtgtataagagacagcttaaggaaagacaacccagatattattattgcatcagatgttattggttgttatatagcaaatttagcctctaagttttcattgagaaatatccctgttttttcttggatacatacatcattatggacagcatataaagcagtatatactttaaatgtaaattatcatatcccaattagctcgggtaataaaaaatacttattaaatcataatgtaccagaatctcatattaatgtggtttataatccagttgatagaacagataagataattcatcgtccatcaaataagattaagtttctttatattgggagattattgtctaaagaaagtaaaaatcttgaatttatgttctatgcattaggtaaacttaagggaaattgggaactacacttagtgggggatgggaaagatagaagtaaacttttttctctcgcccaaaaactacatattgataaaaaggttatttttcatgggtggcaagataatgcttgggattatgtattaaatcatattaaagaagtcacggcttgtttattgacatctactcatgaaggacttcccatggtcttaattgaagctcaatcttatgggatctattgtgttagctctgactgtttaactgggccttctgatattattgatggagataatggacaattattccctgttaatgatgaattatcatttttaaaaatattaaatgatatcatcaatggtagattagatttacctgaatacagcaaaataaaaaaatcgattaaaaaattttatggagatgtctacataaaaaacatgatagatttttttgaaaaaaagagtaaaaaaatacaatga

SEQ ID NO: 314139 - DNA, 1080 bp, Proteus mirabilis
atgatttcggttcgagttttaaaagcaaaaaacggtgattgcatcctactatcttgggttcatgatggaactaagagaaacattcttgttgatggtggtaagtcctctgtatacaaaacagtcgtacagaaaggcgaactttataaagcactcaagaaacttagagacaacggtgagcgtgtagataagctgatcctaactcatgttgatgatgatcatattggcggacttatcaaagggtttgaaactggagagttgcttaccgatttgtgtgacagcatatggtttaactcaggaaggttgattaagcgaggttttaacgccgaaagtatttcgagtaatgaactatatcttgagagaaggaaccgcaaggatggggaaacaggtgtaaagcaaggagtcacgttagaagagcgtataacagaactcggtatatgggacgaggaattgattgtttctggacattcaattgagttttatggtgcgaaaattacggtgttgtctcccacattagaaaaactgtcaaagttactacataagtgggaaaaagaagcccctagaagtgtgacatcagcgtctgtaaaagattataaagtaggtattgatgagttgactaaagatgatgtttttgagggagacacatctattcataacggaagttcaatagcttttatctttgaatatatgtcgaaaaacattttgcttctaggagatgcacatgacgatgttatctgtgattctttgtcagagatggtcagtagcaaagggaatgaaggctcttatgaaaaaacgctaaaaatggactgtgtcaaactttcacatcatggaagtaaatataatacaagctatgactttttgcgcctgattgagtgtaagaacttcataatatctacagatggtagtttacatggcttaccgaataaattaacactagcaagaataataaaaacaatagataagcccagcttgatatttaattacccacaacttatcaataaaatctttactaaagaagagcaggaaacgctagcaggctcaggcgttgtaattaaaagctgtgaagaacatttaaatgtatga

SEQ ID NO: 314140 - DNA, 423 bp, Proteus mirabilis
atggcagcaaaactaaacttaaatagccaacaggtatctgcaatctgcaagatcatcgttgtctggtcagacgacgaaaaactgacttggcagcgcttgactaaagaaatcaaggctcggatttctcttgatgttacatggcaaacgttgtgtaaatacttttctgtcaaacatgaatacaatcttaggaaagaggcactacgtgctggtaaaccagctgggcgcaacccgccaatctctgctaccgaaagcgatttacgaaatgaaatagcacgattacaacgagaagtcagtgagctagaacgcaaggttaatgctcaggtcgtcgcacttaatcgcgccaaggcaaacgctgcaaagcataatccacctatcttacctcatgttctgttccaagctccggttgaagaaaagcgagaatag

SEQ ID NO: 314141 - DNA, 783 bp, Proteus mirabilis
atgagtgattctcttattgcgctttggtctggacgtgctaacaagaaaaccaattttgtttatgacaataaaactgaagatggacgtcacgaacacagccttagtgtgctaggcgacgctaatgaggcggtgaacattattgttgttcctgcaaatgcagcgaagtttcgagagaaaactgggcgcaatggcctaacaccaaccttgacgctacctgacgaggttgatgaaaatggtgagctagtcatatcatatgtcttcaaaacagcccatagaatgccaacaggttactgcgtccaacctcttgaattggttccttgtaggaaattggaaggactggactgtgtgggttgtaataaaagctgtcacgttaagggagacctagaagacctgaatgtgctgcaagaggatcacgcaatacaggcataccgattgcattctgtgattaagcgtcgggcaacgggcattcctgttgatgaccggtggctggaaacacacgaacgtcgatacattaagcgtgcggctctgttatctatcctaacggatgacagcattgaagatggcgctgtgattcgcccagtcaatgatgacgataaccaataccttgtaacaaatgctgcaatgacccaatctgtcacgataaggcccctcctgcaggatttacgggaaaggctagaggctgaagaactcactaaacagcctattcaagagataaatgcggatgatgaaattactaatgagtcctgtccggagagatttttagctgagttaatggagtcgtga

SEQ ID NO: 314142 - DNA, 1650 bp, Proteus mirabilis
atgttaagggttattgatgtcaccaaatggcgaaaagatgatgagtttggcatatttggaattggtgctcgagataaaaaaatactttggtcaccaatagaacctcttgaaaatatcaaaattaactatccgtacttgtttaaagagtcaagagatggctgcccagatcagttttggatggaagttatcgcatacattataggggacagtttaaaaatagatgtgccaaaagcattcccagccataatgaaaaaagataatggggatgtaatttgtggtgcacttatcgaatggttttatgatagaaaagaagagacattcgtgcatgcagttgattttttttgtaaattaatcgatggttttgatacgaaaataggaaaacagcataatatcgtagatgtaataaaattatgtagggcagtttcatttaaatggggtttaaaaacaaagttagatcattggatttcaaattttgttttgtttgattcacttattggcaatagtgatcggcatcaggaaaactggggctttgtgttccgtaaagtagaaaaaaaagaaaatggggattgggtattagatgtacgattatcacctctatatgataatggaacaagtttagggcatgaaaagaaaactagtaaaatagcatgttggggcaactatcttattgataattatttagataatggtttccaccatgtaagaattagtcgagaagaaccagattgtagattacaacattttgaattagttattgcttttgcctatcacaatgcaagttataaacaaatgtttattgaaaagctaaagtttgatattgatacattaaagcataagatatatgaactttgcaaattagatatagatgtaaacttaacgccagagagggccgagtggataattcggcttctgactagacgataccagcggatatcattgatattaaatatgcgtatattagaaaaaattattgaaccaacaaggttattactaacatggcaaccaccagaaggtggctcgagatttttagtcgctataattagacgagataatgaaaattatcaacttgagtatcagcttgatactcttgattttcagcgtgcggttgaaaaaggattttcaggtcacccatcttttgatttaaagcaacgggttcatactagtaatgttttggagccatttttaaggcgtttaccacctaaaaaaagaacagattttgcagagtatttagagctgcataagttgccttctccttttgaattttcagattttgcattgttagggtatacaggagccaagtcacctgctgatggttttgctttcgttatcgacttagatggaatatcagaagagagtgagcatattctagaggttgctggtactcgatatttagtaaacgaggggcttgatttaagtgttgtacatattggcgagcgagtgcagttacaaaaagaacctgaaaatttgtatgattcaaatgcaattgctatttaccatccaaaagctggcaagttaggatatataaataaagttctttgtacagcgctagaggttaaggtaagaaaaaataaagtatcggccttcattttgaaaaagaatggtaccgaagatcgacctcttatatatctcttactagaaattgaaaaataa

SEQ ID NO: 314143 - DNA, 543 bp, Proteus mirabilis
atgaataatataatgcttgatattgaaactcttggtgttgagagtgattcggctatcctatctattggcgcagtactctttgatataaaaaccggagctctaggtactacattttataaggttatttcgttagactcatcattaaaatttggccaagttgaaggaaatacccttaagtggtggattactcaatcacctagagcaaaggagatttttaattctagagatgcagtaacacttgagtctgctttaaacgatttttctgagtttgtcagtcaagttgaaaatgtttgtgtatggggaaatggaagcggttttgataatgtcatattgaaaaatgcgtataatagattatcaatgcctataccgtggaattttagaaatgatagagatgtacgaacaatcattgcattagctcaagacatattagacattgattttaaaaatgaagtagtaatggatggtgttgctcataacgcattagacgatgcaatatatcaagctaaatacgtacattctgcatttaaatccctatctaaataa

SEQ ID NO: 314144 - DNA, 168 bp, Proteus mirabilis
atgccaccactcaggagagtagcgaacagtattttgcatgatggcggtcagtgggcgattagccgagagacacacgtcattgatgggaacaggtttataactcaattggaacttgaaataaaaatcaaagatattggtatgacggatgacaagcaaaacgaaacataa

SEQ ID NO: 314145 - DNA, 1257 bp, Proteus mirabilis
atgtcaaaagaagagttcaaccaccatctagatagtaggatatctgcattaatacagcgtattgatgagttatctacttgtgcagaactgctgaaaaaagaaattgaagatgataatgtgagcgtagatgacataaatagattgcaagatatagaaaacagacttttagagtccaatgcaagactatctggctatgtaaagcttaatgaatttattacgaactcaaaattggaacagagctcatctatagctgaaattacagagttagcgataagtttgattgcagagcttgatgataaactagcgcagtacataaccgaaaagagtaagttattagatgaggagaaaaaaattgctcttcacgtcgaaaaaagcccttatggtaaattagaacaaagggcaagaggcgataaaatccattttttacaagaaaagatggatgtgattataaagactattccatggttttttaatatcctgaatggttatgatttagctagcaatgaagacctgagttccttcgtcaggttaagaattgaaaacatgatcaatgatatttctttgaaggatattaagaatcagaacatgttggtgctagtgtcaacagttaaagatatttctaaagagttgattggctattcagatatcacagaaatccaagcaaaattacgtgaaataggttgtaaattaagaaaactatacgatatttctactgagctggagaatgattcaatatccttaggaaaggaaattagttcgagagttgatgctttctttaatacagatttaattaataaaatatatcaaagtattgatccccatccagaatataaggaaattatattcacgtgtacggcagaagataaaccaaaattgttagtgtctgctcgaagtacaaaaagcaatcaacttatgtctccaacgttaagttttagttcggcacaaatcaatgtactagcgctaagtatttttcttgctagagcgataaatgttaaagataacaaagggaatgatgtagattgtatcctaattgacgacccagttcagtctatagacgctataaacacattagggctgattgatactcttcggatgattagtgttaagtttaataagcagatcattcttacaacacatgacgaaaacttccatgagctgttaaagaaaaaaattccacaagatagcttttcgtctaaatttctcagactcaaatctttcggtaaagttagtcaagatagttctattgaagaatattga

SEQ ID NO: 314146 - DNA, 339 bp, Proteus mirabilis
gtgcatatacaaaccctcataaataatatcaatccgtttgttccgtttgctagtgaacaagatgctaataattttttaaaaaattacactccagatgattgctacgccttattaaccgcaatgtatattggtcgagatcatattcacagtaataaaatcacccctgattatgacacagtgctatccagtggatcttttaatagatactatcaccaagatactgcttcccttaatgagattcctcgaatactctacgaaaaaaacacaaacttaacctcgtattatgaatcatttattcgttgcgctacgaattcaggtattgatttaaattatttttag

SEQ ID NO: 314147 - DNA, 330 bp, Proteus mirabilis
atgcaagcttggcttactgatgcgctaattaaaattgctttagagggagaaaagcgttttctgattgaaacgcacagtgatgctttagttcgaagagttcgcttgagaattgttgatgagaatagtcaattaacagaaaaagatgtagcaatatatcatctagaaaggaacaaaataaaaggatttacttcattaaatatgataccgatatcttcagatggagatattacttggccaaaagatttcatggatatcgaaattagagatactcttatgattcaacaatttaaaatgcaaaaaagcataaataataaaaaaggaatccattaa

SEQ ID NO: 314148 - DNA, 279 bp, Proteus mirabilis
atgagaacaaaaaattttactaagacttgtcgctattttgggaatagtagagaaactttttatacttggaaaagaacttatgaacgagatggcaagaaaggattaatcaacaataaaccctgctctgaagatccaatcagaagagttgtaaaacacatcgaagagatggttatttatctgcgtatgacttaccatttcgattccaacgtatcacttggtatcttctactgtttcataacatcaaaatatcacgttctggtcgctactatgtattactaa

SEQ ID NO: 314149 - DNA, 168 bp, Proteus mirabilis
atgcggaaccgtaaaatgagaaatgacatattacattggccatcagttaatcacaaatgcctgtccgataatgaagatgattatagtagttacaccatatttgatagcgaacaagtgaaagagagtttaaacaatagttatggggagtttttagctgatgaagaatga

SEQ ID NO: 314150 - DNA, 186 bp, Proteus mirabilis
atgtcagatgtagtaattgatccaaaagaaaaccctgaattagcggctcagcaattagttgtagaattgattaaggctgaaaaaacagccatgattaatggagcagcgtcaagatcaacagttgagtcgatcatatttgctcaccaaagttttactaattactttaaaaaacttaaagataattaa

SEQ ID NO: 314151 - DNA, 270 bp, Proteus mirabilis
atgattcagaactttcaaattaaaccatctattcttgatggaaatacgcttaagtttatgctttataccatagtgttttttctgttactgacacaagggacgggtgtacggctcatgtttcctataaatgaaagtgttgcaacatactatgttgaaaaacatggttttcaggatttaactggtgatggttcaaaagaaatactttaccgctcagcagaagatttattaaattggtttgagcaaaataaccgctcagttgatagtgagtga

SEQ ID NO: 314152 - DNA, 834 bp, Proteus mirabilis
atgaagctaagaaaactactggaatatgattttattattgattttcaaaaagtattagccaccgagtttgagaaagagttatttattgcaagcttgaggaattattgttctcatggtaatccactaagatttcataattttgctttttcaatgagagagttagtactatccattattgaacgaaaggcacctaacgataaagttaaaacgactaattggtatgaagtagaaagtgataaatttgaggtgacaagaagacaaaagcttaaattttgtgcacaaggatatctatcagatgatttttttaatgaagaagtgcttgaagagttaaattcaaatattagtgatttcttgggtaattttcgttttttcaataaatatacacatataagcgaaaaatatttgaatccatgtccaaagaaattttttgaagatatgaaaagcactattcaactgtcaaaagaggttatagatgagttatcttcaatagaggattttgttatttcagctgttgaaggtagccttgagtctagagtttttgatgcggttattaacaattttcctgatgaactatcaatattagctcataatgtgattatagagcaaatagatccagagcagcttagagtttcttcgattagtgatagtgaaatatctatttatatcgatggtactatatatgtgaatcaagagtatggtgggaaaaatgactttatgtcactatcaaatgaatatccatttactgttgaaatatatgtatcagttgataatccaaatgacatcaatattgatgctaataatattattattgatacttcaaactggtatgagtga

SEQ ID NO: 314153 - DNA, 441 bp, Proteus mirabilis
atgaaaatgagtaaaatacttgagccaataaataaatgtgccgaaaatttaaataaattctttgataaagtaccgtccattagtaaaacagttagtatcgtagtatcaaacttagcagcttatacagtggtaaatggtttaatactccttatagcaatcaaggcatcatgtaaatatcctaatctacaaattaatccatataatgtaagcactactctttgtgttatactgttttttttctttatcaatgatgtctttaccaatcatattccgataccatcaataagaaataagaaattcactttaccactaattatcacatatacttttaagtatatattgtttgctgtactttcatttattataacatctttttatattgcttctatttatcagccattaatctcaatacctgatagtatttttaaatgtacatcatga

SEQ ID NO: 314154 - DNA, 171 bp, Proteus mirabilis
atgtttggtttattccttttggtatgtagttcggtaaattgtcagtttgagccctatggctacatttatcctgatgaacaaaattgtttaattgataaagaggtactcgcgaccaaaggaaaaattgcagagtgctatccagtagagggaattattcgagtaaaaagttga

SEQ ID NO: 314155 - DNA, 867 bp, Proteus mirabilis
atgtcagaccgacaaaatcgatatgttgccttcgagcaattttataaagaatcaattaccttattcaaaaaatacgcagataatccaaaaagtaaacgcttagatagcttatattcattctatgttaaaccaggaggaaggtttgtaggttataataaaaaaattgttgaaattttttatggataccggccgtttaatatagttaaaacacttgataataattttcgaataaaaacaaaagcagagagagcaagtggtgccactcttagttaccagcaagcagatgatggatgtgttttgtgtaccatttctccggcattttcagagaattttcattatcccgagaattttattcttcttgatataattaaggacccatcgtcgcttacaataaaatccaaatggcattggaggttctttcaggcctatatggagtcaacttgcttagatggtaaccctagcatgatccaaaaattatatatggtttacttacgttgcttcaaagaatatgtaattgatggcactctgcaaaagcgtaaagctacaaagttcttttgcgatattatgaagtatgcattaaccgtgggacttagtggatttattattttggctgtttcttgggctaaagattcaaacaacaacaaccaaattatcgaaaggcatagagagcttcttgacgctttttctgttatgtctgacaatatacgctcaattactgattctgctagaaaaattaatgaaataactgaaaaaaatcaacaagaaataagagataattttaatttaataaattcaactattttagataaaacatcaagaattgaatgtacgataacacccaccaaggaaaataaagaaattaagtaa

SEQ ID NO: 314156 - DNA, 444 bp, Proteus mirabilis
atggtaatgaatggtgggtggatttatgttttcatgagtgcctctgactatgatagatttaaggttggaatgacaataaacaatcctttaaagcgattgaatcagctaagaactggggatccaactcttgattttcaagttgcatatttcattccttcagcattaaattggaatttatctgaattagagaaccatatacacaaagagcttcaagcaggatcaggcagaataaatttttttaatgaaacaccatcagaatggttccttggtgattgtagaaatgcatggatggaactagacgttattttcgaaaatctagaggttaaagttactgattacttcgatcctgatgagaaaaatattgtaagattttgggaggaaaatttaagatccttatatgctcccccacttcctcttgatgagaatggattcccgagtttttaa

SEQ ID NO: 314157 - DNA, 210 bp, Proteus mirabilis
atgagtattaacgaagctaaacaactgctgttagaaatggcaataaataaaaatcctcgtcatgtagaccttgcaagctcctatgtcgccgacttggaaatagaccctggtttgattgttgatgcaattgaagaactagaagctgagtataagattatagttatagacactctgtcaggcggaataccgtcatgttatcgattgaggtaa

SEQ ID NO: 314158 - DNA, 465 bp, Proteus mirabilis
atgaagtattggaaattttacattgtagttgtgatggtggggattgttgttggtggttgtgcgctgattaatgcacaaactaaaagaattaacatactgatagaaaagaacaaagaacttacagccatactcaaagagcaaaaggctatcaatactgattatcaagtacgtatagagcgactcaatcagcttgatataaggcacgcacaggagcttgttaatgcaaagaatgaaattaatcgcttacgtgatattagtgagcgtaatcctgagcgggtgtacatcaaagccgaatgtccaaaatccgaaggcgttaccacctccggcgtggctaatgcaatcaccgcccgacctactgacaccgctatcagaaattattggttactccgagagcgaattgcagagtcagagcaaatgattctaggattgcaggattatatcaatgatcagtgtttgagaaagtaa

SEQ ID NO: 314159 - DNA, 612 bp, Proteus mirabilis
atgatctcaaatcaaaacctaagtaaagcctccgagttaaccattcgactgcttggattgctagaattccaaactgaacttttaattggtagaaccagcattgacgatgctatctctgctaaacactggcctaaaacttacgataaaaaagatggatatggagggtgggactgggaggatctatggagtaaatatagattaaacaaactttgcatttctataaaaactagtgacaaagttggggctttattttgtggaagggtgagcggtgacaatgtgaatattgaatacatccaacggaattatgactgtgaagaactaaaagggaatacagctaaaattaccgttgtattttcaatcttccttgcaaaaatacttggcaaaaaacttataaaaatatcaaatcctgctcccaaaattgtcactcactatagtaacatattaggcaaaagaatccaaaccacatgcgacaaaaagggtcgatgttcacttatagaatgtcatgtgacagatgtcttagaacatctatcacagagtattaaaaataatcaagatttactatacttactttctgattcgccagaaataactaatggttcatcctctatatag

SEQ ID NO: 314160 - DNA, 213 bp, Proteus mirabilis
atgtctaactatgatagaaaaaaaattgagcaaaacattcgagagctagaagagttagttgttgagttagaatatttgtctgcatcatactctgataccggcgctaaagtggtagctagtgaccaaatacaaagatttgcacacagtctctatatagaggatgaaccattagttatttctggcgaatcagaaagtaagtatagtaaatcttga

SEQ ID NO: 314161 - DNA, 744 bp, Proteus mirabilis
atgagcaatgaccgtcaattagaagttactgaggttatcagaataatggaagctggctcaacagaaccagtattatgtaagtgtgatgacaatgccctttatgtcattaaaaccacagcctcagtaccaaggaagcagttaatacacgaactggttgcctcaagcttagctaggtgtattggcttaccaataccagagtttgccgttgtgtacatttctgaggaactgattgattatctccctccggatatcaaaggtaagcttagttctggatatgcatttgcatctttatttatacctgattcaacacctatatcattcactgatgcacataaagccatagatttgcttaaacagaaaatgatatatttattcgatcgagttactaataactcagatcggtctctatctgaaatagatggaaatgtaaatattatttatgatgttaaaaaacaaaactactatttaatagaccacaacctagcatttgatgcatcatgtactcttgagcagttcgaataccacgtatattcacctaggcatagaacgtggtcatacgatatgattgatgttatttggattgaggatatcatcaaaactctcaatgataattgcaatgaactgttgttgtcactacccagtgaatggatagatgaattgccagataaagatcatgttatacaaaacattatagacatattagctagaggaaaaaacactctttttaggagttcaataacatga

SEQ ID NO: 314162 - DNA, 822 bp, Proteus mirabilis
atgaatatccccctgctttacagcataataagatatacaccttacgcagaaactgaagagttcgcgaatgtaggggtggttatttgttcaccaaaaacaggtgagttagcttttagcattaccagacataacgacgcccgaatcagacacttttttaaagatgattctatctttaatgttgttaagcctgtaattgaagatgagcttatgaccgcatcaaaaatagttgctagcttaagcacgcccgaaaaaatacgcgatttcttctttaatattacagagcctagagagtctgtttttcgctatagccctagtcgagttctgatggcaaaaagtataaatacagaattagaaagactgttcgctcaattcgtcaaacagtcagggcacacaaaagaaaagcgcgaggaagttttagctagtgaattaagatgcagatttcagcgccatgaggagcttaaaaattcctttaaaaagcttgaacttggtggagaactaaccaggttcaatatgccattagttgcctctgctgatggtgatattttatgcgcaatcaagccgttattgtttgctcagaatgatcccagcaaaatgcttgagcactgtgataaatgggtagccagaattagaagagctgccagtgaaaatatattaaaatttagtaatgtattacttactattgaacatagtaaaaaattaaaaactcacgaggctaaagccatagatgaaatcaagtttacacttgataagcacaaaataactcactttgactttcgcgataaagattcaatagttgattttgcaaaattgaaactaggataa

SEQ ID NO: 314163 - DNA, 696 bp, Proteus mirabilis
atggggcgcttccatgaagatactaaaatgcacgaaatggcatgcattaaatccgatgggttatatcgtcattaccacttttctaaccaaaaaaattcagcatattggtttgatattgtgacaacaccttattatctatatatgactggagatatgggtacttgggtatttagccgtattaaagatatgctccatttttttaataaaaatgaaatcgattatacctactgggctgaaaaattacagtttggttcctgtcgtaatgaagcatctgttatctacatggaagtggatatcaaggcaacgcttaagaacttaaatagagagcttcaagaatggaaggtttacattttagaggatgaagatagtacagaaaagaaagccgatataaaagaggcttacaaagactttgctagaagaattggcgaactaaaatcactgattgatgattattcttcatgcggatcaatttctgaattaacttattcttttgctattgaaaattcaggactgactgacccatccgtaggcatgattgaatcaccctgggattgggagtcagtacgcccatatacaaaaccaacctatcaatttacatgggtctgcgaggctattcaatatgcaagccaacgaatcctaatcaaagaattagcagataaaactatgaataaatttttaacaattaatattaaataa

SEQ ID NO: 314164 - DNA, 186 bp, Proteus mirabilis
atgaaatataaaaaagaaaaatcaagatatgtcgttagcaaatataatgtcatccatgctccattaatggattcaacaatatgtaatggtgttggtatattttatgaggtccctaatgatattacaataaaggaatcaattcatttttgtagaaaatgttttccttatggaaaacccaaacggtaa

SEQ ID NO: 314165 - DNA, 6360 bp, Proteus mirabilis
ttgctaactccagatacaactttagcggctgtaacagttgaaggcgtaaatcttgatgatggaaataatccacaggaattaacggaatgggactctgttgattgtggcttattttatggtggccatacaatagagcgagctgaaaagattgtcattgagcagctaaagtattctgcatcaacacctgaaaagaattggactgtttcggaactaacaagctctaaatcaaaatcttcaaataacagcattatcaaaggtcttgctgattcatttactgcaatattaaagtccaggccagaactgattagcgctgatgcactaacaatcaagctagtcagtaatcgtcctattggtacagaccttcagaaatcactgtccgattccaaaaatgcaaagtatgaaacactaagggttgctagtggccttaacaaaacaaatttcaaaaattttattaaactcttcgacttttctgactgtggtgctggttctcgttttgagcaggaagaaagcgcaattaatgagattctagctcttacacttagtgctgaccgaggatttgtgctggatttgaaagatcgtattcataagctgatgctgccggaaggcacgagaagttatatcactagagagacagtgctgacatggatgaatgtgtctgaccctcgtgctctattcccatgccccccaagactcaaagcagtagaaaatcctgttaacagacatgcagctgttgcgatacaaactgctatggtcaatggcgatcaatttatatgcctgcacggagaaggcggtagtggaaaaacaaccgtattaaaacaggttgaaaatctattgcctgaaggttcagtcataattacatatgactgttatggtgctggcacttatataaatagtgaagcctatcggcatagaccaaaagatgcctacttgcaaataatcaatgaaacctcggctcgattgcgattacctttgttgattagccaggacaattctgtagattttattaaggctttttcgttaagaatcgaaagcgcaagcaaagttttaaaggcgcaaaaagataacgcattgttggtcgtcattattgatgctgcggataattctgtaacgggtgcaaagcagtgtaagccggaagaaatcagcttcgttcatgaactaattaaaataggcagtctgccaactaatgttagattaatgatctctgcaagaacaggacgtttagattcgttatctattccgcctaaatacaattcagtagaaatttctaacttctcattggaagaaacagcactcaatgtattaaatcaatttcccagtgcaaccgaagcatggattgaggattttcataatttatctaatcagaatccacgagtacaaagttacgcattcgattatgcaggctcagatccaggaaaagcaattgaatttttaagacctaatgggaaagggttggatcaaatctttgaggctcgctttagagaagcaattttgaaggaaggcgattctgacgttttgtctctcgtttgttcatcgttagtagcactaccagcaccagttccaaagcaacatttagctagtgttgcaggaatatcaatagaaagagttaatgatattgtctctgacctgccaggaatgcgagtccttgatgacaaggtgggatttcttgatgaagatgttgagttctttgtcagagaaaaagctcaaccaaagctgctagaagcttataaacgttcagcagcacacttcaaagctagccatgaaagtgatgagtattcagccatgcatttggcctctgcattattttcagcaggacaaggccaagagattataaaagtcatagagcaaaatgaagcaccaaaagctataaaagaccaaataattcgtcgagaagtgcaacgtcagcgattacagctcgcaatgaaagtgtgtcgatcagcaggcaacccagcagatgcaatatttactttgttggttggtgctgaggctattaaaacagatgatgctgtaaataaaatcatcactgaaaacccagatttatccgtctattttgcgtccgatactgtgggccgaaatatactttactcgtcaaaggcatatttgaaccatggcagattcctatcgcacattgttgctcgggatgcagccgataaagactttatcgctgctcgcgagaaaaaacgcattctacatgaatggatgaatcgaagaagtgaagatattgagagacaaaaagccgagcaaagcgagcatgggtacccacgtatagatgcatggccaatcgagtttgatgatattgctgctgttgcacattcggtattggatatggaagggtatcaggctgcatataagttcatttgtagctggaaaccaaaaagtattcattacaaaatcgcaattagattattagaccgtttattgttatcgggcaagctagtttcagttcaagaatttttggatagtggttgtgtaccagagccttggtcatctttgttcaaaatacctttggcacttgtcggctatagtatcgattatgtctctcttgaaaaatcattgtgcaataaggatatactgaaatattgcggcctaaaagaactggcaagatacacatctgaagacgtagacggttttagctacgcggaaatgttactcaatggatgtgaaattttggctgcaaatggagtggatctatcctcagttgagccagtccttgaatatctatgtcctgatgattggcggttggtcaataacatttatatacacaatattattaaaaacgatattgcttttagagcttactccctgttgatgcgtcatcgaggtttcaacgtcacaatagagtcctattggattgatccgcctatacctgaggacattgataaggttgaggaagataggaagaagcaaaatctatcggaaaaacataaagagataagggaaaatctgtcaggcttaatttctgtttatgctgttagagcagatgttttgttgtccaatatcttgccgcaaaatgctgaagagaaagttaagtctgcattggggtctttgtttacaaactcctggaggatgtctagggagcattattttgaatccatatgtagtcacctttctttatcattagccatactgtctattgtgcctgatatcaatataaactcagtgctaaccatagctaagagcgcatttaaacaatggccatctgttttttcttctggtcagcgtaaagtaattgcaaatctaataaaaataccagagctgaggcctctagttatcaaggatatttacgatcgctcagttgaagtaaaagaactaaaaacagcggcaaacgaaaaaatcagcattcttttagatttgtctagaatattgctgtttgtggataaggacgaagctagggaagtatttaaaatagcagttgatatcgctagtgacgttgatgtcgatgctatgcatgacgtggctcttttttcagcgttatccaaaaatattaaaaaccacttttcgctcacagattcacagcaaatagcaagtcaaatggcggcgataataacagagtacggtactcttcttgatggctatgagcattttccttggagtgatgcaatttctgctgttgctatattggatatgcctaaagcaatcagccttattggttattgggaagattgtgatttaattcaagccaacgaaactcttcctgcgttgatgtctacgggaattgcagaaggaactctaagctctgcgcaggctgcatctttgctcaatttctgtgatgatttgggtgaggaaattgtgactaaactagcttcagttacaagcgttcaaaatgctagtaacttagtagaggaaattgcaaaagctgagttattgagattcaacagaagtggtagctccaaaatatgtcaggaattaaataggttagttccatattccgataatagtgaatactggcattcagcacttaatcaattagttgaatttaaatcacataccccaaaaagcactgagtccaaaactagcaatgacgaacttgattcaacaactagggcgctaaaaaaacgcgagttccttgaaggtataaaattagcagagatttcctttaaatcaccttccgattttatgaattcaattcacgccaagcgagaagaagctagaggtaaagatttttatattaccaacaatgacatattgagatctgtaatcagccaattggagtcaaaggatcgtattacctttctggattttttaaccgatgagcacataattgatgatcttgactacacatgggctagtaccttaattgaatgtatcaacatatgggtagggtcatctcacgctatatctgcttggaaagagggaaacctgccactcttaattgctaattatttgggggagttctcttatagtgaaaatgatggcaacaacaagctgatgctaaaaaatgttattcatagccttaatttagataaaaaggatacggttaacatactgttaaatggcctagaaaaaaatgccgaatatttgcccttgaataagctctattcggtaatcaggttgctgactgattattgctgtgagaaacaggttgctgatgtcacaattcgttatgttcagcgactaaccactcggctaaagcttccaatgaataaaattgagtctgagtgttcagttgaatcagcattagctagacaactctactcgttccttggcgatatagatactagggtgagatggcgagcggcacatagtattagagcgtcagccaggatgggtgattttaagacaattgcggcgttaactgctttgtatgaacgtaaatctatgtccggctatcgtgaagataatgcgcctttctattggttgtcagcacgtctttggctcgtcattacacttgatcgaattgcatctgaggtaccggaagctattgctcctgtcgcacgttggttgttaagcattgcgactgaccaaaacttcccacatgtactaatgcgccattttgctaaatcctgtttaatgaagcttctttcaaacaattttattgattttgatgagcaggaaagaacagtattacatgctatcaatacttcggaactaactgccaaaaaatcgaaacgtagagtttctcggggaggatttcatgaggaaggcaaagagagaaaatttgaatttgattcgttagataccctccgatatgtatacccaggcgcgatagagtgttttgctaatgttgacgaagaaatttttcttgacgaggcagagtcttggatcatggatcgctggaatagcggcaccgatttatcaatatgggaaaacgaaccaagaaagcataaatttaaaaatgctaactacgccctttatagccacagtcatggttcaatgccgactatagaacgccatagctattatctagaatggcatgccatgtggtgcagcctcggctctctaatggtaaaaaaatcattggcaaaaccagaatatgatgatgactatggaacattaaacggttttttaataagggaagggttaacccaaccaccgcaatggtcaagtgaccttcgctgtccaaagccattagaaacacgttttcactatccccctacagtcaaggctgaagattgggtggcaacaataactgccaatgattttgagttggagctaggtttaagctctgaagatggcaacttagttgtggatgcatatcatgatattcgcaccagtaatcatcgttctagtgcaagaatatcctcagccctcgttaacccagaaaccggggattcattaattagagcgcttcaaacatctgacgactcccatgactaccgtttgccacctgctggacatgaattagagataaatgatgacccatttttactgcatggttggctcaacgaacactctggtgattcgcgtctagacgaaaaggatgtgtttaatcatggtgtccgcctaatagaagcgactccgtctgaaaatgtcgttgaaatactgggattacacaggtcagaaaactaccccgttagctggctggactcctctaatggagagagagcgtttcattatgaggcatggggtgatacaaaagatgactctcgacagagagaatacatttacggtgaagatgttatctctaaaggccatcgcctgaaaatatcactacatcacctcaaacaatatctagataaagtcgaccttgacctaatccttgaagtcgaaataacacgaagagtaactaagaatggaattacagaatataacgaagagcccaaaaaagaagcgcggtacgcaagactctaccttctcagaagaactggagagatccttaccacggaaggatgtgttggtacttgggcatcacctagcaactga

SEQ ID NO: 314166 - DNA, 537 bp, Proteus mirabilis
atgtctcatcacctagctgagttgatgcaaagggctgagcatgaagagagtccagagaaaaaagaaaaataccaacaacaagctgttgagttaatattaaagctatgggggcataggcgtaatatgagtagtaatgcctatccattagctcgctttaagaaaattattgaatcactgagtatattatctcctgaagctaatgtatgggaaaggaacaagttagggaagtatgaatccttagctgcggatgcattttcgatgatagttgacttgtatagagcactacattttattgagtttacttcattgaagataaatagaagtaaccaagtacccccttccgtactaactactgaagagcaagaagtatatgactttttgatctcatgggctgaagaggaaatgaactttcgctcagccaacaaattgcctacagagaaaagtgaagttcaacatgtgtcaaaatttcttagtgatcatattgatgatttatgcgagaagttaaatatgctcaagaatgagctctccgaaaaatag

SEQ ID NO: 314167 - DNA, 3195 bp, Proteus mirabilis
atgtttgatccagaaacagcttcactacttcgatccgctcccgagtttcctgatttagttcctgaagatctgccgaagctattaacgaggcactatgcacagattgtctctatgaggcttggtggagaagaacaatccagtcaggaaggtggctggacattagagcgtattgcggacacctatgagctagtagtttctatcaataacgatccatctattaggcgctcctctgcatttgttgctgcaagtgctcagcagttgatagcaaggagagaggagttactgaaagaaaaaattgctgagagcgaaaatgtaagcagggatcgtttagcacctgaaattgctgccgtcctcctatttcttgcggctgaacaatacgcagatgcccttgaagccgcgtccaaggtaaaaattgaaaaggaagggcagcattatcttgttaccgagttagtcaggcatatagtagatttagctaaaggccagctaacagatattgttaatagaggtaatgaaagagtaggcttggttgttgaacaaggtagtaatgttgaattttcagcctttatcgcattggttcagtctttagtcttaggcatagaaaatctatcaaaagtaattttaggaattggtttagacaatacccaaatccaaccttccatagcgatttttgaacatgtcaaatcgctagccgcttcaatcaataaagatactttagcgtgtggagtagaattcacgtttcctggcattactcatctagcctcattactaactgcaacatatgacgggatatctgaatctgcactcactaggctggagccacctcaaggctctgtgcctgaattttggcataattggatagcgttccgagcaaaaaaattcccatatatttggcctaatcacagaaaagctctcgcagctggctttcaccacaatggaacgtccgctgtaatggttttgccaacaggagctggaaaaacaactatttcctcaataaaaatcgcaagtactttatcacagggaaaaaaggtaatttttcttgctccaactcatgcgcttgttgaacagcttaccgtcgatcttcaagagatgtttccgcaagatattctaggctcgacagtatcaagtgattttgatttacttctccaggttagcgcagttctcccagaaattgaggtaatgacgccagagagatgcttagctatgctttccttttctccagaatcctttgatgatgttggattattagtatttgacgaatgtcatttgctcagcccacaatcaggaaaaatacgtaggtcgctagatagtatgctttgtctgctggcattcaatagtattgccccagaagcggatactctttttctctctgcgatggtgcaaaacggagaagaatttgcaaaatggattaatcagctaacaggtagaagttgtattagtattgacctgctatggaagccgagcaggcaggctcgcggaattgtaatttacgcagaaaatgacatcaaatccataaacgtaaatgcaaagaatgtacaaaagcgccttgatgagaaggatgggagacgtgctgcaaatttaagagcagcttcatctagagagttggttataagtccttatgccatatggggcttgcagcacaattggttagatttggaaaataataatgcaatctgtactttcacaaagctaacacaggataaagttttacttagcggaaagctttacctaaataacatatctattactcctaatgtaaacagtgttgctgcaatcttagccgtgacaagcgccagtagtcgacttaaaactattgtgtttgttaaccaaaagtctcatgccatatccactgctaaaagtatctctaatgaacttggggcacatattgttccaactgaagatgaaaaccgtagatgggatgccttagagttagagcttggggggcttgagcattcattgctaagcaaaggagccgccgcagttcctcataacgcatctatgctacgcattgaaagagagctgtctgaacgcatgtataaacgtgcagatggagcaatggttatcgttgcgactccaacgttagctcaaggtcttaatcttcccgcacaaatggcaattttggcaggagataaacgtgctgaaaatgataaacgtcaactattggaggcacatgaattattgaatgctgctgcacgagcaggtagagcagggcatcttgcaaatggaattgtattgcttgtgcccgagccagttctgatattccccgaaaaccaaagtctaaataaggatgttgtaagtaaattacagtcattaattccagaagatgacaggtgtgtagaaatttcagacccaatatctatagtgttagataaaatttctaatggcaatactgtagatcgtgacgtgatgtactttgttaatcgccttgcaactctaaatgattctgaaaacaatgaacgttcattgtttaatcttaaatcttctttcgccgcatttcgatataggacgaataatgaggaacaaagatttgacacgcaattagtcgagttagaaaatcttgtaaagcttatagatagcgatgaaatagatcagtctttatcaattcttgcatcacaaagtggattaccaccacttgtactttcacgtttaaggaccgtgattacacacaatattggggatttaccaacatccattaaagagtgggtttcttggttgtttgattggtttaaagttgattcagaatcaaaggagctgttactttttgatgtgaaaatgtcagtgcttggagcaactggacgaaataataacgataatctatcggatgacgttctggatgcgttatctctaggaatattttcatggttagatggttcaccattaaagaatgtggagattgctttgggcggaaggcctgattcaaataatgcaactgcaaaagcgtgcccacgagcaagggaattaataggtacaattctaccaagaggtctttcttttattatgggactggtaacacgtgttgtaactgaaattaatccgtacgacagccagaatagtctatctcatgaagtagtagaagctctaagtactgcaattcgtttgggttatgatagccctgaaaagctagctttttctattgcaaatccggctattttgtctcgtgttggagttcatcaagcctttatccaggaaagtagttaa

SEQ ID NO: 314168 - DNA, 849 bp, Proteus mirabilis
atgccaccagaagaaaacatcgcagctcttgagattattggttttccaattgatgataattgtgtcgggtcaaaatggaaagttgagaatgaagatcaattagtacgccttatagctatagttgttatggggcaggctgcgcaggcagcttatattattgacgaattgataccagcatcccctgcatttactcttgatacactaaaacaggaagcagtaataaagttcactgttcaggatgttgctcgaaatccacgaacgggctaccccagaattcagagggatggtttgatatttgaaattatttcttggatagcggctaaacaggtgtccggtgataagtgttttcttaaagatccacacacgagttcaacatctcaaggcttggacgggatcatgatagagcttaatgaagatggtagtgaaatactcaaatccactatttttgaagacaagtgtacggacaatccacgagatacctttacgcagaaagtaataccagggttcttagatcggcacgaaaacacaagaaatgcggagctgattgctgctgctgcaactcttattcagttaagtggagttagtaatgttcaggccatgtctatggttcgaaaagttattgataactcaagcaggcagtatcgagcaggttttgcgttatctcaggatttcgatacggaggaagcccagaaggcattgtttaaaggatatgaaaaaattaaagatataagtcaggagcaacgcattggtgcaagcctcattgtagatggaaatttaagggattggtttgatgctttggcaacaaaaatcattgtttacatagaacagttagatgtggagcaaaattaa

SEQ ID NO: 314169 - DNA, 222 bp, Proteus mirabilis
atgagcaatccaacccatgctgtttttaaacggcttcctttagggggaagaaattggcgacgttggagacaaagtagggtaagaaacagtaatgcaataacaaaacgccaagtcaaaatggcaaatgaactgccattatctaaaccccaacgagaaaaaatagcaccactactccaaagtagaacaaaaagcgtagtaggggcaaactttgcccaatattga

SEQ ID NO: 314170 - DNA, 747 bp, Proteus mirabilis; identical to SEQ ID NO: 298907

SEQ ID NO: 314171 - DNA, 303 bp, Proteus mirabilis; identical to SEQ ID NO: 302046

SEQ ID NO: 314172 - DNA, 147 bp, Proteus mirabilis
atgaaatttaaagtcggtgataatgtcgtaaattacttttatgaagttggcgttatattagaaataaccaattctaaatatctatgtctgtttggggataggaaagattggcttgaagaagatgaatttgaggtaatcaatgaataa

SEQ ID NO: 314173 - DNA, 465 bp, Proteus mirabilis
atgactgaaaatacgaagctagctattgatatagcgagaaaattaagaactcaccttaccaagcatcacggagaaattgcagcaaaatataattttatgctacaccagtttccagttaattcttgcgaaccatcatccatactgcttggtggtttattaagtgaatatttgaattcaaatgaagtattcattattaaagtagattccaataaaattggaggaatgcatttctttgttgagttcgagaacttatattatgacctaacatctgatcaatttgaatttatcgataatgtcattattgccgaagataaagaatcattgtttaatcttcaatatacaattgaattcaagaaaaattttaccgattttataatttggtactgtgaagatgcaaaatgtgaaaaaagatttattctctcggcaataaaagaagttaaaaatatgataactcccccttgctaa

SEQ ID NO: 314174 - DNA, 342 bp, Proteus mirabilis
atggcgtttagcaatattgagatagcaaatattagacggtgcatggaatttttcatggaaaagcgtcgcccagcagaacacctaagggatgaattagatttacagtatcgcatcgaggacgactcagtaattatctttgaaattaggcaactaatatggagtgatggcagagtagaagaacctatagcaaaaatcacacataatggatattcgaattcatggtctctgctttggatggataaaaatagtaactggcacaactacgatgaaatgatgctaggtagtttctctgacgccattaggctcgttgaagatgatgcccgtggctgcttctttggatga

SEQ ID NO: 314175 - DNA, 174 bp, Proteus mirabilis
atgaacgaactcaagaaatgccctgaatgcgagtctacaaaagttggtgtcgccaaaaaactaaaatacccaatgtggtttgtaatttgtcattgttgtgaatatcgaggcatggcgcaaccatcagagcatgaagccatagcagcatggaacaggagagctaacagtgagtga

SEQ ID NO: 314176 - DNA, 1656 bp, Proteus mirabilis
atgaccacttataagcaacaagttaaagaattaagtcgagaagaaatatggagtcaggccatagataaactaacaataaacagagagcaacaaaagataataaaaacagaaacgattagaaagttatgggactattcttttaatgaagcattaccccataaatattccaatccaaatatgagtgtgcttcaagcgtgggaagaatttgcagatgagatttatggaagtagaaagcctagtaatctaaaaattgcttttttctgcggtccagaacctgaaaatgatttaaatatactgacgaagcttggcgtaagggtggagaacgtttgggcaattgaaatggatgggactacttataggtcagcattagattccgctaaggaaaaatatcccacactaaaaatattcaatggggatattgttgacttgatgcaaataacctcatttaaatttgatataatttatttggattttacagcaacattactgacaagaaagcctgctccaattcatacaataaatagtatttttgaaaataattcattagcagacttgggggttcttatcattaacagtgcattacccaatgcaactgaagataatattaacttcctttcaagttatttcgcttcacatactttccttgaaaaatccatttattctggttcagatgaagattcataccatgtcgaagggagattatcgtattcatattttacaaagcgtgagatagaggaaaatgaagatccagaagataaagtttttgaaactttggttcgagataattttaatcaggcatacggcgcattttcctcacattatccttatttgtttgcgagctaccttgcgccaattttcaaagtggccagtaacgaacgcttaaaaaacctttttttgaataaaaacgaggaggatataaatcaagccatagaaaaaatctctactcctaatgaaattgttgaaaaatacatgaataatgaagaagaggaagattttgaaggcatggaattatttgaagatgctgaaaattatccattctggagtttcgttgattatctaaatgattatgaaggcaatgcatgtaaattttggtacagtgaatttatcaaaaacagacataataaaacatcatatcttaaatgtgctcaattatatgacctccttaaaaatggaagctatatttataaaaaggtcttatcacccactttatccaattgtattagtgagattgaaaaatcaattccagacagacgtagtcctttcttttgtgatgttccaatgccacacctttgggttgagcttgcattaaatcatcttggtaatgcctatcatattaatacagatcaacactggagggcaagatataaggctaagagtcgagaaatgtatcttgatatgttttcgtttgataactgccgccctctttatgactggcttcctatgttggagttatatggtaatgatttaaaggcaatggaacggcaagttatcatcagagcttgcatggacttaattacaaaacaaagtcattacttatcgaccgtaagttactatggcgcaaatttagttgatgcgcatacaaaagagtggcctaatttctctgaatttgaatcgagaattaaccttaacgatttcctaaaagagagcggcgagtga

SEQ ID NO: 314177 - DNA, 498 bp, Proteus mirabilis
atgatggaaatgacacacgcacaacgcttgatcctctctaatcaatataaaatgatgactatgatggatcctgataacgctgaacgttatcgtcgctatcagacagttattgaacgtggttatggattacaattacgtgaattagaccgcgattttgatgagatgtcagaagagacctgccgaaccattattaacatcatggaaatgtaccatgcattgcaagtttctcgagaaaatttaaaatcatcagaaatgccggatgctcgtcgagtggcatttatgggttttgatgcagcaacagaatctcgttatcttagctatgtacgctttatggtcaatactgaagggcgatatacgcattttgatagtggtagtcatggttttaactctcaaacgcctatgtgggagaaataccaaagaatgctggctgtttggttagcctgtccacgtcaatatcacctaagcagtgttgagatccaacaaatactgaatgcgtaa

SEQ ID NO: 314178 - DNA, 138 bp, Proteus mirabilis
atgcctactatcattcttataggtgattcggatacaggccatgataaccatcgccctaccaaagtcatcacaggttcatcaacggtaaacttgttgctcaagcaaaagctcccattagttgatgtaggtatgaaatga

SEQ ID NO: 314179 - DNA, 924 bp, Proteus mirabilis
atgaaatatcattccttattaaaaaatttattttatgcaacattttccataatggcgttaaattttagtggcgtcactatggcacaaaataccataaatgatatttatgttattaatttatcctcaaataaagcagtttgtggtgtaaaaattaatgaaatgttagtaatggataataataaatttcgtgaaggtcattattccgctggtcaaaatatctctagtgtgcttgaaaatgggaaaaataccttaggtgtaattatgtttaatggatcggtttttactggtgaagaaaaacttacccctgatatgtggtgtgaagtcgaacttaagaaattatctgcaaatggcgataacaccttaatatcgggacttagattaaacggaagtagcgatgggaaaatggtggtctctgataaatatcaaaataacagtgagcatatctattttggtggtcccagtcgaaaaagtgaatttgatgttttagaagcaaaaaaccaatttaatatacaaggcctcccccaatggcaatgggaaaaagcaactcccgttactgaggacgatattcctaaaattcgtgctttttataccgaactacgacaagcatttatcgataaaaatctagataaattaaaaactatggggaaaatatcctgggaagaaatggcctatgccgataatggctctcctgatatcttttggaaatcgcttaattttcaagaacgattagaacaaggatataaacccaatactattaattgggatgaatatacttttgttacttataacgacaatcgagtctttcgctatgaggttggttttagccgattatcccccattgaattaatcaactctgaaggaagaaattatttttataatccttacctttctattattgatgggaaagtgactattgtccgataa

SEQ ID NO: 314180 - DNA, 1290 bp, Proteus mirabilis
atgtttgttgctgcattaatttttgttttaacgatcaccttggttatctggcagccgaaagggttgggtattggttggagtgcaacggccggcgctatattggcactcctttttggtgtgatcagttttcaagatattccgactgtttggagcattgtgtggaatgccacagcgacatttgttgcagtaattattattagcctacttttagatgaaagtggcttttttgaatgggcggcattacatgttgccaagtgggggggtgggaaaggaagattactattcagttatatcgtgctacttggtgcaatggttgctgctttatttgctaatgatggtgcagcattgatactaacgcctattgtgattgcgatgttacttgcacttggttttaacaaaggtacgacattagcctttgttatggctgccgggtttatcgcagacacagcgagcttgccgctgattgtttcgaacctcgtgaatatcgtttctgcggacttctttaatattggatttactgaatatgcatcaattatggtgccagtcgatattgcgggaattgttgcaacgcttgtgatgctacattggtttttccgtaaagatattcctaaccaatatgatgttaaaaaactgagtgagccagctttagccattaaggatatgactacgtttaaagcaggttggcttgtattgttgttattgctcattggtttttttattttagagccattaggtattcctgttagtgcaatagcggcaattggcgctttaattctttgggtaattgcagccaaaggccgtacgattaatactaaaaaagtgttgcgtggcgcaccgtggcaaatcgttattttctctttaggtatgtacttggtggtttatggtttaagaaatgcaggattaactgattatctttctgaaatacttaattaccttgctgataaagggttatggatagcaacaattggtacgggatttattaccgcctttttatcatcaataatgaataatatgccaacggtattaattggtgctctatccattgaaggaagtgacgcgacaggggtaattcaacaagcgatgatttatgccaatgtgattggtgctgatttggggccaaaaattacaccaataggtagcttggcaacactattgtggctacatgttttatcacaaaaaaatatgacgatcacatggggatattatttcaaaacagggatcatcatgactatccctgtgctcattgtcacactcgttgctttagtgcttcggctttcactgtgtaattaa

SEQ ID NO: 314181 - DNA, 282 bp, Proteus mirabilis
gtgaatattgaaatgattcagaactttcaaattaaaccatctattcttgatggaaatacgcttaagtttatgctttataccatagtgttttttctgttactgacacaagggacgggtgtacggctcatgtttcctataaatgaaagtgttgcaacatactatgttgaaaaacatggttttcaggatttaactggtgatggttcaaaagaaatactttaccgctcagcagaagatttattaaattggtttgagcaaaataaccgctcagttgatagtgagtga

SEQ ID NO: 314182 - DNA, 507 bp, Proteus mirabilis
atgcttgctgggtgctcatttcctatcataattaatgacgcagttaaagacactgattctacagattttgtagtacgtaaagaaatgcatgtatggaagtccatatattctgatttggcatccactataatattttctgattatggtataagaaatccaaaaggtggggatggaattaaagcagtacatgccaatgggaaaattcgttatacaatagagaataaatattttgttgctcgaggccattcaaaacagcaaggtaataaaggtgcacaaatgtatgatcttgctcgcatggtagtaaactcaccttattttttaggagctagctttagttggggtgatgaacaaattgaaaaatgtagtaatatgttaataaaagggaatcctacacaatggattagttttgatactaatcatcatatttcgtatgtaattgaagaagtattagagttccaacgtaattacatcggttcccgtaaactggataagttattagttaaataa

SEQ ID NO: 314183 - DNA, 357 bp, Proteus mirabilis
  misc_feature (341)..(350): n is a, c, g, or t
atgaaggaaattattacaggtttgcttctagcctcaataagcttattttctgtctcttgttcgcaagaagatacagatgtcgtcaaagtagcaatcaatactggaccagaccaagtcatttgggatgaagtgatccgtttagctaaacttaccgaaggattaaatgttgaagttattgcatttaacgactatgaacgtcctaataaagccctagaaaatagagaagtagacgtaaatgtatttcaatctattccttatttacaatcagagataaaagcccacaattacaaatttcatattgccagcaaaacgtacattttcccgttagccgcgtattcaannnnnnnnnnatattag

SEQ ID NO: 314184 - DNA, 423 bp, Proteus mirabilis; identical to SEQ ID NO: 310506

SEQ ID NO: 314185 - DNA, 270 bp, Proteus mirabilis
gtgagtgatgaaacatacaaatggatagtagccacgttatcaatgatgggctacgtgtggattgttacacaagcgttttgctggttcgcaagtttgatattcagaaagcttttcaagcgtaagtcaaaagaacgaaagaaggctgcaatagctgaattttatgaggcttatgagcttgataaaataaatgaaagtcaaatggtaagagtcacaacaaaacacggacttgttattgtaatttatcgagagccaaaaggtgacgatgaatag

SEQ ID NO: 314186 - DNA, 426 bp, Proteus mirabilis
atgatatataatagaatgataaaaaaaatgattatttatgataatgatcactccgagctcattgccccacaatccgtttatgggcttcttgattcggttgagctcgcccttaaaaaattaagggaagctttttttcaggggaaaatgttgcatacagataaagaactggcaagccttatcattcaaaataaagtattaacgaaacacgaaaccaatgataatctgataggtatactcaatgaggctacattatataattgccttggttgcctttcttatttatataaaaacctagcgggttatggcgaatcacttccaaacatattatcattcgtagggatatcaaaagatgaaaatgaagaaagagaaacattacgtcgtgcattacgcatcgtaaaagaaaaacagactaataaagataactaa

SEQ ID NO: 314187 - DNA, 1164 bp, Proteus mirabilis
atgttcacggtaaatcatcagaccaacaggattagtccggttaagacgaagagattcagtgagttgggctttactgagcgcaaaaatcttcaggaatggttggcacacgagccttccgcactgggtgaagagctactgattattcaaaaggagttcgatggctttgatgacacccgtgaacgcttagatttactggcgctggataaagatggcaacttggtcattattgaaaacaagctggacgacagtggccgtgatgtggtgtggcaggcgcttaaatatgcctcctactgcgcaagtttaaccaaagcgcaaatagttgacatttaccagcagtatttagaccgctatgagcctgtaataggagaggttgacctgttaaatgcccctgcaagtgcttcggcgagaatatgtgagtttttggatgcgcccgatctcgatgagttaaagctcaacctgggtaacagccagcgcattatgttagttgcggcaaattttcgcaaagaagtgaccagcaccgcgctgtggttattgggtcaaggtattagcattgcctgcttcaaaatcaccccttattcgttgggtgagcagctactgattaatattgaccagatcattccaacgccagaagcgaaagagttgatgatcggcattaatgccaaggaagcggaagaaaaaactaccgaagtggtccttaaaaaccgccatacggtgcgtcgcgagtactgggagcgtgccttagaggcgtttcagaaaagcccttgccaactctataacaacattagcccaagcaaagatcattggttatcagcaggctcagggttaagtggatgtccgtataacctgatatttctgcaaaaagagctgcgagtagagctttggatcagccgtggggttaccgaagagaataaatacctttttgacttgttgagtcagtccaaacaggacattgaacatacttttggtgcagaacttgagtggatgaggctggatgagaagaaatcttgccgtattcagttttcgaccaaagctgatgggtttaacaaagagacttggccccaagcggttgcgtggcacttagagcagatgacaaagttagaaaaagccttaaaaggaccgctgcaaaaagcggctgaggcaatgaaacagaagaattttgattaa

SEQ ID NO: 314188 - DNA, 1350 bp, Proteus mirabilis
atggagagcttgggggggatgcaaaaatatgatgattatcaaaagactcatattcattcggttgagaaaattccttgcggttggaatatcttaaggtttcatgatgtatttagcttttcaaaggggctgaatataacaaaagaaaatcttcaggaggatggtattccttgtctcaactatggagagattcactcaaaatttggctttgaactacgcccagaaattcattcgcttaaatgtgttgacgaaaagtatttaaagaataataaaaaatcgatacttcgttttggcgattttatatttgccgacacatcagaagattatgaaggtgctggtaatttcacttatttgaacagtgaagatgaaatctttgctggctaccataccttaatctgtcgattgaaaataggcgttaacgagagatacctagcttacgtagtggattccgaagcatttagacttcaagtccgaagggcagtaaaaggtgtcaaggtattcagtattactcagggccttttaaagcacacaaagctttggcttgctagtgaagaagaacaaacccgtatcgccaacttcctagacaagaaaaccgctctaatcgacgaagcgatttcgatcaaagaaaagcaaattagcctgctgaaagagcgtaagcagatcatcatccaacaggcggtgacccaagggcttgacccgaatgtgccaatgaaggactccggtgtggattggattggtaagattccagcgcattgggatttagttaagttaggctcgtgcctattcccagtatcggtcaaaaactgccctgaattgccactgctttcgataacacgcgaacaaggtgttattgagagagacgtggatgatcaagagtcaaatcacaattttataccagatgatcttagcggctataaaaagcttgagaaaggtcaatttggtatgaataaaatgaaagcgtggcaaggttcctacggtgtatcaaagttcactggaattgtaagtcctgcgtattttgtttttgattttacaaaggcaataaatcctgagtttttcaattgggcgatacgcagtaagttatacgtatcgttttttggtagtgcatcagatggtgtaaggattggtcagtgggacctttcaaaagcacggatgaaggtaattccttttgttttgccttctgaagaggaacagttattaatcgctaagcatcttgacgaaaagctagagcaagttgatgtagctattaagattaaacttcagcaaatagaaagactgcgcgaatatagatcgtcgttaattaacagcgctgtaacaggaaaaataaaaatcaccccagaaatggttgagcaatag

SEQ ID NO: 314189 - DNA, 924 bp, Proteus mirabilis
atgacaaatgatgatctgaaacaaacggtagtggcgaagtcatataggctttcggagatagcacagttgccacaagcaatccgggatcgcattgctcacatcgatttcaccttattgtttaagggagaagcggtacgggcagatttagtcaatcgcttcagcatagctgctacacaagcaacgaaagacttctctctatacagagtgcttgcaccaggtaacattgagtatgaccaaaagctcaagctgcataagcgaggtgaagcatttgagcccttgttcgactacgacgtcgttcgaacattggcgacaattagccaagggtacggagatggttttactggcaagataaaaccgccttttgcgtgtgaagcgccttatcaccttaacaagccgagtttatcgatagtggcgaaagttaccgaggccatccataaaggcaaagtcttgcgtatcacctatgtgtcgttatcgagtggtgaaacaatacgtgaaattgtgccgcatacgctggtggacaatggtttacgttggcacgttcgtggttttgatcgcgagcatagtgagttccgtgactttgtattgactcgaattaaagctgcggttgtgcttgaccattccacgctgtctgaaacggagctcgaaccccaagaccggcaatggaatcgctttgtagagctagagttagtgccgcatcctcgtattgagcacagcgaagcgattgagctagactatggcatgacgggtggcgtgatgaaagttgagattagagcggctaccgctggctatttgcttcgccaatggcatgtggattgttctacggaacactcattaatgggctttgagtatcagctttggttgcgtaacagccaggcactttatggtgtcatcaacttaaatctagtgtcgggtagaacaagttaa

SEQ ID NO: 314190 - DNA, 147 bp, Proteus mirabilis
atgctacacctgctacatgtagcaggtgtagcaggtgtagcaggtgtagcaggtgtagcaggtgtagcaggtgtagcaggtgtagcaggtgtagcaggtgtagcaggtgtagcaggttaccaatttttatttcacaagcatcaatga

SEQ ID NO: 314191 - DNA, 582 bp, Proteus mirabilis
atgaaatttggctttaactctttttctcttggagaggcggatgatggtcgttattatcggattatccgggctaatggtgacgatgccagcagatctcttagtgagggtgaaaagacgtttattacctttttgtatttttatcatctaattaaaggtgctcaatcaccttctggaattacagtgaatcgagtagttgtgtttgatgaccctatatcgtcgttagacagtgatattctttatattgtaagtagcttgattaaaggtgttatggaggaaataagagacccgaatagtcagataaagcaagtatttgtgctaactcataatgtctattttcataaagaaataagcttcaacagaagcagacctatagataggttgcttactgaagagagtttttggcaggtcaagaagctacagcaaggttctgttgtcgaacgttgtgaggagaatccggttcgttctgcctatgaactgctttgggatgatgtgaagtctgacaatatttcgagtatcagtttacaaaatacattacggcggatactggagaactatttcaccatgtgggggggggatgggtaa

SEQ ID NO: 314192 - DNA, 435 bp, Proteus mirabilis; identical to SEQ ID NO: 26756

SEQ ID NO: 314193 - DNA, 570 bp, Proteus mirabilis; identical to SEQ ID NO: 13730

SEQ ID NO: 314194 - DNA, 1185 bp, Proteus mirabilis
atgcgtaatgtgtacaaacaggtcctaattctggcaggttcgcaggccgtattccagacggtaaccatattgttgatgaccgttggcgggttggctggattatatctcgctcctgaaccttcctggtcaaccataccgattgcaatgaccagttttggtacagccctggtcatgttccctgcatcctttttgatggcacgaaggggccgtcgcgcaggattcctgctgggtgcgatatctggtattgtttccgctgtcatggctacggtggccatgatgatgcattcattctggttactttgcctggcaatgttgctgatggggatttatcaggcctttgcgcagttttaccgttttgccgctagtgaagtttccacggttgaattccgcactcgcgccatttccctggttattgccggtggcgtggttgcggcgtttgccggtccctggctgggccatactggtagcaatctgctttcagctccgtatgccggttcttttgcacttatgggtgtgatgtcggcaattggtgtgctgcttttgattggactgaaggtaccgggggaatcccaaactgctgccttcgataccccacccgccaggcactggtcgaaggtcatcatccagccagcctatcttgtggcgatgttttcggcagcatcagcctatgggatcatggtgctggccatgactgccactccgatcgcaatggcacaccataattattcactgggggaaagcgcctcggtcatccaactgcacgttcttgcaatgtatctaccgtcgttttttaccggcagactggtggcccgctttggctccataaaaattatgctggtcggggtggcattgatgatcttctacatctgtcttgctctgtctggaaccgactggtcattctttgctggcgcactgatatttgtcggcactggctggaatttcctctacattggggcaactaatctgctatccacgacctacagcggaagagaaaaaggagtggcgcaggctgttaacgatatgagcgtatttgtgttcactctgctgtgctcggcagcggcaggaacgttactcaatacaatcggctggcagagcatgaataagttgcttctgccttgggttgttctgcttgcgttaccgttattttggttgggctggcatcatcgccgaaccgccactgcctaa

SEQ ID NO: 314195 - DNA, 963 bp, Proteus mirabilis
atgacctctcgttcagttgccgttattgctacccctggcttcagtccgtttcatttttccgtaccgtgcataatatttgggagcattttgccggaacagcatttgtttgatctcaaaatctgcgctgaacatataggccctgtatcgtctgacattgggatcaccataaacgtcaaagagggtctggatatcctcaaaacagcagatatcgttatcgttcctttctggaatcatcctgaagaaaaaccctctgaggccctgatggaatccctcattgaggcctggcagcgaggtgctgaaatcgtcggactatgccttggaacctatgtacttgcctatgcaggactacttgataacaggcgggccgcgacacactgggaatctgagcgagacttcaaaagccgctttccctcagtacaactggataataattctctttatgtcgatgatgataggctcatcacatcggcaggtacggcagccggcatcgattgttgcctttacattctgcgcaatcattatggcagcacaatggctaaccgggtcgcccgcagaatggttatccctccttatcgggaaggaggacaggcacagttcatcgagcgaccggttccggaaactacacgggatagtcaaattaacgatttactgagctatctacgtcgcaatatcagtaaacctcaggacctggaatccctggcccgatatataaatatgagtcgccggacatttacccgtcatttttttaaagccaccggcatgtcgcctggcgactggattaatgcagaacgactccagcgtagtcaggagctgcttgaaacaacagaccacagtattgaggccgtagccgagatgtcaggcttccggtctcctgtatcattcagacagagctttcgggcgaagtttgaggtcagccccagtgaatggcgacgaacattcagagggactaaagcattattgtaa

SEQ ID NO: 314196 - DNA, 777 bp, Proteus mirabilis
atgaacattacgcagattcgtaacgccacactgatccttaaatacgccggaacgacttttctgatcgatccaatgctggcagataaagagtcggaacctggttttccgggaacccctcgttcacatttacgtaaccctctggtgtcgttaccagtaagtgttgaagagctgatgaatgtggatgccataattgtgacgcatacccattccgatcactgggacgaggccgcacaaaatgcagttccaaaagatatgaccattttcacgcaaaatgaaagtgatgctgccttattgaactcacagggattcctgaatgttcatgcactggatgatgaaaataatataaaaggtattaccctcataaaaacagacggtcagcacggtactgacgaagcttatgccaaccctgagatggctactttattgggagatgcctgtggtctggtattcagtcatcctgaagaaaaaacactttacattgctggtgacactatctgggtaaaaccctatgaagacgctcttaagaaacaccagcctgacgttgtcgtgcttaatgccgggtttgcacaaacggatgactttggtcccattattatgggcaaagaggatatacttcgtactcaacaggagttgccttctgcaatgattgtggcctctcatatggaagcagttaaccactgcattctcagccgtgcagaacttcgtgcattcactgaagagaaagctattgagaaaaatgtatttattcctcaggacggtgaaaccctgactttctga

SEQ ID NO: 314197 - DNA, 393 bp, Proteus mirabilis
  misc_feature (327)..(336): n is a, c, g, or t
gtgaaatacgaattagataaaacagatggtcatgcccgtcgtggtcgtcttaagtttgaacgcggtgtcgttgaaacacctgcatttatgcctgtagggacatacggtacagttaaagggatgacacctgaagaagttgaagccacaggtgcacaaatccttttaggcaatactttccatttatggttacgtcctggtcaagagatcatgaaattacacggtgatttgcatgactttatgcagtggaaagggccaattttaaccgattcaggtggtttccaagtctttagtttaggcgcaatgcgtaaaagtaaagaagaaggtgtnnnnnnnnnnttaaagaagaaggtgtgcatttccgtaacccaattaatggcgaaaagattttcttaa

SEQ ID NO: 314198 - DNA, 447 bp, Proteus mirabilis
  misc_feature (416)..(425): n is a, c, g, or t
atgaccttattagaaacgacagttaaagaatgtctaaacaatgtagtgaagcaatatgcgtcacaaacggccttaattgaaaaccaaagtaaaaaaacactgtcttggcaacaattacaacaagaagtcgagagtgttgcgcgtggctttttatccatggggttaacaaaaggcgatcgtttaggtatctggtctgctaatagtaaagaatggataatttgttttcttgcagctgctcaaattggtattccggttgtttgtattaactttcatttaaaaaaaagagagttattagatttatgccgattaactggaattaaagcactctgtttttctgatggttttaaaagtaatcattttattgaggttattaattatctttctaaaaaagcatcaaaaaataaagacgcattacnnnnnnnnnnaagcatatcaacatgctattga

SEQ ID NO: 314199 - DNA, 1248 bp, Proteus mirabilis
atgggcttaaatggtattgagatccaaggagccacacctcaagagtggcttgaaggcggtatccaccttattccgggtagccaaggcgcccctaaagaacaatatcgcctttatcgcaatgatttttatgctaaagcaagtattgagggcaatgagttacctgtcactttgacacttaaagcagctagtttaccgggtattcaaaaaggttccgtggtgctttaccaccaattccaagttggagaaatcgtcgatgtacggcctttaatggatgaatttgatattgatgtccatatttctaaacaatatcgtcacctgcttactgaaaagagtgtgttctggactgaaggtgctgcgaaggtttcattaaatggtgcgggattaacggtagaagcaacgccgctaaaccgtgccttaaaaggcgcgataagctttgataactttgaaaatattaataacaatgtttcaagatataaactttatcctagcgaaacgagtgctagagccattggtgctcaaattactttaaaaacctacgatgccagtaaactttctgaaggaatgcctattcgttatctaggtattgatatcggtcaggtggaaacgctaaccctttctgcagataaaaaagcggtgagtgtatcagcggtactctaccctgaatatgtgaaaacttttgcacgctcaggaagccgatttgcggtagtcacccctgagttaaccgcttcaggcctcgataatttagattctcttattcagccttatatcaaggcagagccaggcaatggtggcgtataccgcatatttgaattacaaacggcaaatattaccgactctcggtatctagacggccttaaccttgtattgaatgcgactgaagcaggatctgtgcaaattggcacacctatctattatcgtggtttagaagtgggtgcggtaaccggactagaattaggtaatatgtctgacagagtattgatccacattagaattagtcagaaatatcaatatctggtacgtaataacacagagttttggctttcatcaggttataacttctcatttggtttaactggtggagtattccgcagcggtacatttaagcagtttatacgtggtggcattacatttgctacaccgccatcaaccccactccaggctaaagcaaaacaagagcagaatttcattctcaatgctaaagagccaaaagagtggaatgaatggggtactgcgatacctaagccataa

SEQ ID NO: 314200 - DNA, 237 bp, Proteus mirabilis
atggcatctcataaagtgaccctgcaccagcagggtctatcaaccgcattagaatttagctctgaaacgcatccttccttgttggagacgttagagcgcagcaaaattcaaatcgaatatcaatgccgagaaggttattgtcgcaatgagccattggcatttattcaagctgatgaaattttaccttgtagctgtcaccctgtgagtgatatcgaaatcgagatctgcacaaagtaa

SEQ ID NO: 314201 - DNA, 378 bp, Proteus mirabilis
  misc_feature (325)..(334): n is a, c, g, or t
atgtcagaacaaacaattatttgggatcttgacctgatccataagtataactattcaggtccgcgctacacatcatacccaacggcattggaatttaatcagcaatatagtgatgcggatttcgaacaagcaacaaagcgttatcccgaacgacctctgtcactgtatattcacattcctttctgccataagttatgttatttctgcggttgtaataaaattatcacgcgccataaacataaagctgatgaatatcttgatgttttagaaaaagaaattattaatcgcgctcgctattttaaaaatagaaaagtgacccaaatgnnnnnnnnnncggtactcccacttttcttgataaacagcaaattagtcgcttag

SEQ ID NO: 314202 - DNA, 972 bp, Proteus mirabilis; identical to SEQ ID NO: 297117

SEQ ID NO: 314203 - DNA, 501 bp, Proteus mirabilis; identical to SEQ ID NO: 306912

SEQ ID NO: 314204 - DNA, 192 bp, Proteus mirabilis
atggcaaatgataataacggttggattcgttgtgatgaacaattgcctttagctagtaagcgagtccttatcacaacaatatatggatatgttgttgaagcgagcagattaaaaggaaatagatttaatagatatggacaggagataacagcaactcactggcaagacttgcctgaaccagcaaatcagtaa

SEQ ID NO: 314205 - DNA, 171 bp, Proteus mirabilis
atgttctttttatctattaatttattccaatcaacatcatcagcgcaaaatgcctctattaacttattattatcttcattagttttaattaatgattccaactcatcacacaatgcaataataactttcttttctggttctttattatctgcaatcatgcctttggtataa

SEQ ID NO: 314206 - DNA, 669 bp, Proteus mirabilis
  misc_feature (591)..(600): n is a, c, g, or t
atgaaatacgcattaggctctgtactttattattggcaaaaagaaacacttgagacattttatcagcaagcaaaacagagcgatgctgatattatctacttaggcgaaacagtctgtagcaagcgccgtgagactaaaccacaagattggattaatctggccaaagaagtggctaaaagtggtaaacaagtgatcctttctaccttagcactactacaagcgccttctgaactaaaagagatagcaaagctggtggataacggtgaatttttagttgaggctcatgattttggtgtgatcaatatgctttatgagcgtcatttaccttttgtagcaggccatggattaaactgctataacgcttatgcactacgtttattacagaaacaaggcatgatacgttggtgtatgccagttgaactgtctcgtgagtggttaaataatcttttaattcaatgtgaagaattagcgattagagataaatttgaagtagaagtattcgcttatggtcatcttcctttggcttattcagcgcgttgttttactgctcgctcggaaaatcgtgctaaagatgattgtgaaacttgctgnnnnnnnnnncttgctgtcaaaaatacccacaaggccgtcaggtattatcacaagaaaaccaacaagtgtttgttttaa

SEQ ID NO: 314207 - DNA, 393 bp, Proteus mirabilis
  misc_feature (341)..(350): n is a, c, g, or t
gtggccaactatgatttgggcgtctttcaaagtcgtgttaaaaacgcccaagattcatccagtagctactttaatttagacacattattagctaaagctgaacaccattttaatattaatgcatctgcctacagtataggtaaatccaattccaatattgaactctatagagcaatgtatgaacgtgattttaatggattgcgttttgctatcgggttaatgagcacttggaatttacagtccttagccagcttaacagtattgagcagcagtaaaatttatgcagcatcaatcgggaataattcatcaagtagggtggtgaataaacagcaatcattaannnnnnnnnnagtccaggtgaagttcgtatttatcgccaaggtaaattattaa

SEQ ID NO: 314208 - DNA, 405 bp, Proteus mirabilis
  misc_feature (367)..(376): n is a, c, g, or t
atggttaatgaagaaacaaggaaaaaagttaactcaattattgagaaatataaattcacaccgtcaaaatctgcacgagcaatgcgggggtactctaatcgttcttttggtattatcgtcactcgccttgattcttatgcggaaaatcaagcagttagtgccatattacctatcctttatcaaaacaacattgaccctattattttagaaagccaatttagccaagccaaagtagaagaaaacttaaaaatgctcgcccaccagaaaatcgatggcgtaatattatttgcattttcagggatcaatgcggctaacttagcaagttggaaacaaaaaatggttgttatagcaagaccactagaaggtnnnnnnnnnnctagaaggttttgtttccatttgtcatga

SEQ ID NO: 314209 - DNA, 1422 bp, Proteus mirabilis
atgtcatttagtcgtcgccagtttttacaggcttcaggcttagcggtatgtctgggctcattatcttcatctgttcgtgcaggatcagttagtgatagaaaactacctattcccccattacttgaatcacgtaatggtcagcctctttttgtaacgttacaaaaagtgcattgggcctttgatggcacacaaaaaacagaagtctggggcattaatggctcaatgccgggtccgacaatcaaagtaaaaagcggtgatgatgtcaaactgatttatagcaatcgccttaatgaacccgtttctatgaccgtaagtggcttattagttccgggaacacaaataggtggagctgcaaggatgatgtctccgggagcctattggtcaccggtgttgcctattcgtcaaaaagcgaccacctgctggtatcatgcgaatacgccttttaaaatggcgcctcatgtctataacggattggtaggcatgtggattgttgaagacgaagagagcaaatcgttaccattgcctaaacattatggggtaaatgattttcctattattcttcaagataaacgccttgataactttggaactccacaatacgacaaagaagccgcgacagagggcttttatggtgacacattattagtgaatggctgtgaagatccctatattgaagtatcacgaggttggattcgtttacgcttagttaatgcctcgaatgcccgacgctatgagttatcggctaatgatggtcgctcactctatctgatagcctctgatcaaggtttgttaacgtcaccggtagaattgaaatctattcctatggcaccgggtgagcgacgtgaaattcttattgatctatcagaaggcgaagaagtgactatcactgctgggcaaagtgccggatttatggatagattacgtggtatttttgaaccttctaacttattgcgcaataccaatgtgctaaccatcaagcctactggactgatgtcattggttaccgataaagttccacaacagttggtggtggatgacacacaaatcaccacctcaattcaaccgagaacgatccaattgcaaaacagtcctcctggtattaataatgcgcgttgggagttatcaaggatcgatcttgtcggtaaacaaaatggctgggaacgttggctagtgacagtggaaacaccacaaccttttcatattgaaggtgcacgttttaaagtgattaatcatgatggacaaaaaccagcgcctgctgattttggttggaaagatacagtgtggatcgaaaaacagagtgaattattagttgagctaaaacagccttcttattctcatttcccttttgtttattatagccaaatactcgaaaatgcggataaagggattgcggggcaaatggaaatcacgccatcagaataa

SEQ ID NO: 314210 - DNA, 252 bp, Proteus mirabilis
atgcgattacaagcagattcagttcaaggtaatgctattgtttctaataataaaagtgttggctttgtggttgctaattcaagtggatctgaattaacacctaatgatttatcaagttttattcctttcagactcaaccaaaatgctgatgctaatgtcacgattaatgtttatcccgtaagtattgatggaaaaacaccaactgaaggcgctgtcacatcaagtggctttctaagagttgatttcccttaa

SEQ ID NO: 314211 - DNA, 390 bp, Proteus mirabilis
gtggcagtccctgaggtaattagtgaagtagatagtttcgtttctattgataataccaatactgccggtgctgttagcgcattagcctcgttaaaagatcacgcttttgtggcatatagtcgcaagtcaattgatgtatcacgacaaatggtggttgatactttaaacgccttaaatatcgagtatgcaccttctcacgccaactttatttttcataaagtcaaaggtgatgtgaaaacttatcaagagagaatgaaagcggcaaatattatggtaggacgtgagtttcctcccgcattaggttggagccgtttgaccttaggaacccctgaggagatgagttattttgtcgcgacgttaaaagagtttagaactaaaggatggatataa

SEQ ID NO: 314212 - DNA, 342 bp, Proteus mirabilis
atgcttataacacaaaaatacattgatgatgatggtgcaaaagtagtagtacctgctgatttagataatgcgattagcttacatattcgccaaacggcattgaaagcttaccaagttttaaactgtttaggtatgtcgcgcgttgatgtgtttttaactgaagataatcaagtcattatcaacgaaattaatactttaccaggtttcactaatatcagtatgtatcctaaactgtggcaaagtacgggattagattatcaatcactcatcacgaaattaattgaattagcgctagaacatcataaaaaaacagccgtattaaaaactaagtgtgagctttaa

SEQ ID NO: 314213 - DNA, 192 bp, Proteus mirabilis
atgaactatataactaaaaatacgccatctcttcatccttcaattattgatgggcttatttatttttcaaaaaagaataaaggaacattaaaaaaagagcagcttattcattttttaggtaatgacgacaatctctctgaattaaatatcatagaagccgctcaacaactcaatttaaaatgcgaattttaa

SEQ ID NO: 314214 - DNA, 351 bp, Proteus mirabilis
atgggattagatattgtcatgtttaaagatcaatttacaccacaacaaaaaatggatatttgcacttttgaagaaggtgatccgacggaaaacccttgggttaaagggaaacctgcccaaatacacattgaaattgtcccccataatcctaattggcttatacaatttaatgaacaaaaattgttaattcagaatgcattgtcagatatagcattatcaattgagcacataggatctactgcggttgcaggattggctgctaagccaataatcgatatcgatttaattatagaaaatcctaaagatgaatcgtcctatattccccaattagaggcattggaattaaaatag

SEQ ID NO: 314215 - DNA, 222 bp, Proteus mirabilis
atggttaacttacatgtatttggaaaaaattgtcccgaacattggcgccacctattattcaagcaatggttaacaacacatcctgatgatttagccaattatgcgacgattaaacagtttgctaagcataatgtaaagacgactcaagattataacctgaaaaaacagagccttgtacgtgcaatttatcagaagatttttacctcattgattggcgactaa

SEQ ID NO: 314216 - DNA, 486 bp, Proteus mirabilis; identical to SEQ ID NO: 297435

SEQ ID NO: 314217 - DNA, 261 bp, Proteus mirabilis
atgggtgatggtaaagaaacaggatttggtactcaaacctataattacctgaaaaaaacgctgcaatccaacgacggcacccttgatattgccactgatggtgttaaaaaacgtaaaaaatcgttagataaccaaattaaaaataccaaacgtactattgaagcgacgatggaacgttataaaaaacagtttcaattattagataaaatggttaatgccatgactaactcaagtgcatcaattgaacgtttattacgctaa

SEQ ID NO: 314218 - DNA, 423 bp, Proteus mirabilis
atgggatggatgagcaaagggcatgcttacggtggctatacggggcatggaggaaaattcgaacctaaagggattgtacatggtggtgagtttgtttttaccaaagaagcgacggctaaattgggtatcggcaatctctatcgcttaatgcatgcggcgcaaggttatgcttcggggggctttgtgggggcggtcgcagggcgaataccggttacaccacaaccgacgttagcccgtgcgggtggtgtacaaatgacggtcgtcaatcatattacagtgacaggaaatggtgacgctgtacttgctcaagcaatgaaagaagccgcacaacaagggacagaagccggcgcacagaaagctcacgcgatgatgttacaagactttcaaagtaatggcgcagcacgcagaacattaggagtctaa

SEQ ID NO: 314219 - DNA, 564 bp, Proteus mirabilis
atggagttagggtggaaatggcacagttttaataacaatcatcaggccgaaattactctataccaaatagatagtaaagacgttcaaggatatgtgggtgtcataggttatcaaacattatctaatatgggagattcaagaagtcgaggaatagagtacctttggaaatcaaagattaactctaatcatagtatttcactaggggggatgttcaatcaatctgaatttactagtggagaatataaaaacaaaagacccgcttatactcctcgttatagttcattaatagcatgggatggttcatatggagctgagcaaaagtggtcgtctcggattgcagtcaggtttaatggaccattttattttaatgagcaaaacgatctagaacagcgtcactatactattgttgatgcatctatatcatggcatccaacaaaacaatatgaattaggtgtttatgccaagaatattggagatgctttgtatagaacttatgcttttggtaataaagctcaactaggtgaaccaagagaaataggcgttcaagctaaactccttttttaa

SEQ ID NO: 314220 - DNA, 1401 bp, Proteus mirabilis
  misc_feature (1273)..(1282): n is a, c, g, or t
atgaagaataaaaaaaatttatttaatactatgttttttgtaataacagcaacagtaacagtaaactctgaagctaatccagaaaaacataatcattccgctgataatacaattactgtcacagcaactaagcgtattcaaagtagttttgaggtgactggtaatgtgaatgttcaaacagaagaacaattaaataaatcatcagttaatcaaactgatgatttaaatgcagtttttcctgaattgttatctgcaaaccgaagttcacgcatttataacaatataacccttcgtgggcaatcttcggctgattttttctctccgagtttagggctatttgttgatggagttcctcaactttctcaatcatatgcacaatcgcttcaaggagtagagcaagttgaactgcttaaagggccacaaggagttatttatgggcgtggcacattgggggggattatcagtattattacaaaaaaaccgagtaaccattctgaagcatggttagatggtcaatattttggtcgaggagggagaattaatacagggggtagttctggctatatggaaaatgggtgggcccttcaaggaaatgttagcttcgacagaaataatggatctttggataatcctgcatggaataaaaaaaatatagatagccgagatataaaaacaggatggctatctgctagttatatttcccctgatacattattcgagtctaattttaaaataggtggggaaaattaccattctcatgaagaatattttgttcctttctcacctctttcacgttcaaacgttgatactgaatggttatatgaaacccccgatcttaaacgtaaattaaagaatatctcatggaatacaggttatgactttaatgaaaattggaaattaaaaacaatactttcttatcaacatatggatatagatagattatttatggatggaacattgcaggaggattctcaggatctactatattcagaagtaagaaccaattatgaaggagatagattaagcggaattgttggtatatcatttcaaaaaatgggatatagacacgataatttatctattggtcaagtaggtatgggaggaaagaaatctgataatgatatttacaattattctggatattttgatggcgcttatcgaataaatgactattgggaattaggggcgggagctcgcttttctcatgaaaaagcaaaaactagaatggtccttttagaaaaaggaaaaggtgagtctaaatataataatgctnnnnnnnnnntgcttttattccacgagcaagtatcgcttggcttccaaatgaacaaaatcggatatggtttggcgttgggcgtggttttaaacccggtggatttaataaagaggggacagataaattag

SEQ ID NO: 314221 - DNA, 564 bp, Proteus mirabilis
atgaaattcaataaattaggcgtaatggttgctggtgcacttcttatgggttctttatcaactcaagttatggccgctaaaaacgcagacgttacattttctgcacgtttagttgcagcaacttgtgatatcagcgcaagccaagatcgtgttgatttaggtacttatgcaactgctgatattgataagcttgaccaagctgtatctgaaaaagatttcaacttagtgttaaacaactgtactaagattggtaaaccagctgaaggtgaagatcctgctgtaactgtatctaatattgagttattagcaagcggtaatggcttagttggtaatgagcaattatttgctagcgctggtgcaactcaagctggtatcaagttaactgcaatgaattctgtagtactgaaaccaaatgagtcaacagaactgcaaaacttaaaagcagaaggtgaaggtaacctgattattcctatgaaagcaggtttatttgctacagaaactggtgactcactgaaagcacaagatattaatgttccagtaacctttagtgttgcttataactaa

SEQ ID NO: 314222 - DNA, 588 bp, Proteus mirabilis
atgaccgtgacggaagcgacgttatcacccgcaaccattaccatcgccaataataaactgaaagcggatgacatgattatgttatcgggtttaggggagttagatgggtgttttcccattgcacaggttgatggcaataaagtgaccttgtgcgacgaagtggattggagtgataaaacactacctacggattttttaaacgccaaagcacaacgtattcaatggtctaataatttctgtgcggtaaaaagtttcagcaaagacggttcgacaaccgaacaaattgatgtcaccactatttgcagtgatggcaaggaatatgaatcgggcgatacggaatacggttcaattaaattgacctttttcttacggtatagctccagtgaggtgcagcgactcttgcgtaaatatgaaaacagcaaagaaaaatttgcggtgaaaatggtcttaacgcgagatgaaggctccatgttttattacggctctgtcgagacaggcatgaacattgatggcagtgtggggcaaatgatggattcggggatctcgattaaattgtctggccgtgattatttgaatgcgaagaaataa

SEQ ID NO: 314223 - DNA, 588 bp, Proteus mirabilis; identical to SEQ ID NO: 314222

SEQ ID NO: 314224 - DNA, 198 bp, Proteus mirabilis
atgaaacacgaacactttttaactattaaagacgttttagcaatcacgaaggtttcacgcgcgacactatatcgttggataaaggcaggcgattttcctgcgcaatattcattgaccgcatctggacgctcggttcgttggaaagcgagcgaaatagttcaatggtgtgaaaaatgcgtaaaaaaggaggggcaataa

SEQ ID NO: 314225 - DNA, 627 bp, Proteus mirabilis
atggcaaaaattgaaaaagaagcattaactcaaaaggttaaccagaacgatactaatagcccaagcgctaaatcccatttagatcgaaatacatttatggcgagcgttggactttcactaaaaaaagtatatctaagtcatgatagtctaaaaaaactcgcaaaaattagtgaaagtagattcggtgaggacttcgatgaaaaggaaatagttacggaatatttgagtgagttaatagatttttgcattaacaaatgctatggaacagaagagaatatcccaaaaaaagaacactcaccactaagtttgacggtaccaaaaacaattgagggactgacactatccaaatatcaccaaatggcaacttactttaaaaataaccctcctatagggtctgatggtgatcatgaatgtattgcaaaagtatttaacaatgctaaacgtagagttccatatactgaatcaatagccgactacgtatccgactattacaagaataaaacttcacttcaagcaggtaaagactgggaacctaaggatattcaagccattcttagcagaaaaagaatcaataaatacattaattctttaaacgaggactgcgaatgggaaaaagagtgggaataa

SEQ ID NO: 314226 - DNA, 1176 bp, Proteus mirabilis
atgaatgagtttactgaatggaaaacattgcaatttaaagacatctgtagattaaaaagcgataaagtaacagttgattcaagtgatatacaaacctatatatcaactgaaaatatgttacctaattttgggggagtacagagtgcaaaaaatatccctttaactgggaaattaaatacttttaagtatggggacgttcttttttcaaacataagaacatactttaaaaaagtgtggattgctacttttgatggtgttgcgtcacctgatgttcttatttttagtgcaatgaaaaattgtgagcctcaatatttgtattatatgatgtgtgagcctcaatttacagagtttacagtattaacttctcgtggcgcaaagatgccgagaggagataaggaagctattttaaattacgaaatatcattaccttcattagcggaacaaaaagccattgcttccattcttgcttccttagataacaaaatcgacttactccatcgtcaaaataaaaccttagagtcaatggctgaaacgctttttcgccagtggtttgtggaagaggcgcagaatgattgggaagaaaaaactcttgctgattttggtaaggtcgtttgtgggaagactccttctaagaaaaagagtgagtattacggtaatgacattccatttttaaaaatacctgatatgcatggtagagtatttatttcctcaacagaggataatttatctctactaggggctgaaagccaattaaacaaactattaccagagggaagtctttgtgtgagttgtattgcaacagttggtttagtttgtattacgagtaagccgatgcaaactaatcagcaaatcaattcaataattccaaaatcatcaaaatatttatactttttgtttcttctaatgaaaagtataaatgatgaactacatagtttagctagtggtggaactactactcttaatctaaatacaggtaattttagcaagattaaaatttgtgtgcctccaaaagaagatattttttcattcaatcagtctgtttatgatttttttgaaaaaataaaatcaaataccaatcaaatccaaacattagaaaaacttcgcgataccttactgcctaaattaatgagtggtgaagtacgcgttaactatacaacggaagaaataaaacaataa

SEQ ID NO: 314227 - DNA, 261 bp, Proteus mirabilis; identical to SEQ ID NO: 310339

SEQ ID NO: 314228 - DNA, 1140 bp, Proteus mirabilis
atgggaaatgaatttttcgcagccaagcaaggcgataaattaatgcactcgtcaatcttcgccgatatcgtgtgtggtgtggttaaaggggcggtttatgccgcgatagggacggccgctgtggcgctgaccattgggacaggcggtatggcaacggccgccggtgcggccatttttgccggtgcagggctggcggcgggctttactatcggtggattgattgatgatgccgctgattgggtcgcggatgggatcgatagcttattcgggctaagtaaccctgatggtgaaatcgatacaggctcgaaaaatgtacgtgtcaaaggcaagggagccgctcgcgcagcgggaaaattaccgtcacccgtactattagcctcaattgcggcagataataccccaccgaaagaagaaaaaggcaccgagattgccttacgcgtattgaaaaataccgccatgatgacgactggggcattttctttattggcgggtaaggtgctagggagccaaaccaacaatgcggcacccatagcgctcgatccctccgagtttcccgaatacccttctccagagcaaggcttttttgacagtattctttccccagtaaaagctgcgaaacacccgaatgctgaacctatgcctttggataccatcacgtgcgataaatggcattgtgctagcgccccttactttttagccgaagggtcgaaaaaagtccaaattaatagccaaccggcgtgtcgtaacggtgatagaagcacttgtgaagccaaaatcagtgatacgcaagaaaaagggattgtgcgtattggcggtggcagtgtggtggtacgcgatattatgagtgggcgtaacccctttgccgaaatgtttggtgaaattctcggtggccttgctgttggagcggcgtctaccctgtttcgcagagggggactcaaggcgattaaacagtgtttgaatagtgtaggctgtactttggtgagtgaaatcgccagtaccgcggtgggcagtatggtagtcgcctcggtgacccaagcctttaatagtgtgcgtcaccccgtgcatgcggctacgggggcgaaaccaccttccgtcgctggaatgaacaacagcaaattatcgaatacactaatgcattga

SEQ ID NO: 314229 - DNA, 1395 bp, Proteus mirabilis
atggttatgcaacatgctaaaccaggcagggtggcacttgccgttatgggcgcattgcttgtaactgcactacctgcgaaaatgtcttatgctgaaggatttattgatgactcaaccctgacaggggggatctattactggcaacgtgaccgtgatagaaaagagttaacaccaaacagtcctgattacggcaaatataaagccaatttacaccactctacctttaacgctaatcttgatttttcttctggttatctgggtgatttttttggtattgatttagctgcttttggtgctgttgaacttaacaacagtggaccagctgcacctaatgaaataggatttagtgatgcaaaaagtcgctgggatgaaaaatggacaggtgatcgcagtggcgtgagtatttataaagctgctgctaaatttaaattaggccatttctgggctcaaggtggatatattcaacctaaagggcaaacattattacgtcctcattggagtttcttacctggtacttatcgcggtgcagaagcgggcgctgtatttgatttcgataaaaatggtgaactctctttctcatatatgtggactgatgaatataaagcgccgtggtatcggaatatgtacaatttccgtaaggcagacttagagacaaatatcagttatttacactcttttggtgccaaatatgattttaaaaatagcttagtattagaagccgcatttggccaagctgatggttatattgatcaatattttggcaaagtttcttacgatttccctatcgcaaataatacattaaaaacctcttatcaattctacggtgcaaaagataaagtcaccggagggggaattaacgatgtttatgatggtttggcatggttacaagcattcactttaggctatacctacaatgtatttgattttaaagttgaaggtacttgggttaaagcagaaggtaaccaaggttactttttacaacgtatgacgccgggatgggcaacctcgaatggtcgtttagatatctggtgggatggtcgttctgattttaacgccaatggtgaaaaagcattatacgcgggagtgatgtatgatctaaaaaattgggatctaccgggctgggcgattggtacttcctatgtgtatgcttgggatgcaaaaccgagtagtaaccctatttatgaccaaagtaaacgtattagagaaagcgcatggaatgccgacatcatgtataccgttcaagaggggagagcgaaaggtacgttatttaaactccactacactcgttatgataaccattccgatataccaagctatgaaggtggttttggtaatatcttccaagatgaaaaagacgttaaattcaatgtgatcatgccatttacgattttctaa

SEQ ID NO: 314230 - DNA, 501 bp, Proteus mirabilis
atgaattttgatggtactttgattgatacgccatgtaggattgatacgccatgtaggattgatcagccaagtttaaatcaaaatgtggtttttttaaatagcacaccaagggattattggaaatatcctgcggttagacctgcagaaaaatttaccattaaactgatccaatgtgatgcaaaatcgttatggaaatcagtgaaaattaaatttaatgggcagccagagccagagatgggggctgaacaacaaaagtaccttacactttcttctggcgttaataaaagtaagttagccattggattaattgatatagatggaaaccaacgtattactttaggtgaaaaccataacggtggaaatggaactcaacttaacgatggcacgatgttgctaacctttaatgcatttgttgaagcgacaccaaaagcaatacaggaaaaaagtgttgtacctggagtttataatgccacggtagaatttgaggtttcttatgaataa

SEQ ID NO: 314231 - DNA, 984 bp, Proteus mirabilis; identical to SEQ ID NO: 306071

SEQ ID NO: 314232 - DNA, 978 bp, Proteus mirabilis
atggcaaatgatttagttgtagtgaaagcaaatagtcttattgaagctagttaccgattaagtattgatgaaatccgtattctagctttaacgattggaacaatggatccaaaatcaaatcagcaaatttttgattttacggtagccgattttgtccgtgaatttcctgagatcaatatggataacgcttataagcaaattcaggcggctatcaaacggatttatgagcgtagtgttagaaccgaagatagtaatcgtgtaactgaatttcgctgggtatcttctcgcacttatttcaaaaatgaagggcgttttcgtattgctatgacgaacgaagtaatgccataccttacgcagttaaaaggacaattcacgcagtaccaacttaggcacatttcaagttttaatagtgttcactctatccgtatttatgagcttgttacacaataccgctctgtcggttatcgtgaaatcacgattgaagatttgaaaaaatggttacaggtggaagataaataccctaggtttaacaatttcaaacaatgggttttagagccatccataacggaaattaacgataaatctgatctgctcgttgatgtagaacaaattaaacgtggtcgtagtatttttgcattaaaatttacgattaagagtaagaaaagtgcggtcaaagcagaattaaaacgaccaccattcccacataagaataagtacggtaagtttgtaacgttaaaccgacaagatccaagaatgagcaatcatgagtatggtttatgggcaaaagactgtttaaaaatattggaaggtttttatcaaaaaatcgaagatataccgaatgaagatttgctgttttattggattttcttaacaggtaatgcaagcaataaatcaaaattaggaacaagaaaaaactttgttgatgaacttaaaaaacgaggatacaagatagaacattgtgaattggttaaagtttaa

SEQ ID NO: 314233 - DNA, 207 bp, Proteus mirabilis
atggcaacacttatggaaaaagacagcttgataaatggtatttctcaaacactaggtttaatcgtagctcaaataggcgacagaaacgaggatagtgttatgttagcaacattgcgtaataagttatatggacttgacgcagagaaaattgattatcaagaaactgcaaaacttgtaaaagaaaaatttaagctctataagctatag

SEQ ID NO: 314234 - DNA, 198 bp, Proteus mirabilis
atgagtaatgaagaattaacaccagaagttttagctcgacgggcataccatgtaagaaatgccctggctagtttcgctttggaaggggaatacccctctaaagaggcggaggatctatttaataaatttgcttctggtgaaattgaaacaatagatgaattgcgagttcaaattaatttattgtattctgaagattag

SEQ ID NO: 314235 - DNA, 219 bp, Proteus mirabilis
atggcaactatagttcaaaaagatgttttaattgaggcgattgcacaggttcaaggtcatttattacgtagcttaccctcctctgactctatgaatgatgatgaactatttttgtgtgagctacgtgagaaaatttataacactcatcacgataaactagattacgaatcattacttgttgatattgtaaaaattaaaaataagagttgttatagttaa

SEQ ID NO: 314236 - DNA, 513 bp, Proteus mirabilis
atgggaaagataaattactttgatgatataaaaattggcaatgagattttttcactctctcatctcaatcctaaatatcttgaattttacggtcaaaaagtacaaaaaacgcttaaattaaaggttctgtattccgatcactgttttacagctcgcgtaaatcgctctgtaagcgattctgagcgtgttttctctatagagagatacaatctatcaaaattacttccaaacatcatagaagggctaaataacgataaaattcaagtttttcagacgttagctagacgtaatttcgcatacgtagtcaaaactacgctaaatgataaagattacaatatattttttgaggtcaaaaaaagtaacaacagcaatccagattgtgatctagttattcgtatagaaagcgcttatgtatttgataatgattgtaagctggaatattcaggaaagattcgatttttgatactttgccaaaaaatttatcaaggtgaaaaaatacaatgccgaaaatga

SEQ ID NO: 314237 - DNA, 405 bp, Proteus mirabilis; identical to SEQ ID NO: 296475

SEQ ID NO: 314238 - DNA, 579 bp, Proteus mirabilis; identical to SEQ ID NO: 309798

SEQ ID NO: 314239 - DNA, 483 bp, Proteus mirabilis; identical to SEQ ID NO: 305895

SEQ ID NO: 314240 - DNA, 129 bp, Proteus mirabilis
atgctggacttgcttgttcaatggtataaacgtcgatttgctgatccccaagttatcgcgctggtggtgatcttaattgccggttattgtattagcttatttgctggaatggccaacacacttacttga

SEQ ID NO: 314241 - DNA, 474 bp, Proteus mirabilis
atgtctaaatatcgattttatgcattgtatttatatactgttctttttttaggtggattatttatgaatcaatctgttgccatgtctaatgagtcacctgaaattttggttagacaatttcaacaagattacatggaatggaatgactacgcatttagccttatgggttcgaagcctgatgagtatacggagttagcagataaggcgtggcgtaggctattaactaaatacacattacctgattttgtaggagaacccattgcatttggttctgaatcaagtcatgaccccaaaaaagagaaaatattgtcggtagtaaagagcactaacaatatcactgttgtcacaacgcaatatattgtacctgatggttactcacctatttatgaatattatttaatttttcaggatgggcgatggtatttaacgcaggtttattttgttgatgaagggcaattatatcctggtctgtaa

SEQ ID NO: 314242 - DNA, 267 bp, Proteus mirabilis
atgcagaataaatttgtacatttatttgaaagtggaaattatcagttacttgtaaaaaagaccgaaagtgaagatggtgagcccaaattatcactaatcacacaatatgatggtgcagaagtagatttcggtatcgtaatgaacaatgaggatgaccttgttaatgcatttaataactatgagcaaatcaaggctggagctgaaaagtacttaaatgaattaaaccagtcaacatctctgcaagacttcattaaacgtatttattag

SEQ ID NO: 314243 - DNA, 1473 bp, Proteus mirabilis; identical to SEQ ID NO: 307532

SEQ ID NO: 314244 - DNA, 351 bp, Proteus mirabilis
atggctaaatatccaagtcaattacaagacaagttcaatttacggctacctgatggcatgaaggatattattgctgaaagagcaaaagccaatggacgctctatgaactctgaaataattcaaatgttacagtatgcaatagatgaagcagagcatatggataggatcgttgctaacgctgatgcagatatggagagagacccaactctaggtatgtcggtcaaagaaaaaattgaatactacaaaaatattgacccagccaaggttgaaatacttaaattacaacagaagcagtgggaagaaacatcagctttaattgacaacttggtaagtaaaggtcttttaaaatag

SEQ ID NO: 314245 - DNA, 2121 bp, Proteus mirabilis
gtggccatgttagctggtgccgcaatctattacttctatcagaaatcagagcaagcaaaacaagaggctagagattttgctgatagcatagatcagttaacagctaagttaaaaggtttgtcgtatcaagagattgctcgtgacgcgcaagatgccgccgacaagcagaaagttctaaatgcggaaatggaggagcaggaaaagcaactagctagacttgaggctcgcttaaggatgcaacaggacgctctaggaaataatccagagttaattgaaagaaatacaataaatatattaagagaaaagataaagctggaaggtgatttagctgagaataaaaaacgacatgagctaatatcaaaatacttatctgatgctcaagatgaatacaacaggaaagcaaaggaagctattgacttaagtgttaagagtgcaacaactcttgatattgagaaatcagcttttggaaggttaacaactcagataagagaggcaactggagcaaaggaagagttcagtcttgtaaggccaaaacttaattttggtggtgaggaaggtgaaaagctaaaaaaacaaatggaagaaaggcttgctctatctaaattagagggagctgaaagagctaagctaaaagccatgtatgacgctaaagatgcagggataacagatcctgatgcaattcgtcatttacaagatttagcagctcaagagtacgaaaacactcaggcaaaaaaagaatcaattagtgctgccaaaaaagaagccacggaagctgaaaagctgaaacagaagatcaccgatgtagccaatgcgacaaaagttgctgaattagaaacaaaaggacttgctcgcgaggctgctattcttgaagccgttcaaaaacttggcagtaaagcaacgaaagctcaggttgcagaaataacagagttagctggaaaggaatttgacttaaaacagaaaatcaaagacaggaaagacgccttctcgcaaaatccagaagcaaaagctaatcaagaatacaaactatctctcgagcaacttgaaaggcaacttcaaggaaatttgattactgagaaagattaccatagaagaaggcttgaattggctggtgagtattctaaaaaaatagccgaggctaatgctcaggcttcaatttctccaattgaagataatagagctcagttcgatcctgttcagcaattgaaaaatgagaatgctaaaaaactagcgcttatggataagtattatgctgatgaaatggcaatcattaatcaagcgtatgcaaaccaacaaatctcacacgagcaatttacgacagctaagcaaatcactgatgcgcaatatcttcaaataagaacagcacaggaaaagaaattcaacgaacagcaaactgctgcacagtggcagatgttaagccagcagagcttaggttttgacatgcttacatctgctgttgatgcaatgtcgggaagcgcatcaaacgctatcactggattattgactggtaccatgactgccgctgatgcaatgagatcactaggtaacacaatactaaacagtgttgttaattccattgttcagaccggtgttgaaatgctgaagaatttcatcattggtaaaacaatgggtgcggccgctgctgctgcatctatgggtgaagctgcaattgtcgcttctgcatgggctcctgccgctgcgtttgtttctttagctaccatgggggctaatgccgcgccagctaatgcaagtttagttggaactactggtcttgcttcaacattggcaattgctggtgctcgtaaaaatggcggccctgttgacgctggttcaatgtatcgagttggtgagggcggtaaacctgagatatttaaggcatctaacggtagtcagtacatgataccgggtgataatggtcgagttattagtaatcgacaaatgggtaaaggtggtaatggtgtcagcatgggtgatatgcactttacattccaagttcaagcgcctaatggcatcactcaaaaggaagcacaacagatacagcaaatggtgagaggtacggtttatgacgtacttggtaacgaaatgcgtagcggtggtgctttggaaaaagtaagaagttggtaa

SEQ ID NO: 314246 - DNA, 129 bp, Proteus mirabilis
atgtcaaaatttttagcagtaattagatgtggagataattcacttcataaaaactgggttaatgataatgcccaatttgatgtaattcttagttattttggtgaagatatcccttattcaccactttaa

SEQ ID NO: 314247 - DNA, 339 bp, Proteus mirabilis; identical to SEQ ID NO: 103768

SEQ ID NO: 314248 - DNA, 729 bp, Proteus mirabilis
  misc_feature (479)..(488): n is a, c, g, or t
atgaataatcaatcaaaaaaatatgacagaacatatcactatcctttttcaccaggcacaacaagcgatgatcgtattaatgccaattggtggcaagatatctgtaaaataaagcatcttattcatactgaaaaattagatggtgaaaataattgcttaaatcgaatgggggtttttgctcgctctcatgcgactccgacacaatctgcatggacagtacaactacgccagcgttggcaatccatcagaaatgatttaggtaatttagatatttttggtgaaaatctttatgccattcattctattgaataccaacatttggaagagtatttctatgtttttgccatacgttgtcaggataaatggctaagttgggaagaagtgcaattttatgccactttatttgatttacccaccgtaccggaaatctcgctaccaaaatcggaaaataaaatagagtttgaaaagaatattatttnnnnnnnnnntattttacacgcacaaaagcatagctcttttcaatcacgagatgtgttaaccaagaaaccaagtgcgatggaaggcattgtcacacgagatgctcaagcattttcattagatgaattttcacatcgggtgtttaaatatgtgagaaaagatcatgttaaaacagatgtgcattggaaacgtaattggaaaagagcgccactgatttgggaaaaaacacaggagtctcatgatgcttcataa

SEQ ID NO: 314249 - DNA, 2517 bp, Proteus mirabilis
atgtctacaattccaacacaaaatccagttccaagtgaagcaccgcgcgacctgaaatttaactcaggtaaaattgacgagtttgttacgtcaatgaaaaacaaatatattgatagatttgggcaagagcattttacaatcgaagggttacgttggattgctcagcaagcgatatctcaatttggttacattacattagactcattccaaaaaggtgcagaaataacactgccaaatcaagttttgcgtgatgaaaacacaggagaatattaccgctgggatggcgaattgccaaaaatagtccatattgattcaactcctgacaattctggcggtgttggtatcggtaaatggattagtgttggagacgccagcctgagatcgcaactcaagaacgggaaaggtgagcttgtatccattggtgacggaaaaactgtagctgatttttcatcttacgaaagcggaagtggtgacgccattattgctgtaaaacaaccattctctggcgcaataccaagatctcagcatgataaaaatgcggaaaacttgtccatattagactttggtgcaattggcgatggagtgcatgatgattctacagcgctgcaaaactatataaacgcttcaaattttgatatatttgttccgagcgatatgacactgtatatatcagaaaacataatatctgatgacaaaataaaaatacacggtggcggaaaaatcattggcgataagaataacaagccatcgttattcttgagtaatggaggggtgatagatggtatgtatttggaatcattatcaatcaatgctttcacaaacgaatcgctgttaattaacgataaaaatggattttccttcttaaataacaatggtgttgattatcatattactgttggtgctccatcatcatctgtaaaaaatgtattagtcactggtaataaagggatgctatctggtaacaggaattttccgtttttaaaattaattaacgttagtaattatgttgtttcaagaaacacaacgcaagaatatcattctcttattaccgtgattccacacagatctttttgtaattacaatggtgagatttcatttaataatgatgagtcatatatcccatttgagttgattggtgacagtgttaactgtataagcgggattaacatacacagcaatactctatctcatcaagttagaaatgcatcaaccagtgaaagttacccgatacttaagtattgtaataatgtaaccttatcagataatacgttgacatttaattttccagtcagtattgaatactgtaggcatatcactatgagcaataataaactggtgtctggttcactttcttcatctttacggttctggtacagtaaaaactgcatcataattaataacgatttcaatttcagctctagtgatgcagtgtgtttgattttatcaggatataataacgctctagaaagaagtgagaacataagagtatcaaataataaatttcactccaaaggaagattcataaatattgcttctgggtcaaataacgtttgtgttaacagcaatgttttttacaataatattgtaaatagttacagcaatatatatataagtagcgattcaacaaatattaacgtatatgaaaacaaaagggttgcattatcatcaaatgggaacctaattcaagatgactcaagttctgccatcacttcacctccatcaaataatgacgttattacccacggtagcttaattgtgaaagagttattcgtagggaaggatgctgatttaaataatagtaacgcatacatatattcaatatcagctccaaatgtttcatttttgaaagctaagtatgaaacagacggcaaaggtttagccatatttaaaactatgacagagtggatgtcaggaaccagtgctgaactagcaataaatatgagtgcttttgattctgatgtgagtaaattttacgatggggtgatgaatggcggattggtggattgctatggtggtgagttttattttagaccatcagcggcgataataaataattttggcgagttattctgtagagattggactctaaaaggagatacaggaactgaatctgaagggtgtggtacaccacagagaaacatagctaatggaatgatttctgaaggagttttccagacatttatattcagatcgccacttgttgtagatggaaaactttatgactataaaagaacaggaatagtgaataggggcgtgttcgaagatggcattgaaccaagaatgtcaatcggtcaaaaaaaggatggaacaataattattatatgtgttgatggcagaagaagcgattcaccagggtgcactatgctaagtcttgctaataaatttatatcgcttggttgcaacaatgcgttcaataccgatggaggcgggagtgctactctgtggtataaagggaaagtaatcaataaaccaagtgatggagtggagagaaaaataccgacagttttttatgtataa

SEQ ID NO: 314250 - DNA, 1710 bp, Proteus mirabilis
atggatatcgtaaagcctcgatcagtaagccttgttgttaatgtgacttatgatactccgcagggttcgattacaaaggatattaaggttgacgcttatttatctgatgcgaaagaaagtgatgatggcgctattatctcaccaaaatattactacgaattctttttcactaatttaactggcggtgacttagcaactcttccgcctaatgcaattgttaacacgtcaaagtttattctctatgacaatcagtttctgacagtaggccctttcttttctccgcttgatggtggtgagttatgggtacatttaaacgctcagcttggtgatggcgattatgctaatgcaagaattgaattttggaaggttgatgagaataacaatgaagtagctggaacaagagagtcattcaatagagggttcccacctgcaccaaaaacaaaaacatactatctgacggaaaaattcaagccgttggctggatatggaagatatgcgcttcaactaactcgattagaaaacagtaatgatcacagcattcttaagctagaggaagtctttattgttagagagagaattaacgaagtacatgaagaagatacgcttgttaaagtaacagtgcgggcgacagaagcgccaacaggggcaagggagcgtaaatataacgcactagccacgcgccatgttattagttacgacatgaatagccgtagcgttgattatacattacgaccatcacgatcatttgctgatgcggtcgctcacacctggctagttaccgcaggacagccagaaagcaccatagatttatatggtttgtattcaatctatgaatcacttccagataagcgcttaggatattttgattacacatttgatgatgaagatgtatcgctaggtcagcgtatagaaacaatatgcaatgttgctcgtgttatttcattttgggataacggcgtgcttacatttactcgcgaggaggaaaagaaatatccatccggcacttttaatagagcaaacacgacaggaaacgggttctcactttcttatgatatgacaatgccgagcggtaatgatggtgttgaaatcgaatacgtaaaccctaaaacaaacaaaaagacctatcttaaatatcgtattgaaaataacaaaatagttaacaagccagctaaaaaccctaacaaaataaccattcacggttgtcgtaatgagtatcaggcgacagatagggcactattagaaatggataggctaatacatcagcgtatgagcattagtgtgcagactctcgcagatggtgattatgtttatccaggcgacttaattattgttgctgacacatacgataagaatcaacaggctggttatatagttgagaggatcggaaatcaattttcaacaaatgaaaaagttgtttttgatggtgagatgtttgtttgtgttaccgatcatctaggtaacacaacggaaagatttaaagccacaccgagaagcgatacagcttacggatttatcgctgatatacctgatatccagctaaacatatatgacggtatgaatgttcaatctccgtcacgttacattatatccaatatcgttgaaatggactcaatgagatggattgtaagcgacaaaaagcctaatgcagacggaactttcagcattacagcaagtgagtatttttctgcaaagaaagattacaacgtttaa

SEQ ID NO: 314251 - DNA, 585 bp, Proteus mirabilis
atgaaagagtatccaattatttttaataccgaaatggtgcgcgccattttagatgggcgtaaaactcaaactcgtagagtaatgaacaaccagccttgcacactatcaggagaaactatttccgtacaacaggatgattttaatttcagatgggctggcgatttatataacgatactagcggttggtttccttgccctcttggcaaaattggtgatcgtctttgggttcgtgaaacatggcgtaaatttgatttttcagatgagtgtggttgcagtgaatatccatgtggatgccctgaaaacggagctattatgtatcgcgcaacgcaagatgacggtgaatctaaatggaggccatctatacacatgcctcgctgggcttcacggatcatactagaaattactgatgtacgtgtagaacgattacaggatataagtgaacaagatgctattgctgaaggtactaccaatatttcggttttgtctaagtatattttttcaaatgtatgggaatcaatttatggttttgaaagctggtcatctaatccgtgggtatgggttatcgaatttaaaaaagtgaaatag

SEQ ID NO: 314252 - DNA, 174 bp, Proteus mirabilis
atgagtaaacagatggttttagttgcaagaacaaacaaggttggctctgactctgagtgtgggctgggtattactgaggatgaatgggataaattaaccgaagaagagcaatcaggatatatcaatactgcaattgataatcttgttgattggtatgtgaagacagaagattaa

SEQ ID NO: 314253 - DNA, 528 bp, Proteus mirabilis
atgaaaattaaatgtagaaaattttatcgaaagctattctcttcaagcacaactcataaaggattgaatattacatcgttgtcagatgataaatatagaaataaagattacaattttcactttatatcttcagcatcattaacgcttatatcagttacatttttcattgggatgcttagcgtaaatctgaaatcaattaacaacctagcttttatagagatatctttatcaatgctatcctttgcgatatctatcgcaataaattcattttcattattttacttatatttagcattaaatagcgagcaagataaaacagagttattaataatttttaaatataggttttttgcaattatgaaattaatttcatttttatcaccagcgctaggtgttcttttcctgatttcttactttaatgagtatatagccatatcggtattattattattttttcttctattgtattgctatggtcaggtaatagacagagcgtcaaggaaagcaaataacattctacctaagtaa

SEQ ID NO: 314254 - DNA, 267 bp, Proteus mirabilis
gtggttcgttcaagtcgtgttccggttggatttaaacgttctgaagcaataaagccatattttgcatcatctacttcaccattttgtgtggtaaatccaaccggaacacgacttgaacgaaccacaacaacacctttttttacaccatctgctaaagtatttaagatgtcagaatataagttaccattgccgacacctgcactaacaatacctttaaagtggttatctataaacgctttagccggtaaatcagatgcattagcatag

SEQ ID NO: 314255 - DNA, 546 bp, Proteus mirabilis
atgtcgatattattacaaagtgggtttaatcgtacggtttttgattctggcttaatgtttgttcctgcaagtatcggttttatactttcctctttattcacaccgaagtggatcaaaaatattggcgaacatgttatctattggggcgcagtctgttatgccttcagctatattttgcttattttaggcgtctattatttgattacccctaagaacactacattaattattcctttcttattgttagttggctttacacaaggcatgattatgactcctatgctgaatttagtgttagaaaaagtgaagcctgaacttgtagggattgcttccggattaacggcaacattacaacaaattggggctgctataggggtaacatctgtttccatcattttgcaatttagcctcacacaggttatatcaaggaatataattgaacattataagatagcgtttagttttagtatgttgtttaattttataatggctatatgtgcggcttttttcttgaaaaaaataacaaaccataagaatacgttataa

SEQ ID NO: 314256 - DNA, 342 bp, Proteus mirabilis
atggcgatatacttatcacgacaatataaattgcctgttgatgatattggtatcgcaatgtctatttcactgactacggggatagtattcagccttgcctttggtatgctggcagataaatttgaaaaaaaacgttatatggttttttctattattacctttattatcgcattttctgctatcccaatggtcaatagtactattttagtggttatctttttctcaattattaactgttcctatttagtcttttctacggtattgaaagcttatttttctgaaactttatcaatatcaatatcgggtggacggttggcccacctattggcacattattattaa

SEQ ID NO: 314257 - DNA, 582 bp, Proteus mirabilis
gtgaaagcctacggtcaattaaatggcgctgaggtgcaagagttaattgcacgcgccgtaatgagctacagggttattcctgagtggttaataaaagccattagtaagccgacatacggacgcaatatcctacaaattgcaatgatggttatgcaggcgtgctgtgatgatgattgttctgaaatcattggcgaatggagatcgggtaagcgaggtattgtctataaaaacggcaagatgccaatcgctgacattatcgtcatttctcgagaattattcactcacggaattatcggtaaagcgaagatccgtaaacttcaacgtaacgaaggcaaaaatgaattctcagatgagtttatggcaattgattacatcagctctgctcgtgcgcactttggtatgaatcgagaggaagccgagcagctaaccatgactgaatttcagatgatgctcaaagctaaatatcctgatgaaaaaggcttcaccaaagaagaatatgacaacatcatgaaacaagatgataaacgcaataatgagctaatcagtggtaagcgcagattagtgagtaggaagaggaagtaa

SEQ ID NO: 314258 - DNA, 207 bp, Proteus mirabilis
atgaacctcgcaaacctaactcaagaagaaaaagacaagattaatgtcgatttgaccgcaagtggtgtgccttataaaaaacggatcatacttacgcatattatgctacgaaaaataaaacaaacgtacctagcatttaatccagtatttcatatggaggatggagcgctacacggggatcgtgaaaaggcttccgaggcggtttaa

SEQ ID NO: 314259 - DNA, 312 bp, Proteus mirabilis
ttgaaagttgctgatgcagaaacggttgaatggctacaagaagaaatcgtggttgaaagtgtcgcagtagaaccagctactctgtctgtaaaagtgggtgaaactaagacatttactgtcaaatttaccccaaccgatgcgacgaacaaaaactacactgctgtgagcgataagccgaactttgcaacagttactcagcttgtgaatgtagtcactgtgcgtggtgttgctgaaggtactgcaaatatcactgtcacatctgaggatggcagtaaaacagcaaaatgcgtggtcaatgttactgctgcttaa

SEQ ID NO: 314260 - DNA, 2460 bp, Proteus mirabilis
atgcgagtgttaaaatttgggggaacttcagttgccaatgcagaaagggtactgaatgttgctgatatcgctgagaaaaaacgagagcagggacaagtcgctctggtattatcagcacctgccaagataacgaattacttggtggcaatgattgaaaaaacggcagaaggagaagaacctctcactcaagtacgagaagcagagcaaatcttcgctaatctattgcaaggtttacgagaaaatcaacctggttttgattaccaaggcttaaaagacaaagttgagcgtgagtttgctgagattaaacatatcctgcatggtatctccctattagggcaatgtcctgatagcatcaatgctgcgatgatttgtcgtggtgaaaagctttcgattgccattatggagtcggtgttacaagccagagggtataacgttaccgtcattgatccggttaaaaatctccttgctcaaggtcattatctcgaatcgacagtggatattcctgaatcaactcgccgtatttccgcccttaatattccgaaagatcatatgatcttgatggcaggtttcactgccggtaatgaaaaaaatgagcttgtggttctcggtcgtaatggctcagattattcagccgccgtattagccgcgtgtttacgtgcacaatgttgtgaaatttggacggatgttgatggtgtttacacctgtgatccacgccttgtcccagatgcacacctactaaaaggcatgtcctatcaagaggcgatggaactttcctactttggtgccaaagtccttcatccacgcactattgcacctattgctcaatttcaaatcccttgtttaattaaaaatacgggcaatccagaagcaccgggtacgttaattggtgatggtcaaaaagatgacagcacgccggtaaaagggatcactaacctgaataatatggcaatgatcaatgtatcagggccaggtatgaagggaatggtgggtatggcggctcgtgtcttttctgtaatgtcgcgtgcaggaatatcggtagtattaattactcaatcttcatctgaatacagtattagtttttgtgtaccgcaaaaagagctaattagagcgcaaaaagcactgtcagaagagttctatctagagttaaaagatggcgtacttgatccgttagatattatgaacaatgttgctatcatctcggttgtcggtgatggtatgcgcacccttaaagggatctcagcccgtttcttctctgctttaactcgaggcaatattaatattgttgctattgctcaaggctcttctgaacgctctatctctgcagttattgccaatgatgcagcgacgaatgcggtgcgtttatgtcaccaaatgctctttaacactaaccaaatcgtagaagtctttattgtcggtgtcggtggtgttggcagcgcgctaatcgagcagatccatcgtcaacaagcatggttaaaaaacaaacatatcgacctacgtgtttgtgggattgccaattcacgtgcgatgctaaccaatatgcaaggtatcgatttagataattggcaacaagcgctacaagcagctaaagagccttttagctttagtcagcttattcgcttagaaaaagagtaccacttcctcaatcctgtgattgttgattgcacttcaaacgaaatgattgcacagcaatacgccaatttcttacaaaatggctttaatgttgttacgcctaataagaaagccaatacgatgtcgatggattactatcatcaaattcgccaatcagcggaagcatcacgtcgtaaattcttatatgacactaatgttggtgcgggtttacctgttattgaaaacttacagaacttgcttaatgctggcgatgagttggtacaatttaatggtattctttctggctcactctcttatatttttggtcagctagatgaaggaaaaagcttgtctgaagcgacactttctgcgaaagaaaaagggtttacagagccagatccaagagatgatctctcgggaatggatgttgctcgtaaactgcttattctcgctcgtgaagcgggctatcaattagagttgagtgatattgatgtagagcctgttttacctagctcatttgatagtacaggtgatgtcgagagtttcttaaaccgcttacctcaagtagatgttgagtttgatgctaaagtcgaagaagcccaaaagtcagcgaaggtattacgttatgtggggatcatcaatgaggggaaatgccaagtcaaaataatggccgttgatgctaacgatcctctctttaaagtaaaaaatggtgaaaatgcactagccttctacactcgctactatcaaccaattcctttagttttacgtggatatggtgcaggaaatgatgtcactgctgctggggtatttgcagatgtattacgtacactatcatggaaattaggagtttaa

SEQ ID NO: 314261 - DNA, 930 bp, Proteus mirabilis
gtggttaaagtttatgcaccggcgtcaattggcaatgtgagtgtcggttttgatgtgttaggagccgcagtttcgcctattgatggtcaattattaggagattgcgtaaccgttgaagcggcgcaagaatttcaacttcacagcaaagggcgctttgttagtaaattaccttctgatgctaagcaaaatattgtttatcaatgttgggagctattttgtgaaaaattaggtaaacaattacctgtctcgatgacacttgaaaaaaacatgccgataggctcaggattaggatcaagtgcttgttctgttgtggctgcactcgttgcattaaacgaatttgctcacaaaccatttagtgaaagccacttattattaatgatgggagagctggaaggccgtatttccggtagtgtgcactacgataatgtcgcgccatgttatttaggtggtctacaacttattttggaacaaaacgacattatttgtcagtctgtgccagcttttgacgattggtattgggtgatggcttatccggggatcaaagtctcaacggcacaagcaagggctatcctccctaaacaatacgataaagctgatattattaatcatggtcgttatttatctggatttattcatgcttgtcatacacaacaaccaaaacttgccgcaagcttaatgaaagatgtgattgcagagccctatcgaacacagttgctccctggttttgataaagcgagagaggctgcattacaaaaaggcgcgcttgcatgcggtatttcaggctcagggccaacgctgttttctattactgattcattggctattgcccaagatgtggcgcaatggttacaacaacattatgtacaaaacgatgaaggctttgtacacatctgccgtttagatactcgtggcgcaagagagatagggtaa

SEQ ID NO: 314262 - DNA, 1167 bp, Proteus mirabilis
atggagcaggttttatacaaattgccggatgggtgggagtggaaacgtattgaagaagttttcacaatcactagcggaaagaacctcactaaaaaagatatggccgatgagggaaaattttcggtatatggcggtaatggaatagcaggtagatataatgatttcaacctgagtggttcgaacatcattattggtcgggtcggcgcactttgcggtaatgttcgcttggtcaatggtgatatatgggttacggataacgcgtttttcattaaagaatataaggtagatatattgaaggagtatctcgcacaggtactctcagcgttgaaccttggggaaacggcaaacaaggctgctcaacctgtaatctcgtacaaaggaataaaagatttagtcattccttacccaccattggatgaacaaaaacgaatcgtcgaaaagctcgatgcactgctcacccgcatcgataccgctatcgagcatttgcaggaaagtgtcacactggctgatgcgctatctcagaatgggcttgatgtctattttgctgaactcacagaaacaaaccccgagttaaccttgtcaaagttagctgattttatatctggttatgcattcaaaagcggtgacttcacatcggaatccggaattaagccgattaaaataaccaacgttggtgttaatgagttttctgaaaatgcagaagagtttctgccagctagctatgaaagtgaatatcagagatttgcagcaaagacgaacgatatcgtaatcgcattaactcgtccgataattaatggtggacttaaagtttgccgagtaccagaaagttatagtggcgcgctagtgaatcagcgtgtcgctgcaataacttcaaaaaacaaacacgtattagatttcatttatctttacttacagtcatcccgcactaaaaattatgtactggaaaaatctaagtccctgaatcagccgaatttatcaataacagaccttaagaacctcgcgcttcctttaccggctaatgataaggccattgctaaagcggttgctgattgcaatgctttgatatccaaagcaagaaagagcaaagctgaaatttctgaaaaaataacaatgatgcagcaactaaaagcatcaattctcgattctgcttttaaaggcgagctctaa

SEQ ID NO: 314263 - DNA, 1773 bp, Proteus mirabilis
atggaattaacactcgcacctaacccgctgtacgaccagccacaaaccttaaacatcaataaggttgccactttaattggtgaaaatggcagcggaaaatccagtatcttacattcgatctttagaaagcagattgaagaacctagtgaaacgcttcagctgatctgtgctacttcaggacaaaatgaaaacttttcttccttttttgagcaaagactagcctctttacgaaaaaagaaagatataagtgacattgatttttctagccttttctttactcagaaagatgttcgattccttacgtttctcgcctacacattcaggagtaacggcttagtttttaattttgttaacaaccacaaggcattcaaggagcaggtttcagttaaattgagactgaaaatatctgttcctgatacttacataaagaatgtacaacaagaccagatagctgaagctaaagactatgaacacccatcgataagaaaaagaccttttaatcagcgacttgacgcctttcttgaaaagatagaaacacttccagaccttgatgctctgctagaaaaaggcaaaggcttaaagtcaaccgaagtcgaggtaactaatgagaaattttttaatgtttttgatggctctagagttgatgctataaaatttctaatcgaaggctcatacaacgaatatttcttttcagcttctgaaagtttgctttacctaactgataatattgaattttcattgctcagtgatggtgagtatcagtttctattcgttgcttcactaattgatctatttgatagcacttcttctcttttcatgtttgatgaagttgactcacacctgcaccataaaaacgttgagctcctttggggcatcctaagcaaaactaagggtaaggtcataaccacaactcatttagtcgactcaatcgctgagaatgacttcgaatcattgtttttggttgaaaatgggcagataaaaaatgatcagaaatctcaaaagctcttggaaagattgaaagttttatccaagagtaaagtcgtcgagttagaaatagcctccaaattgaaaaacatatgcttgattgaccactataacgactggaagatctttgaaatattagtaaagcggaaaggacttgattgggcacctctttctttaattaatcctatagcgatgtcatccggttacaatgctgctggtgattgttttggtgcttcaaagatcaaatgggtaatagaactgggggaaatgaaaaactatctaagagaatgtaaagctgaaaaatatggcaagaaacctccattacatgatccaaaagtcactaatatcttcttaatttgcgatcgtgatgaacttcctgcggctaacattcatgccgagagtggcgtcaaagtaattggggttgattgccctgacaaatataacataggttctccttgtccagaaaaaatgaatatccatttacttacctggaaacgtcgtgaaattgaaaactatttactttcctatagtgccctaacgcactttgaagtgatagacgcaataaacagtgatcaactagcacaagggtttcatttgagagagggtgattcaggggataacgacggaataagaatgcttgatgtgaaacatatcgttaatccattgatcgaaaccccaggtattggcaaagatttaaccaaaattgagtcttatataagccacatgaagccagacgaaatcagcgaagacatcaccaatatgtacaattttattatcggaaaactataa

SEQ ID NO: 314264 - DNA, 261 bp, Proteus mirabilis
atgagtcaaaatctcaaaaatgatgtagtaaatatagtattgcttggtgttttgctgctgggattgatgctagctcaagactctggatggggattcttgctcgcaggtttgccattggtcatttggtgctttaaagctttcgcatttatccaacgcagatggtggttagccgttcctttttggtgtgcgctcacttatttgtgttggcaaatgtccttggcactttgggctatctattcgttgcgtttgtcagaaatatga

SEQ ID NO: 314265 - DNA, 432 bp, Proteus mirabilis
atgaatagtgaatatcaggatctagacaatattgttctggcgatggatgaactccaaactgaccccataattattacctacctgatcagtcatctactgacgagagattcggtgtttcatcaacctagagtgggatgtgtcaaatgcaagatcacgggagaattagtctatccacatagttggattgagcttcctggcggttggattgttgatctcagactgaatcagactttcaacacattagacagctatccgcacggtatttttgagccatcatcctatcgtaaccttcagtattttggcatgcctcttatagtccctgaattcgaattatctgaactcgatgaaatgactgattctatgttttccaagttattcagtttacagggaatggatatacgagtgagcggaggtcgttatgactgcatttga

SEQ ID NO: 314266 - DNA, 159 bp, Proteus mirabilis
atgacgaattcgacggattctaaatatccaactaggtctgacttagctaaagccaacccttacactgagcgcgataaattgtcagaagaagagcgtgaagagagtcgtcggaagtttaatgattctctatttttcggtaatgggtatttcaaactttaa

SEQ ID NO: 314267 - DNA, 204 bp, Proteus mirabilis
atgcagggaattaacccaacggagtttgaaaaatggttttcaaaaaaatcaggttgctcaattgagtttctaatagcgtccagaaagagaaccccaataggaatgtattaccggcaagaatcaattcagagcagatatgaagcgtttatggcaggcaggcttagcgctctaatgccactcccaccaatgccagagggtgaatga

SEQ ID NO: 314268 - DNA, 375 bp, Proteus mirabilis
atgagcgataataaaataataaaattcgatgactttgcaaggtttcttaacttgcaatctggaagtcatatatgcccaatatgtggtagtggtgagtgggatctgcatactccagagcacgcaatggtcacatccccggacgggaaaataaaacagaatatagtaccaacgattcctggttccaccagaataaacaataatgacgaaccacaaaataaattattccaaacgccagttttgaatttacttgttatgacatgcaataaatgtggttatgttaatttattcaattaccaaaaagtgaagaatgccttagctgttgaatcagatgataattccaatcaggggactaccgatgagccagcaggaaaataa

SEQ ID NO: 314269 - DNA, 534 bp, Proteus mirabilis
atgagccagcaggaaaataaatataccaagaaggttgatcactcatttactcagtctggtgtgtatatcccagcagggactattgaccatagcatgcgaactcctgcatactaccctacagatattgtatttgtctctgagcgaaaaattcctggacaacacaaaccaaaaaatgaggatggtgagttttctatgaaaaaaattataactacataccttccatttcttggattggctctaactatgctgatagcctttggcggttttgcttggaaagtgtccgataaaataaatgagtcaaataatgaattgagaaaagaactacagtccactatctctgccaataggcaagaaatgacagtattgataaactccattgacagtagaaataatgatcgatttaacagatctgacattaaattcgatagaatagaatcacgtatagataaagtagagtctaaaattgacgataacttcaaagaaacaaacaagaatatcagcgatataaaagagttgattattaaatcaaagtga

SEQ ID NO: 314270 - DNA, 258 bp, Proteus mirabilis
  misc_feature (152)..(161): n is a, c, g, or t
atgaacattgttgatcggtttatttcttacaccaaggtgaatacaacaacaaatagagagaatggcgctgcaggtattatgccttcatcagaaggccagcgagttctcgctttacaattagtcgaagagttaaaagcgttaggtgttgaagnnnnnnnnnngaagatatcaaaattcgcgatactgccattgttaccgcgacactaccttctaaccttgattatgaggttcctaccgtggctttctttggtcacttag

SEQ ID NO: 314271 - DNA, 180 bp, Proteus mirabilis
atgatccaaattcttgcggtcttaattgtcgttattattgtcgctagaatgatcttaaaaggatataaagccgagccggttttgttagttgctggtttaatcttaatggcactaacaatgatatttggttggggagatattctgcctaaaatgtcaaaacaaccggtattagctggctag

SEQ ID NO: 314272 - DNA, 285 bp, Proteus mirabilis
  misc_feature (251)..(260): n is a, c, g, or t
atgagtatggcttttttgctgagtgaaaaacagctattattcaggctgtttttatttattgaggaagaacgaatgccatcttttgatatcgtatctgaggttgacttacatgaagtgcgcaatgcggtagagaacgcacaacgtgaactgactactcgttgggattttcgtaatgttgaagcaagttttgaattaaacgaaaaaactgaatcagtaaaaacaactagagtatctgaatttcaggtgcagcnnnnnnnnnnagcagttattagatattctgcgtga

SEQ ID NO: 314273 - DNA, 147 bp, Proteus mirabilis
atgttatcggcattagctaaatccactggtgtggcagaaattgcggtaccaaaagatattcgttttctcaaagaaattcctgttttaggaagtggcaaaacggattttgtctcgttaaagcaactcgctgaacaggaaaataattaa

SEQ ID NO: 314274 - DNA, 1206 bp, Proteus mirabilis
  misc_feature (11)..(20): n is a, c, g, or t
ttggtcttaannnnnnnnnntggtcttaacgccgttgccattttggcgggtattgtcggtgaatctgctttttctcccgcattaaaagatctcttttcccgctttttagaagcacctctcgcgcaacaattaggatcggtctgttcatttattatcgtcacatcgatgtttattctgcttgccgatttaacccctaaacgtatcggcatgatcaagccagaagtcattgcactgaaaattgttaatcctatgcgtttttgtctcgccttattccgccctttagtttggttgtttaatggcatggcagatcttatctttaaactatttaaaatcccgatggtaagaaatgaagatattacatctgatgatatctttgcgattgtcgaagccggtgcagtagcgggggtattacgtaaacaagagcacgaattaattgaaaatgtctttgaattagaatcacgtaccgtaccatcagccatgacaccacgtgaagatgttgtctactttgatcgcgaagagacagaagaagatattaagcataaaattgccacccagccccactctaaattcttagtttgtgaaggggatatagaccatattattggttatgtagattcaaaagagctactcaaccgtgtgatcaatgggcaaagtctcaacctcaaagaaggtgtgcatatccgtaaagcccttattattccggataccttaactttatctgacatgctagaaagctttaaaacctcaggggaagattttgccattattctcaatgaatacgcgatggtgatgggcgttatcaccttaaatgacgtgatgaccactttaatgggcgatctgattggcccgggtcaagaagagcaaatcgtcagtcgtgatgagcattcatggttggttgaaggtggaacacctattgatgatgttatgcgtgcattagatattgatgatttcccggattctagcaattacgaaaccattgcagggtttatgatgttccgtttgcgtaagatccccaaacgtactgactatgtgaagtttgcaggttataaatttgaagtggtggatattgataactataaaattgatcaactgcttgtcactaaaattgatgatattccgccagtaaaaccggttttgcaagaagcaatacctgctcctcaaacaacgacagaagtgccatttgagcacgaagagcataaagcctaa

SEQ ID NO: 314275 - DNA, 231 bp, Proteus mirabilis
atgattacagttttagattatttattagtaagattaaaagagttagaaattaaaactatttttggtgttcccggcgattataatttaccttttattggtgttgttgataatgataaagatattcaatgggtaggagcatgtaatgaattaaatgcatcatatgcttgtgaaggatacgcacggatcaaaggtttttctgctctgtgtacaacctatggagtgggggagtga

SEQ ID NO: 314276 - DNA, 405 bp, Proteus mirabilis
  misc_feature (375)..(384): n is a, c, g, or t
atgcgtatttgttctttgttgctatgcaccactttcttagtatcatcaataacatcaagctacgcagaaataagcacacataaactgattcgccaagataatagcgaactgatttattatctagataaacaagctgaacataacaaaacactgttagttttaatgcaaggttctgactgtaatagcataaaaaataatacttttattcaagaaacctttggtagatggctaccgagtagtgatgttttaatggttgaaaagtatggtattacagcacaattgacttattccgacgataatggtgaaagagaagattgccctaaaaactataaactgcatgataatcctagccaaaggcttgctgattatttagcnnnnnnnnnnttatttagcagtgctagataa

SEQ ID NO: 314277 - DNA, 150 bp, Proteus mirabilis; identical to SEQ ID NO: 303119

SEQ ID NO: 314278 - DNA, 426 bp, Proteus mirabilis
atgcttaatggtaaagatttaggccgagcgatagagcaggcaattaatgtaaagctaccatctatttatgattggataaaaaaaggctccatttcaaaagataagctacctgaattatggagttatttttctgatgttgttggacctgaacattggggcttaaaggagtttcacctcccagtaaataaagctgaatcaagatgtacacatgatgaacatcaacttaatagccttattcatgcttatatgtcagcttcggcagaaagaaaagaaataataaaatatcttttgctgcaaaataatacaaaagaaccttcttgggttaatagtgatactagggcatacattataactttagaacgacaagcctctgaatggttaaataacaataaaagcaataaaaaatcctcaaagcgtccagcttaa

SEQ ID NO: 314279 - DNA, 849 bp, Proteus mirabilis
atgacgaacgcattaattaataaagatgaagccccgtcggtcgcacccttcggagcttctgataacgtcacgccacacataggaaataacgtcatgaatactttaacaactactaaccaagttgtcaccatgtctagccgtgagattgcggaattaacaggtaagaagcatgcggatatatgtcgtgacatccgtgtaatgttagttgaaatgtatgaaggaaacgaaaaggattatattcgtaacgcagatttgctttaccttacaaatcatggtgttagttgttttcattatgataagtcaaaccctaatgcgtgggaatatttactagaccgctaccactctgaaattttagtgactggttatgatgtaaagcgccgtgctgcagtaattaagcgctggtacgaccttgaaactggcaaagctaaaccatctattgatccaatggtcgcgcttaatgaccctgctttcttacgtgatgctttaatttcttacaccgaaaaagttatgcatcttgagcaccaagtcgaagaaatgaagcctgatgttgacgctttaactcgtatcgctaaagcagaaggttctctatgtattactgatgcagccaagcaattgcaagttaaacctaaatcactgtttgacttaatgagtcatagcaaatggatctatcgccgtattggaacagcttggattgcgtatcaagataaaatccaacaaggattgcttgagcacaaagttaccgttgttaaaagttctactggtgaagataagcaagtatcacaagttcgtgtcacagcaaaaggtttatctaaactagctaaattattaaacacggaggtagcggcatga

SEQ ID NO: 314280 - DNA, 402 bp, Proteus mirabilis
atggcaagagattttagccgtgctcagcgtgtttctcaggaaatgcaaaaagaaatcgccatcattttacagcgcgaagtaaaagatccacgtattggaatggccaccgtatccggtgttgaaatttcacgtgatctggcttacgccaaagtatttgtcacctttttaaacctatcagcaggtgaagaaagcgatgaagaaatggtagaaaatggcttaaaagcccttaacgaagcagcaggctttattcgctctttattaggtaaagcgatgcgcttacgtgttgttcctgagctaacatttgcttatgacaattcattagttgaaggtatgcgtatgtctaaccttgtgtcaaatgttgtcaaagatgatgaaaaacgccgtcataaagaggaagagtaa

SEQ ID NO: 314281 - DNA, 2751 bp, Proteus mirabilis
atgacagatgaaacagtaaaatcacttgcagaagagattcagacaccggttgaacgtttggtacagcagtttgctgatgccggtattaagaaaaccgtctctgattctgtctcccaaaaagagaaagaaaccttgctggcttggttgaaccgtgataaagagtcaaccagccaaccagaaaaattaacgttacagcgcaaagtgcgtagtacgttaagtgttcctggtacaggtggcaaaaataaatcagtagccatcgaagtccgcaaaaaacgcacttatgtgaaccgtgatgcagttgaaaaagcacaagcggcagagcaagctcagcgtgaagcggaagaaaaggcgcgtcgcgaagcagaagaaaaagcacagcgcgaagcacaagagaaagcacagcgcgaagctgaagaaaaagcaaaacgtgaagctgaagaagccaagaaaaaggctgaagaaaaggcaaaacgtgaagctgaagaagcaaaacgtgaagcagcggaattagctaagcgcgaagcagcggaaaaagacaaagtgaaacaaaacgagaaaccaaaagctgataaggctgatcaggaaaaagcacgtcgcatagccgaacaggctgaactgaaacgtaaaacagaagaagctcagcgtcgtaaagctgaagaagaagctcgcattgcagcagaaaaagcgcgtcgcttagcggaagaaaatgctgaaaaatggacttcagatacgccatctgaaacagaaggtactgactatcatgtgacgacatctcgctatgcgcgtgatgcagaagatgaaagtgatgctgaggttgaaggtggccgtggccgtggtcgtgcagcaaaagcccctcgtccaaagaaaaataaccgtcactctgaaaaagcagatcgtgaagaagctcgcgctgctggccgttctaacaagaaaggcaaaggacgtaaaaacagcacattacagcaaggcttcaataagccagcagctgccgtaaaccgcgatgttgtcattggtgagactatttcagttgctgatttagcaaacaaaatggcagtgaaaggttctgaagtcattaaaacaatgatgaaaatgggtgcaatggcaaccatcaatcaagttttagaccaagaaacggcacaactggttgcggaagaaatgggtcacaaagttatcttacgtcgtgaaaacgagttagaagaacaagtgatgaacgaccgtgatactagcgatgaaatggctgtatctcgtgcgcctgttgtgactattatgggtcacgttgaccatggtaaaacctctttactcgactacattcgttcaacgaaagtggcttcaggtgaagcaggtggtattactcagcatatcggtgcttatcacgttaaaaccgacaaaggtgaaattaccttcctagatactccaggtcacgccgcatttacttcaatgcgtgcccgtggtgctcaggtaacggatatcgttgttctggttgttgctgctgatgatggtgtgatgccacaaactatcgaagctatccaacacgccaaagcagcaaatgtgcctgttgttgttgccgtgaacaaaattgataaaccagaagctgatcctgatcgtgttaaaactgagctgtctcaatatggcattctgccagaagattggggtggtgagactcagtttatccatgtgtcagcaaaacaaggcttaggtattgacgagttgctggatgctatcttattacaagcggaagttcttgaactgaaagcagtaaaagagggtatggcaagcggtgttgttatcgaatcttacctcgataaaggccgtggtcctgttgcgactatccttgttcgtgaaggtaccttgaataaaggtgatatcgttctgtgtggctttgaatacggtcgtattcgtgcaatgcgtaacgaattaggtaaagaagtacaatctgccggcccatcaatgcctgttgagattttaggtctgtctaatgtaccttctgcgggtgatgaagcaaccgttgttcgtgatgagaaaaaagcgcgtgaagttgccttatatcgtcaaggtaaattccgtgaagtgaaactggctcgtcaacagaaatctaaactggaaaacatgtttgctaacatggaagaaggtaaagtttctgaactgaacatcgtactgaaaacggatgttcaaggaacttgtgaagccatcactgatgcattagttaaactttctacagatgaagttaaactgaaaattatcggttctggcgtgggtggtatcactgaaacagatgcgactttagcggctgcttctgatgctatcattcttggtttcaacgttcgtgctgatgcttctgctcgtcgtattatcgaacaagaaagtgttgatttacgttactactccgttatctatagcttgattgatgaaattaaatcagcaatgagcggtatgttagagcctgaatacaaacaagaaatcatgggtcttgctgaggttcgtgatgtgtttaaatcacctaaattcggcgctatcgcgggttgtatggtggttgaaggtaacattaaacgtaacaatcctattcgcgtattacgtgataacgtggttatttacgaaggtgagcttgaatcactgcgtcgctttaaagatgacgtcaacgaagtccgtaatggtatggaatgtggtatcggtgtgaaaaactacaacgatgtccgtgttggcgatatgattgaagtgttccaagttatcgaaattaaacgttctatcgattaa

SEQ ID NO: 314282 - DNA, 1509 bp, Proteus mirabilis; identical to SEQ ID NO: 294561

SEQ ID NO: 314283 - DNA, 459 bp, Proteus mirabilis
gtgggtttgtccacattagagcaaaaattaacagcgatggtttcagcaccagtagaagcattaggctttgaatttgttggtcttgagtttattcgtggtcgagtatcaacattgcgtatctatattgatagtgaagaaggtatcactgttgatgattgtgctgatgttagccaccaggtcagtgctgtgctggatgttgaagatccaattcaaacattttataaccttgagatctcatctcctggtttagaaagacctttattcactacaacgcattatgagcaatttatcggcgaagaagtcgccgttgtattacgaattgcgatgcaaaaccgccgtaaatggcagggcattattaagtctgtcgctggcgaaatgatcacggttactgtggatggtaaagacgaagtgttcgcactgagcaacatccagaaagctaacctggtaccccacttttaa

SEQ ID NO: 314284 - DNA, 345 bp, Proteus mirabilis; identical to SEQ ID NO: 294559

SEQ ID NO: 314285 - DNA, 1338 bp, Proteus mirabilis
atgagcgaacgtaaatactttggaacagacggtatccgtggaaaagtaggtgacagccctattacacctgattttgtattaaagctaggctgggctgcaggtaaagtacttgcacgtcacggctcacgtaaaatcattatcggtaaagatactcgtatttctggttatatgttggaatcggctctagaagcaggccttgctgctgcgggattatccgcttcatttacaggcccgatgccaacccccgcggtcgcttatttaacccgtactttcagagcagaagctggcatagtgatttctgcttctcataatccctattatgataatggcatcaaattcttctccattgatggtacaaaactacctgatgaagtagaagaagccattgaagcggaaatggaaaaaccgatcacttgtgtagagtccgcagaattagggcgtgcgaatcgcattgttgatgccgcaggccgttatattgaattttgtaaaggtacgttccctaacgaaaataatttaaatgggttaaaagttgttgtggattgtgctcatggtgcaacttaccatattgcgcctaatgtttttcgtgaactcggggctgaggttatcactattggttgtgagcctacgggcatcaatatcaatgacgaatgtggtgcaacagatgtacgtatgttgcaaaaacgcgtgttagaagagggtgccgacgttggtttagcctttgatggtgatggtgaccgtattattatggttgatcataaaggcctaaaagtagatggtgaccaaattctctatatcattgcgcgagaagcgttacgtcaaggtcaactacgtggtggtgccgtcggtacactaatgagtaatatggggttagagattgccttaaaacagcttggtattccttttgtgagagcgaaagtgggtgaccgctatgtgcttgagaaattgcaagaaaaaggctggcgtttaggggcggaaaactcgggtcatattattttacttgataagacaacaacgggtgatggtattgttgctggtctgcaagtattaagcgcaatggttcgtaaccatatgagcttgcatgatctatgcagtggcatgaaattattaccacaaattttggtgaatgttcgttttacgggaaatcacgatcctctacaatcaacagaagttcagcaagtcgcaaaagaagttgaggcggagcttggcggtaagggacgcgttttattacgtaaatcaggaacagaaccattaattcgagtgatggttgaaggcgaaaatgaagagcaagtcacagcgatggcgaatcgtattgctgatgcagtaaaacatgttggctaa

SEQ ID NO: 314286 - DNA, 843 bp, Proteus mirabilis
atgaaattaattgccagaggaagagagcttaatttatcttcaccccaagtgatgggcattttaaatgtgacgccagattcattttctgatggcggaacgcataactctcttaatgatgctattaaccacgccgctaaacttattgctgaaggggcttctatcatcgatatcggtggtgaatcaacaaggccgggtgccagtgatgtttctgtcgatgaagaattacatcgtgttattcctgtggtcgaagctatccagcaacgttttgatgtgtggatttctgttgatacatccaaagcacaagtgatcacggagtccgctcaagcgggtgcctctattatcaatgatatacgttcacttaccgaacctggagcactgcaggcggctgcaaaaacggggttacctgtttgtattatgcatatgcaaggtttacctaaaacaatgcaacattcgccgcagtataagaatgtgatgatagaagttgatgcttttctagcagagaatattcaacgttgtattgatgctggcatcgagaaaaatcaaattattcttgatccaggcttcggctttggtaaaaatttagcgcataattatcaattattagcacatctaagtgattttcatcactttggtttaccgatactcgccggaatgtcacgtaaatcaatggtaggacagttactcaatgttccgtcacaagagcgtgttgctggtagtgttgcttgcgcagttattgctgcaatgcaaggggcacaaattattcgtgtacacgatgttaaagagactgtagatgcgatgaaagtcgtgcaggcgactctttctgcaaaggaaaataatgaatga

SEQ ID NO: 314287 - DNA, 735 bp, Proteus mirabilis
atgaccgaagaacaaaaagcatcaacggcttatcatgaagcgggacacgccattattggtcgtttagtgcctgaacatgatccggtacataaagtgacgattatcccgcgtggacgtgcattaggtgtaactttcttcttacctgaaggtgaccaaatcagtgccagccgtcaaaaactggaaagccaaatttcaacactttatggtggccgtttagcggaagagatcatttatgggcctgaacatgtttcgacaggggcttctaatgatatcaaagtggcaaccaatattgcacgtaacatggtgacacagtggggcttctctgaaaaattagggccattactgtatgctgatgaagacggtgaggtgttcttaggtcgttcagttgctaaagcgcaacatatgtcagatgaaacggcacgtactatcgacgaagaaattaaagctatcatcgatcgtaactatacccgtgctcgtcaaatcctgatggacaacctagatattctgcactcaatgaaagatgcattaatgacttatgaaaccattgatgcacctcaaattgatgacttaatgaatcgtcgtgaagttcgtccaccggcaggttgggaaggcaataatggcaatagtggtgcaaataccgctacagcacagccgacacaaacacatgtgacgaatgagccaaataataagtcaggatcagagagtgacacaccttctgataacaatactcattaa

SEQ ID NO: 314288 - DNA, 321 bp, Proteus mirabilis; identical to SEQ ID NO: 308599

SEQ ID NO: 314289 - DNA, 861 bp, Proteus mirabilis
atgaacatgaaaattaaaaaaatattaaataacagtgttgtgatctctctggatgaagcagaaaaagaaattatcgtcatgggaaaagggattgcctacgccaaaaaagtaggtgatgagataacatctgaacaaataaccaaaaaatttatcttaagtcctaaaaattgtccgcagagagtgctcgatcttttatcgaatattacgttagattacgtagaaattgcggacaatattattcagtatgcaaaagaaaaaatgaccttagatacacaagatagtatctatattgcattgatcgaccatattcaagccagcattgaacggtacaaagaagggacttttataagaaataaaatattgtgggagataaaaaatttttatagtgaagagtttgatattggtctttatggcttaaaattaattaatgatagatttaacatttcaatgccagaagatgaagcaggatttattgcattacatatcgccagtattagaacaaacgataatattcagcaaacctacaaagtgacccactttatccaaagcattactaatatagtcaaatattatttaaatatagagtacgatataggatcgttaaattatcgtcgttttgtgacacaccttcgctatttctccatccgattattttcacaacctgaaaatgatcatgaacctttagaaaatgagttactcgatataataaaaaacaaataccatcaaccttatatgtgttgtttgaaaataagtaaatttattaaagataaatataattgcaccttagatgacaatgaaattttatatctaataatccatattgcaaaaattgcagaggataataaaaagatgaataaataa

SEQ ID NO: 314290 - DNA, 1434 bp, Proteus mirabilis
  misc_feature (500)..(509): n is a, c, g, or t
atggcgcaacaagcaattaaaagagcaataacatattcggtcgtaataggtacacttctctcagggcataatgttattgccgcagaaagtgaaacgccaccgctattcacatcagaaacacctgcattagtacccgcattcacagaagacgtggcaacacaaaatacattaaattcaccatcagtgagtaagcaggaagttagcactaaactacaatcttggttaccaagcgaatataaaccactttactttaagcaactcgtggatgtttatcaaagcaatgacttagcactgatttggcaagatgaacaaattacacaacaactagagcagcaattggcagaggttgccttaacaggaattcaaccacaatttggacgttggttaacgctattagaaacagcacaattaacgccagaagcacgagatattattttatctgacgcttttttaggttatatcagctttgttgaacagattaatcaatcaggaacaacacnnnnnnnnnnaacaacactgttatatcgcgctgcggtacaagcattaccggcaccgaatgtgcaagctgtcgagcatttccaactcaatctacaacaaaataccttagggcgctttgtcatctcctttgccccttcacacccttactatccattaatgaaagaggaagtgcgcaaacagcttcatcaagaggttatttggcccgttatggaagggaaaaattcattaaagccaaaccaatcggcagaagaagttattgcattaagacaaatattgcgtaacttaaatttactgcctcaattggctgagaatgagcaagaagtagcaacaacgatttatgatgagtctttaattgctgctgtaaaatcatttcaagcggctcatggattggaaactgacggtattattggtagacagacgcgtaattggttaaatatgacaccaatacagcgtgctggaattatggcattaaatatacagcggttacgcttaaccccacctattggcgacactggaatttgggtcaatattcctgattactccctctatttttatgctaataatcaactgattttagattcaaaagtgattgttggtcgaccagatagaaaaacccccattatgagtagtgcgcttaataatgttgtggttaatccgccttggaatgtacctacgagtatgacgcgtaaagatattgttccaaaaggaaaggctgatcctagttattttagccgtaaaggttatacgatttattcagggtgggggaatgacgcttatccaatcaatccttatgatatagattgggaaaacatctctgcggctaattttccatatcgcatttggcaagcccctgggccaactaactccctaggccaccaaaccacaatttatttactaaaaatatgcgagcaattagttcaggttgtattcgtgtga

SEQ ID NO: 314291 - DNA, 285 bp, Proteus mirabilis
atgcgagcaattagttcaggttgtattcgtgtgaataaagcggcgcaattagcgacgatattattaggtgatgcaggatggaaacaagatagaattgatgcagccttaaaacgaggttcaacacaatatgcaccaattccagaacgtatccctgtctatttatattatcaaacagcttgggtagcagaagaaaatgcccctcaatatcgagcagatatttataattatgaccaaagcattaataatgcaacctcttttttagagaatattaagaaatatttgtaa

SEQ ID NO: 314292 - DNA, 303 bp, Proteus mirabilis
  misc_feature (200)..(209): n is a, c, g, or t
atgatgatccaagcgttacattcgctttatcaacaacacaccgataatggtggtcatggcatcggacgttgtggtggtaaaggtaaacacagaggacaacaccataatggcaataatgaacattgttgtcatggtgaaagagaccatcaccaagaaggtcatggcaaatgttgccaacagggtgagcaaagtcatgagcnnnnnnnnnntgaagctggctctcagtgcaagagcatggtaaacgacatggccgaggttgtggtgctggtaaaggaaaaggaagaggccaaggtcgtcaattaa

SEQ ID NO: 314293 - DNA, 414 bp, Proteus mirabilis
atgaatatagcgatgacagaaagatataaatggttattgtttttcctatttatcttattaacttattttattcctttagaaacgcgactgttatggcaaccagatgaaattcgttatgctgaaattagccgtgaaatgttagtttctggcaattggtcagtgccttatcttcttgatattcgttattttgaaaaacccgttttaggatattggatcaattgtattgctcagtggttatttggtgaaagccattttgcggtgcgtattgttgtagtaacatcaaccttattaacaggatggcttatttataaagcggcaatggtagtttggcgcaatagcgctcttgcttttaatgctatgaccgtttttttatcttcttttctggtattagcaataggtacttataatatatag

SEQ ID NO: 314294 - DNA, 882 bp, Proteus mirabilis
atggatatcatccgcaccgaaggagaaattgcgggctataaagcccaaaaagaccccgatgcgttagccattgccaaaaaacaactggaagcggcgggtaaaacacctcagaaagtcgcagaggaacggataaatgcagaaattgagcattacaagaaagaaaactgtgcaggaatgagcacaggtgcatgctcagctaaaatggcagaagatcgagacaaattcttcagagaagccgcctctttaggaattgattttgtgccagtggtcggtgattttaaaagttttgctgaagctgatggctggattgattacacgttagctgctgcgggtacattgccttttgctaaaatattcacgaagccactgaaagaagctaaattactattaaaagccggcgatcttgatggggcgaataagcttataaaagaagcgagtgatggtataccaacaaagttgccttcaagtcctgcatcgcaatcatcaagtggagtatggaaaccagatcatggtgtagaggtaaatactgggtcaggtaaacaaaaagattctcagatatggactgaaactaaaaaaacagatcccgcatctaatgcttatgatcactgggataaacataaaagtgaattccctgaatttcaaaattcaaagcagtatgttgaggcagcccatgattttgtaaacactcctccaaagggtactttgataaaagaacgagcgaatggagatacgatgtattacaatccggcaacgaatacttttgctgtaaaaatgtggacggaactcctaaaacaatgtttaaacctcaaaatgggcttgaatattgggaaaaacaaaaatgacaatagaaaatttatatccttgcccttgttgtggcaataa

SEQ ID NO: 314295 - DNA, 378 bp, Proteus mirabilis
atgacgatatttcctcatcaacaagaagttgtcacagaaattttacaattaacttcagatatcatagatctcacttttactagagtccctgaacaaataaatgccaatttaaagtttggctatttcaatcattattaccaaaattcaagcggtcattttatagcgaagggatctggaggctttgctaattttcctaactataacggtacacctataaaagaggtaggaccaaatgaagagcatgatattcctggaactatatttcttaatttagcttcacatgaattttatcaattggtcaaatgggataacattgatgaaatgaggccaatatcggcgatgtatatgaatattatgatggtcatcaagttgctataa

SEQ ID NO: 314296 - DNA, 387 bp, Proteus mirabilis
atggtgttttttttatctcatgtcacttttacaacaaactggttttattcttctttattaagaaatgaatattatcaagctacctattatcacccagcccccatcaatttctttggtatttatttttggttggttaatgaacaacctgtttttgtcgttctctatgataaagaaggtaaatatattggacaaagttctccattcgctatagccagtcacattcaccttattggcggagaaaatgtattaccaaaaacatatgaatatgataagaaatttggggattatgataatttttatctaagtggtggttcttttagtgatgattatctgatttcaacaaaaaataaaaaatggtggagcacgattttgcaatattttcactaa

SEQ ID NO: 314297 - DNA, 390 bp, Proteus mirabilis
  misc_feature (357)..(366): n is a, c, g, or t
gtggatattgctaaaagcgataaatatcctgaaaaatgggtctttggcgatgtcactaagccagaatctttactagaaccattaaaaggctctgatgtaattatcaatttagcagcacaacataaagataatgttcatcctattagcttatattatgaagttaacgtagatggtgctaaaaatgtttgtgatattgctgaacaattaaatattaaacatattgtatttacttcatctgttgctgtatatggttttgtcgaaaaagaaacaggtgaagatggtgagttccatccatttaacgattatggaaaatcaaaacttgaagctgaacataagtatgaagcttggtataaaaannnnnnnnnncagaccaaccgttgtatttggtga

SEQ ID NO: 314298 - DNA, 723 bp, Proteus mirabilis
gtgagtgatttgtataccgccgaaggcgtgatggacaaaaatagcctctgggagcgatatgtccctttggttcgccatgaagcattacgattacaggtcaagttacctgcgagtgttgaattggatgatcttttgcaagcaggggggattggcctactgaatgccgttgagcgttatgactcaatgcaaggtgccgcctttactacttatgctgtgcaacgtattcgaggctctatgttagatgagctacgaagtcgtgattgggcgccccgcagtgtgcgccgtaatgcaagagaagtgacacaatccattcatcagttagagcaggatctaggacgaccaccatcagaacaggaagttgctgatcatttgcagattgagttagcagaataccggcagatcctattggatacaaataacagccagttgttctcttatgacgaatggcatgaaatttacggtgaaagctgtgaaccgtctcaagacgaagatcacgatgacaatcctttacaaatgttattggaaagtgatattcgccaaagagtcatagacgcgatagaattgcttcccgaaagggaaaaaatggttcttaccctgtattatcaggaagaacttaatttgaaagaaataggcgcagtgcttaatgtcggggaatcccgcgtaagtcagctacacagccaagcaatcaaaaggctgcgagcacgcttaaacccagagaaatag

SEQ ID NO: 314299 - DNA, 678 bp, Proteus mirabilis
gtgacgagattagctcaagaaggaatgaacgttgttatcaactatcactctgatgaaaatgaagctcaagcattagccgatagcctaaataaacatggtaaaggtaaagcgattatttttggcggtgacattagtgatgaaaaaattgctcataactttatttataaggcgattgaccactttggtcagctcgatcttctgatcaataatgcgggaattgagacacaaaccccttcccatgcagtgaatttagaagattggcgtaaaattattgatataaatttaaccagttattttctaacggctcgctccgcattgaaatattctgttcatgaagtgatcccatggccgacttttgctagttacgctgccagtaaaggtggcgtgagaatgttaacgcaatcactagctcttgaatatgcacactatggtattcgtattaacgccattggcccaggtgctattaataccccaataaataaagaaaaaatgcaagatgatgcgttacgcaaagaattagaagagatgatcccaatgaaatatgccgcagagcctgaagcagtggctaatgttgctgcttggttagcatcggagcaatctacttatattactggacaaactattttcattgatggcggtatgacactttatccttcatttcaaggtggaaaaggttaa

SEQ ID NO: 314300 - DNA, 276 bp, Proteus mirabilis
gtgctttggataaaatggaagcaattcggcggcccatgtactatcaataatgggttggcattgtgtgcattacaccactctgcctttgatatgggcgcaatcagtattgatgataatatgaaattattagtttctagcggtatgaatggtaatcaaatggtagagcaattattttggcaattttcaaataaggtaattggcctacctaaaaacacaaaagaacatccgaaggatacatttatccattggcatcgtgagcaagtgtttaagctataa

SEQ ID NO: 314301 - DNA, 1485 bp, Proteus mirabilis
atgagtaacgttgcatatgctgattttggtaatcaacgacggcaagagaggcctaacgtggcagatcttgataatgggtattcaagggtagcaaacgagatactagaagccactatggcatcaggattaagtgaaactgaactctgtattattttagctgtgtggagaaaaacatacggctataacaaaaaaatggattggattagcaatgagcaacttgagtcgatgattcttaagcatagtactcattgctctacagcaaaaaatcagttgatcacaaagaaagtccttatacaacaaggaagaaaagtaggaattaacactaatctatctgagtgggaaactaaaaataacggattcagtaaaacattagctaaacctgctaagaaaacattagcagaaagcgctaaaccaactaagcggaaggtgctaaacacaaaagacaataatacaaaagacaaaagaaaagatcccaccatacctcccaagggaggaaatcgaggaggttctcttcgtgaagaattaatttcaatcctagaaggaaagtttgatttcgataaggcagacaagcttcatgattctgttgagcaaaaattagttgagctgggttatatctgcgaaagagaatttagagttagcgacagaggtgatggtaaagctggtcgagttgatcttctggtttccaatggtaagggcgattcttgtggcattgaaatcgatagattgaacgctagagataaatccattgtaaaactaaagcaactttctgatggtttcgttttggtgagagaagggatcgtgtctgagagatatgatttcgatggaataccagtggtaagtgctcatcctatgtcatcttcaagtgaaggaatttctcgtgaagagataatcagggaagcaagagaagctctagatttttataacaatattactggctctcagtgcagagactttaaaccattcatgaccctcttatctccaacccaaagcagagatagatatctgctaagtgatttaatcacagttattgagtgggtggtgtcaacatggaagcgacgtaataattcaatagcaaaaccaaccaatatctgccgagttaaccgcttcgatggctatctgtcagatgcgatcaagtggaaaaaccgagacggtatcaatcctgtcgattgtcctcatgaggaattaatcaaaatctggaacaaatacgttcctgaaagagccattgattttcatgagtggacatcacgcagacctgcttacaaagatttggaggctgtctggaatggcaaaactaacaaagggcaatggcgtgaagtaaaacacatggacacctgcttcaagctgatatcgcaatcaagtttattcactggcttacaagacaagggatggttaactcttgactggattttaacgccgacaagatggtcgcaaacctacgaacaagccaaacgagaatataccgaacggaaaaaagggattgtttaa

SEQ ID NO: 314302 - DNA, 576 bp, Proteus mirabilis
atggacttatcacgcacaatcatcccaaagtcagatcagattaactttgaagatgttcaaaccacaccgattaccgctgttattaaatccgttcgcgaaggaacgagagatcagcctgtttttatcgacttggtaggttatgacggcaggccatacaaaccatctaaatctatgcgaagggttcttattggtggatggggaaataacggccatgactgggttggaaaatctttaacaataattggagatccatccgttaagtttgggggcgtagctgttggcggtataaaagtttatgcaatgagtgatattgaatctgatttttcaatgatgctttctgtttcaagaggtaagcgatcagagcatagagttaaaaaacttgagattgaaaagccaaaaacaaacatggactaccttactagatttaatcaagaaattgactcaatggactcaaaaaaacttgatgattcatacgaatggttgaaaaagaaattcacaggcgatgcggatagtttagagaaactagaaacgctatacaaagccagaaaggaagatatggagaaagccagcagttaa

SEQ ID NO: 314303 - DNA, 693 bp, Proteus mirabilis
atggatagcaaagtatgcgaatggtgtgggtcattattcgaaagagcaaggaagcttagtgataaccaatggaatgatagaaaattttgctctaagaaatgttcagggtcaagactaagacttgatatcaatgaaatacaacttcaatacaaatcaggtttatcagccgctgaaatagcaaattcaataggatgtgcatctatcaccataatgagattacttaaatcgaataatgttgacgtaagaacacgaccagaaattggaaaactatcccactccaggcctgacgtgaaaatgaaattatctattgcggctatggggagaaaattacctgaggcagccaaagaaaaacttagagagcgagttggagataagaaccataattggggtggaggactaaccatatctaaaggcgggtatctggtgttcaccaatagctccgccaatggaataaatcgaaataaatatcttcatgtagttatctgcgaatacaaatatggaagaaagatgaaaaagggagaacatgttcatcatattgatgggaataagctaaataatcatccagataacttgttaatactgaccgcgtcagaacacgcgaaactacatgctaaggaaagaaataatgcaagacatgaatcaatgcaacttcacgggaagaatcgggagtttggagttgaaatatacacctaa

SEQ ID NO: 314304 - DNA, 360 bp, Proteus mirabilis
atgcaattttctctagccgttagtgattcaaagaaaggcgacaatggtcaatggactgaccaaacaacgtggatccgctgtaaagcatggaaaggaacggcagaattcatggataggaatacacagaaaggaactcaaattcgtatcactgccagagttgaagttgaagagtgggaagataagcaaacaggacaaaagagaacagctactatttttaatgttcgcgaagtacagccactacaaaacagaaaagatagcaataatcaggcaggaagccagaagcctcaacaacagcaatcacagcaagcgccacaaaacgaaccacctcaagattgggatgaccaagagatcccattctga

SEQ ID NO: 314305 - DNA, 168 bp, Proteus mirabilis
atggcttggtgcgatagcccatataaggacagagaattaacagaagagcaaaaggaagattgctcatactgcgcttattgcgatgtagaactactaaatgacgataaagtttttgtgggtggcgatactgtttattgctgcgagcaatgcttcatcgatagccaataa

SEQ ID NO: 314306 - DNA, 141 bp, Proteus mirabilis
atgaatacctttacataccataatcaaattatgaaattcacatttccagagccagaccctaagaatgtttgcaatctttgcggtggcaatgtcggcaaagacaatttaatccaaggtcagacggcaaatatttgtttttag

SEQ ID NO: 314307 - DNA, 162 bp, Proteus mirabilis
atgcaaaataattatgtgttacgcagtgtgcgttatatgttagatcttagcgatggtcatattgttgatataatgaaactggcggatttcacagcgactaaagagcaagtcaatcagtggttaaaaaaagacgatgatcctgcctttgttgacattttttaa

SEQ ID NO: 314308 - DNA, 180 bp, Proteus mirabilis
gtgtttgagcaagagccactgccaacctcttcaccacttttaaccatgaaaaatgttgtcgccttaccccatattggctctgcgactaaagagactcgctatgcaatggctgaatgtgccgttgacaatctgattgctgcattaaccgataatataaaagaaaactgtgttaacttttaa

SEQ ID NO: 314309 - DNA, 303 bp, Proteus mirabilis
atgaaaaatagtctttttatatctgcatttgctttaataattacttttactagttcgccgtctgttgccaaagaaaatagaaagttgtcagatgtcgctgaaatggtttgtgttaatcatgaggataaggcttcatgtgaagggtttgttaacacatcaataattcttgcatttgaacaaggtagagttagtggaatttgtgattcgatgacagagtatggtgaaaaaatacctgacgatcaaaaagataggtgtagcgaatctaaacaggcattgcaagatgtgcgtaatataaaattctaa

SEQ ID NO: 314310 - DNA, 339 bp, Proteus mirabilis
gtgaggaagatactaattttcactgcaattttgtttgcatacaccaacgcattagctggtgaatgtgttggtagtagtgcgtaccgagtatgcactgactctacaaagagttcaaacggggatgagactatccgatcttatgacaatcaaggaaactcttattcaataacgtcaggtagtagagataatccagatgggtcaacggaagtattttctgttgatagcgagggtaataaatactccattaaaagctggtgcgatagctcagggtgtcatactcaagatagtgaaggaaataaatgcaccatcacccaatcaggtgaaatgattgggtgttag

SEQ ID NO: 314311 - DNA, 828 bp, Proteus mirabilis; identical to SEQ ID NO: 313295

SEQ ID NO: 314312 - DNA, 636 bp, Proteus mirabilis
atgagttttagtcgtaatgaaatagatacaatgtcaggtactcgaaaaagaacctaccaattattggtgacaacggcattgcaactttttgaacaagggatgttacctaccgtatcagagcttgcagcacatgctggtgtttcaagggcaacggcgtatcgctattttcccactcaaagtgatttaattagtgctactgttgatgcaagtttagcaccgatcattgcatggcagcccactccagaagataatacacaacagcgtattactgcgttgctcaatcttgcttatccacaaatgtttaaacatgaaggggcgttgcgtggcgcattgcaggtttcattacagcagtgggctaaagagcgacaatcaagcgaatatacagaaaaacgatttattcgtggtcatcgtaaagagatcttacttaaagtcatcgaaccattaaaagcgcattatccgcaagaaatgtgggataaagtgataaaagctttctcacttatttatggttctgaagtttttttagtaatgaaagatatctggaaaatggatgatcagcaggtcattgatatgacccaatggatggctaaagctattttaaatcaggcaaagtcagattttccgatagataacgattaa

SEQ ID NO: 314313 - DNA, 633 bp, Proteus mirabilis
atgtcacacaaaactgcagaccaagagtggctggtagaacaactaaaatatattgcacagggcattggtaaaacattatcgcctttttgtgaagttgtacttcatgatctgaccgatagtgaaaataccattatggtgattgaaaataatctatcaggtcgaaaagtgggggatagagcaactgaactaggtatggcaaggattgaatcatctgattttccacaaattgttgcaaactatcctaatcagtttcctgatggtagaacagctaaaagtacatcgataggtattaaagataaacaaggcaattatgttgctgctttatgtttaaatattgatatatcgatgattaaaggtttacaaatggtattaaatcaattttcgactcttgaagagggaaatcatatcattgaaacttttagctcagtaacagaagattcgttgaaaaaacgtattgatgaattttctgcgacttattcagtgacaccaagagcattgaaaccgcatcaacgacgcgaattactattgtgtttacaggatgaaggttacctttcacttcgcaaagcgatggaaattactgcgcaatatctcggtgtttcaagagcaacagtgtataacgatttaaaagaatga

SEQ ID NO: 314314 - DNA, 900 bp, Proteus mirabilis
atgactcctgaagacgtttatattttatgccgaatttttcattttgtggcagtcatgttcatgttcggactgagctgttcggctgccattctcgctaaagaaaagtttgttcctcttattcaagtacgcttacgcccagcattggcgattagcactatcactgtatttgtttccacttatttatggatgatagtgcaatcaggcattatgggagatggctggcaagatgcttggtcgctaacgatatggcaagctgtattgggaacctcttttggccaaatttggcaatggcaattaattttatcctctctcgcattaatcgctctctttattcatcaacgtagcattagaaatattagtctgttacttatctcaacattgatgcttgtgctacatgcttttattggccatagtgccatgtttacaggtagtgaagccgtaatttataaactaaatcagagtatccatcttattagtggagcgtattggtttggtggtttatggccttttgttgtgtgcctacagtttttacgtaataaagatgaattagctgatggcatgatcaagcctattattgccaccatgaaacgcttctcattatttggtcacttcgctgttttattggttatagctagtgggattgtgagtgccattatgttactccccggttggcctgcaacaacacaactttcctcagagtaccaaagtatgttatggctaaaaatagcctttgttgccttgatgttaggattggcattagtgaataggtatgtattagtgcctcatatccgtaagaagaataactttcaatggttgcttattaatagttggtttgagttattacttggtagcatggttattttgacagtggccatttttgcgattaactcacctgtatag

SEQ ID NO: 314315 - DNA, 405 bp, Proteus mirabilis
gtgcaacgtgaagcattattagaccacgtacttatccaattagagcaacatgggcttgccgctacgttgcctgagttattgcagggatttgctattactgaatctgaactccaacctttttggcctgataaagacgcgttaatttttgattgtctacgccatcatggacagcaaattgatatttggcaacgtcaagtgatgttagatgaaacgctgaccacagagcaaaaattactagcacgttacgatcagctggctatgcgcttagaaaaaaatcgtttcccaggctgtttgtttgtcgcggcttgtagtgcttatcctgatgagcattcacaaatccatcagtttaagccagcgaaaccttttaaatttaaagggttagaaaatataccaatacaaaattaa

SEQ ID NO: 314316 - DNA, 129 bp, Proteus mirabilis
atgaaaaaattactttttccctctctcttagtattgtcaacggttagtggtactgtacaagcggcaaatcatgctgtagttgaagtttataaaaccgaaaattgtggttgctgtaatttgtgggcctga

SEQ ID NO: 314317 - DNA, 1194 bp, Proteus mirabilis
atgcatataagaaataattttgatagcgttacttcaataaaaaaatactatgaaaatataaaagagaaataccaaataaaaaataaaatcaatgatgtgttaaatacgctttcaagtctttatattgaaagggaaaagattactttactatctaaaatatcattttttataaagaatattttcaatattaatgttggggtggtttttctattagacaaaagtcaacatgctaaaattaatacattatccattttgatgagaaatggaggggaagtatattttaaaaactgtaagctaattaactcagattttgttagctttaagaataaacatttagagacattttttttaaatttaagttttgcaataaaaaatgattgtcatgatgatgttaaaagattaatacaatgtcatctttatgaacaatcaaaaacaaaaggagactttattactataatgaacattgctttcaatgtaattaatcattatccaaaagaaatgtttgaacaattgaagaaatatcacccaaagtgtgatgatatggtatattatagtgattttaactataaacaacatattgatatggcattaagttatgtttgtaaagagattaatagaaaagataataatgaattaattaattcaataatgaatttagttactataatgtataatatttattcggtggagatggataaagcgtttattgtcaatataactaaatgttttattgataaagcaatggaatataatacggtaaactatattaacgatgcttttaaaaagtcaatatcaaattttttgactaataaattaagaaataatgaagacgttcaaaagtttgtagatgatatgcttacattaggagtgttagaaaaaaaagatattattaaagctaaaaaaatgacaatggaagacgagagttttatcactaaacataatagaagaatgcaaaatatttttactaagaatgaaaatagtgatgaaatgaaatataccattgctaatattattagaaataatcatgagaatattttagaaaaaatagacaatgagtgtggtgatcttaaagataaatataaagatattttactggatattattgattacttaagggacgataaggattggaattttgattcattaataatcgattacacctattacattgataattatttacacctattttag

SEQ ID NO: 314318 - DNA, 327 bp, Proteus mirabilis
gtgacacctgaatataaccgctcaatccctggtgtgctaaaaaatgcgttagatcaagcctctcgcccttatggtactaatgcatgggatagtattcctgctggtatcatcggtgtttcaatcggtaatattagtactgctattgcacaacagcacctgcgtaattcattagcatttttaaatatgccaaccttaaatcaaccagaatgttttttaaaatggtatgatggaatggtagaaaacggtcagttttctgaaaaaacagcaggttttatgcaaaactgggttaatagctatattaactttgtaaagcataatcaaaaatag

SEQ ID NO: 314319 - DNA, 177 bp, Proteus mirabilis
atgagtcattttaacattggtgttgtagtcggaagcttaagaaaagattcctataataaacaaacagcgatatcggtactcttcctctctacaaccaagatgatgacgacaaaacacctgaagccgttgtcgagtttaagcaacaaattaagcaatgccaaggcattatcttcgtga

SEQ ID NO: 314320 - DNA, 654 bp, Proteus mirabilis
atgcctcctcgtgcgcccgctcggctggcatggaggccagttgcgcgtccagatgggccaacgccgcgcgccgccgctcgaccaactggcgcagcacggcaagctgcgctgcggcttgtgcgccgtccgctgcgtcgagcgcacggcacagccgcgccagggcatccaggccgatacccgcctcgaaggccgcgcgcacgaagcacagccgttgcaaggccgcatcgtcgaacacgccgtagccgcccgtggtgcaggccaccggccgtaacaagccgcgcaccaggtagtcgcgcacgatatgtacgctcaccccagcgttatgggccagttgcgataccgtgtaggcgctcatcgcacacctccttgtcctcacccggcgcagcaggaaagctgcttcacatccttgttgaaggtctgcgccgcgagcttcaacccttcgaccatcgtcaggtaggggaacaactggtcggccagttcctgcaccgtcatccggttgcgaatcgccagtgcggccgtctggatcagttcgcccgcttccggggccactgcctgcacgccgatcagtcgtccgctgccttcttcaaccaccagtttgatgaagccgcgcgtgtcgaagttggcgagcgcgcgcggcacgttgtccagcgttag

SEQ ID NO: 314321 - DNA, 180 bp, Proteus mirabilis; identical to SEQ ID NO: 314271

SEQ ID NO: 314322 - DNA, 135 bp, Proteus mirabilis
atggaactcatcttagaaggctgtttaagtcgcttaatggtcaatcgtcacgctgacgatatcacgacagcaaaactattagctcaagatattcttaaaatcgcccaatgtcgtaaaaatggtgcgctaagctga

SEQ ID NO: 314323 - DNA, 141 bp, Proteus mirabilis; identical to SEQ ID NO: 296516

SEQ ID NO: 314324 - DNA, 1674 bp, Proteus mirabilis
atgaccatgaatgaggcagatgcccgcccaacgaactttattcgtcaaattattgacgaagatctggctaccgggaaacataatagtgtccatacccgtttccctcctgaacctaatggctatcttcatattggccatgcaaaatcaatttgcttaaattttggtattgcacaagattatcaaggtaaatgtaatttacgttttgatgatacgaatccagtaaaagaagatgttgaatatatcaactcgattcaaaaagacgttcagtggttaggtttccaatgggatggtaacgttcattactcctctgactattttgatcaactgtatcaatatgcgattgagctgattaacaaaggcttggcttatgttgatgagttgagtgctgaagaaattcgtgaatatcgtggcacactcaaagagccaggaaaaaatagcccttatcgctctcgtagtgtagaagaaaacttagcgctatttgaaaaaatgcgtgcgggtggctttgaagaggggaaagcgtgcctacgtgcgaaaattgacatggcatcaccatttattgtcatgcgtgatcctgttctttaccggatcaaattcgctgaacaccatcaaacaggtaacaaatggtgcatttatccaatgtatgattttacccattgtatttctgatgcattggaaaatatcacacattctttatgtactttggaattccaagataaccgtcgtttatatgattgggtgttggataatatcactattccttgccaccctcgtcaatatgagttctcacgtcttaatcttgaatataccgtcatgtctaagcgcaagctaaatcagcttgtgacagaaaatattgttgatggttgggatgatccgcgtatgccgacgatttctggcttacgtcgtcgtggttatacggctgagtcaatccgcgaattctgtcaacgtattggtgtgaccaaacaagataacaacgtggaaatggcatcattagaagcttgtattcgtgatgatttaaacgaaaatgcacctcgtgcgatggctgttatcgatccggtacgtttagtgattgaaaatatgccagaaggtgaagagattttaactgcgccaaatcacccaaataaaccagaaatgggaactcgtgaagtaccatttagccgtgaaatttatattgatcgtgcagattttaaagaagaagccaatcgtcaatataaacgtctggtattaggtaaagaagtccgtctgcgtaatgcttatgtcattaaagcagaacgagttgaaaaagatgaacaaggtgaaataaccaccatttattgtacttacgatccacagacgttaaataaagatccggctgatggtcgtaaagtaaaaggggtgatccactgggtcagcattccacatgctattccagcagaaattcgtctttatgatcgtttatttagcgtacctaatcctggtgctgaagaggatttcttatcaaccattaaccctgaatcattagtgatccgtcaaggttttgtggaagcaagcttaaaagatgcggctattgaaaaagcgtatcaatttgagcgtgaaggttacttctgtgctgataagctttcgacagcggataaactggtctttaaccgtactgttggtttacgtgatacttgggcgaagatttcgaaacaaggttaa

SEQ ID NO: 314325 - DNA, 1386 bp, Proteus mirabilis
ttgtacgacgcacttcattcttcagaaaatcatgatattctctgctgggatacagatactaataatggaggttatactcacaaattcttccgttttgctaccagttcagatgagatccgtcaacaaagagatgccattgcagaatggtctcgctatagttacggttggatggggcgaactcctgattataaggcggcattttgttgtgcattaggtgcttacccagagttctacgggtcatttgcagataatgccaaaacgtggtacaaacatattcaagaatcttgcagctatttcagccacgctattgctaacccacctattgatcgccacaatcctacatctcatttcattaaaatagaaaaagagactgatgctggagttatcgttagtggagctaaaggcatggcaactaattcggctttagctcactataatttcattgttggaactgctcgtgacacagagaattctccagattttacgttcatgttcatagttcctatgaatgctgatggagcaaaactaatatctcgtacttcttatgagttagctgctagcgttaccagttctccttttgattctcccctttccagccgatttgacgaaaatgatgcaatcttgattatggataatgtttttattccatgggaaaacattttaatttatcgtgaagaaggtagttcccgcagttgggctgtacaaagtggctttgcacgcttgtttccgttacaagcttgtgtacgttttgctgttaaattagactttattacaggcttgttacaaaagagcttagagtgtactggagtagccgattttcgcggtgttcagtctgatcttggagaagttgtagcatggcgaaacttattttggtcattaacagatgctatgtgggcagaagctcagccatgggaaaatggtgcttatctaccgaattctcaagccagccaaacctatcatgttatggctcctatggcctataataaaattaagaagattattgaaactaatgttactagtggtttaatttatttaccctccagtgttcgtgatataaaaaataaagagcttaatccatatattgagaaatatgttcgtggttctaatggaattgaatatattgaacgtattaaaattttaaaattaatgtgggatgctatcggaagcgagtttggtgggcgccatgagttatatgagattaattatgcgggtagtaaggatagtgttcgcctgcagtgtcttcgtcatgcatatagttctggtaatatgatgaaaatggataacttggtagagcaatgtctctctgattataatatgagtggttggactaagcctcatcttcataataacaaagatattaattttctcgatcatttattgaagtaa

SEQ ID NO: 314326 - DNA, 159 bp, Proteus mirabilis; identical to SEQ ID NO: 306304

SEQ ID NO: 314327 - DNA, 582 bp, Proteus mirabilis; identical to SEQ ID NO: 311395

SEQ ID NO: 314328 - DNA, 642 bp, Proteus mirabilis; identical to SEQ ID NO: 311396

SEQ ID NO: 314329 - DNA, 1113 bp, Proteus mirabilis
atgagtgataaatcccccgagcagaccacccctgagattctgaaagaaaaagtttcaggtgtcttgtctacttttgaacacccgacattgaaacgtaatctgctttccctaaaagcattacatcagtgtgcgatgattgatgatgtccttcatatcgaattagtgatgccgtttgtgtggaaaaaacctttccaacaactgattgaagaaaaaacggcagagctgcgtaatatgacgggagccaaagctgttgagtggaagctaaaacacaatattgccacactacgtcgtgcaaacgatctaccaggtattaatggcgtacgtaatattctggcggtgagttcaggtaaaggcggggtgggtaaatccagtaccgcggtaaaccttgctttagcgctagcacaagaaggggctaaagttggtattctggatgcggatatttatggcccatccattcctaatatgttaggtacaaccatggaacgcccaacttcaccagatgggcaacatatggcacctattatggcgtatggtctagcatctaactctatcggttatttagtcacagacgataatgccatggtatggcgtggtccaatggcaagcaaagcgttgatgcaaatgctgcaagatacgttatggcctgatttagactaccttgtgatcgatatgccaccaggaacgggtgatattcaattgaccttatcacaaaatattccggtgactggcgccgttgttgttacaacaccacaagatattgcgctggtggatgcgatgaaaggcattgtcatgttcaaaaaagtcaatgtacccgtattaggtattattgagaatatgagtgcgcatatttgtagcaattgtggtcatcttgagcctatttttggtactggtggtgctgagaaattagccgaaaaatatcattgccaattattgggtcaaattccactgcatatctctttacgtgaagatttagatcgcggacaaccgacggtgatgcgtgatcctgaaggtgaattcgctgatatctatcgtgaaattgcttcaacagtttctgcgcaaatgtattgggatggggatgctattccaacggaaatttctttccgcgcggtataa

SEQ ID NO: 314330 - DNA, 2028 bp, Proteus mirabilis
atgtctcacgtcgcgaataaattattggtaacctgcgcgttaccttatgctaacggttcaattcatctcggtcatatccttgaacacattcaggctgatatctgggtccgttaccaacgaatgcgcggcaaagaagttcatttcatctgcgctgatgatgctcacggcacgcctattatgctgaaagctcaacaattgggtattaccccagaagccatgattgaagagatgagcaaagagcatcaacaggattttgccggttttaatatcagctacgataactatcactccacacacagtgaagaaaatcgtcaattatcgacgaaaatttatctagccctgaaaaaaaatggtcatattaaaagtaaaacgatttctcaactttatgatgaagaaaaaggcatgttcttgcctgatcgttttgttaaagggacttgccctaagtgtaaagcgcccgatcaatatggtgataactgtgaagtatgtgggtcaacttatagcccaacagaattaattaatcctcgctctgtggtatcgggctcaacgccggtaatgcgtgaaaccgaacactatttctttgatatcccagcctttagcaatatgttgcaagagtggatccgctccggtgcattgcaagagcaagtagccaataagatgcaagagtggtttgacagcggtctgcaacagtgggatatcacccgtgacgccccttatttcggttttgaaatccctgatgcgctgggtaaatatttctatgtttggttagacgcccctattggttatatgggctcattcttaaacctatgtgaaaaacgtggtgatttaagctttgatgagttctggaacaaagagagcaaaactgacttataccattttatcggtaaagatatcgtttatttccacagcttattctggccggcagtgttagaaggtagtgaataccgtaaaccaaccaacctatttgtgcatggctatgtcaccgtcaatggtgcgaagatgtcaaaatctcgcggtacctttattacggcacgtgcctatcttgatcactttgatgctgattgcctacgctattactatgcagcaaaactttcatcacgtattgatgatattgacctaaacttagaagactttgtacagcgtgtaaacagcgatatcgtcaacaaggtggttaacctcgcgtcccgtactgcgggttttatcagtaaacgctttgatggcaaattagcggcaagccttgatgatgcgaagttatatcaacatttcgtcgatatgcaagaaagcatcgcacaatgttttgaaaaccgtgaatttggtaaagccattcgtgaaattatggcattagcagacgaagctaaccgctatattgatgaaaaagcgccttgggtggttgctaaacaagaaggtaaagaggctgagttgcaagctatttgtactatgggaattaacttattccgtgtactgatgacttatttaaaaccaattctaccttctttaacagaacgttcagaagccttcttacaaactgaattaacttggaatgctctgtcgcaaccgctgttaaaccatgaaattactaaatttaaagcattgtttaatcgtattgaaatggataaagccaatgcaatggtagaagcttcaaaaagtaccattgcgccagtcaaagaaatcacgggtccattagcagacgcgcctattcaagaaaccattaaatttgatgattttgccaaaattgatatgcgcattgctgaaattaaacaggctgatttcgttgacggctcagataagttgctaaaattaatactggacttagggggagaaacacgccaagtattctccggcattcgttctgcataccctgatccgaaagtattagaaggtcgcttaactgttatggttgcaaacctagcacctcgcaaaatgcgttttggaatttcagaaggtatggtgatggccgcaggccctggtggtgaagatattttcttacttagcccagatagtggggctaaaccgggtcaccaagtgaaataa

SEQ ID NO: 314331 - DNA, 468 bp, Proteus mirabilis; identical to SEQ ID NO: 311399

SEQ ID NO: 314332 - DNA, 702 bp, Proteus mirabilis; identical to SEQ ID NO: 311400

SEQ ID NO: 314333 - DNA, 885 bp, Proteus mirabilis; identical to SEQ ID NO: 311401

SEQ ID NO: 314334 - DNA, 726 bp, Proteus mirabilis; identical to SEQ ID NO: 311403

SEQ ID NO: 314335 - DNA, 1152 bp, Proteus mirabilis
atggaacaaagttcacgtcaacgcatcgacgctttagatgcgttgagaggaatagcgatccttggcatcttattactcaatatctcaggttttgccttattaagagttgcctcatttaatcctatgcattcaggagaggcgacttttgcggacaaacttacttggatggggctaaatttatttacccaaggaaagtttctgtttatttttgcgctgttatttggcggaacactttatttattatcacaacgctctgttgcttggaacgtctctcgcctaattattctggcattaatcggtattattcataccctattactatgggaaggggatatcttatttccttatagtatttgcggattatttgttctcttttttattaaagcattacctattaagcggcaatttatccttgggctggtgctctatttatttggcgcgattattttagcttttttattttattactatcgtgattttgttgaaatagtttggtatagctctgactattccgccatgatagagactaattggaaaaccggaagctatataaatagtatctactggcgattagatgaactgagtgattttatttttaatttagttcgtcaatatagttggtttttaattggcgccatgttaatgggggcggcgttaatggcatccggttggttacaacgacgctattcacagtctcattatggtttgatagcggtttgttttttagtcataagtttacttttccaagggacgcttgttattaccgattattatttagattggcattatatgtggtctgcggtagtggctcagcctatcaccatggtgatccaaattattcaaagcttaggttatattgctttactctattgggcatggccttatattcaacacagttttatcgcctatgctttacgttgtgtggggaaaatggcgcttaccacctatttactacagagtattattggcacgacgcttttccagcggatggggttatttaaccaatttaccttattgcagcttatgctatttgtgatggctatttgggtgataaatatcatctttgccgtaacgtggttacgctatttttctcaaggaccaatcgagtggctgtggcgccactcgtcaacagggttagcaaaacgcttttaa

SEQ ID NO: 314336 - DNA, 663 bp, Proteus mirabilis; identical to SEQ ID NO: 311405

SEQ ID NO: 314337 - DNA, 1170 bp, Proteus mirabilis; identical to SEQ ID NO: 311406

SEQ ID NO: 314338 - DNA, 1242 bp, Proteus mirabilis
atgagtcaatgtcaggttagcggtttgttatcccttgatgaggcgctagaaaaattacttgaaaaaccggtggcaatcacagatacccttagtatccctttgcataaggcagcaggttatatcttaagtgagcacatcacttcaccactcaatgtacctcctttcgataattctgccatggatggttacggtgtacgttatacggatctaaacactcaatctcctttacctattgcaggcaaagcgtttgctggagtcccttttgaaggtgaattaccacaaggacaatgtgttcgtatcatgaccggagccatgatacccgcaggtgtcgataccgttattatgcaagaagaaacacaagtgactgacaacggtattctttttccacatccggccaaacttggacaaaatattcgtcgtattggtgaggatataaaacaaaatgatatcgtcttagccgcaggaacaaaactttctacagcacagttacctcttattgcttcactcggtattgccaatattaatgtttaccgcaaattaaaagtggccgtattttcaacaggtgatgagttgcaaactattggtcaaccattaaaagcggggcaaatctatgatactaaccgctttgccgtacgcttaatgttggaaaaattagattgtgatgtacttgatttaggcgttattccagattcgccagaaaaactgcgagaaacctttaaaaccgctgatgcacaagcggatttagtgattagcagtggcggagtttctgtgggtgaagcggactatactaaacaaattttagatgaaataggcgaaattggtttttggaaattagccattaagccgggtaaaccttttgcttttggtcgcttacataatgcttggttctgcggattaccgggtaatcctgtctcagcaacagtgacattctaccaattagtacagcctttaattgcccgtttatctggttttagtcagtggcgatcaccacagcgtttccatgctaaaacctgttcatcattaaaaaaatctgccggtcgtctggatttccaacgcggtatcgccagtattaatgaaaatggtgaatggcaagtaaccacatcgggacatcaaggctctcacgtatatagctcctttagtgtggcaaactgttttatcgtcttagagcgagagcgtggtaaagttgcagcgggtgaaaccgtcactattgagctatttaatcctctgctaaaaagcgaatag

SEQ ID NO: 314339 - DNA, 768 bp, Proteus mirabilis
atgagtatagaattaaccgatgaagaaacgctgcgttataatcgccaaattgtgttaagaggctttgattttgacggtcaagaagcactgaaaagtgcttctgtattgattgtcggtgttgggggattaggctgtagtgtatcgcaatatctcactgccgcaggtgttggcaaactgacactattagattttgataccgtttcactgtccaatcttcaacgccagatcctgcatcgcgatagcaccattggtcagccgaaagttttatcagctaaaacaacattaaacgcgattaatccccatgtacagatagatacggttgatgcactacttgaagataaagcactggctgaattaatcagccaacatcatctggtaatggattgcacagataatgtcactatccgcgaacaactaaatcgactgtgttttgtgcagaaaaaacccttagtatctggtgcagcaattcgtatggaaggccaaattagcgtctttacctatcaagatgatgaaccttgctatcgctgtttaagtcatctttttggtgataatgcactcacttgtgttgaagcgggtattatggcccctgttgtgggtactattggcactttacaggccattgaagccatcaaattactcactggttatggcgaaactttacatggcaaagtattaatatttgacgctatgcggatgcaattttgtgaatttaagctacctaaaaatccacactgtgatgtatgtgcggctaatttacccgataattga

SEQ ID NO: 314340 - DNA, 1440 bp, Proteus mirabilis
atgcctgaaggggtgccagctaacgaatcattaatggcttatttattagggaaaaaagacggtatagcgaaaaccccagaatgggcgacaaaaatcacacgagtcccagccaatactatccgtcaattagcacgtgaatatgcgatgacaaaacccgcggccttaattcaaggttgggggccacaacgtcatatttgtggtgaacgtaccgcccgtggttcaacgttattagcagcaattactgggaatgtgggtaaaaaaggcgcttgggcggctggatatggcggaattggtaaccgtcaatctattcgtggtcctaatattggcaaaaatccggtaactgcacaaatatccattatgaattggatgcaagctgttgaggatgcgagcaaagtgacgccagaagatggccttattggcgtcgataaacttgatagtaatatcaaaatgatcttttctttagcgggtaactatcttgtcaatcaaaaccctgatgttaatgcggcagctaagttacttgaagatgaatctaaagtagagtttatcgttgttagtgatctatatatgtctccgtcagccaaatacgcagacttagttttaccagaaacgagctttttagagcgttggaatatcggtaatacatggggaacgggcaactatttcttactgtcagaaaaagtcgttgaacctgcttttgaaagacgttctgattatgaatggatcagcgatgttgctgagaaaatgggagtcaaagaggcttttaccgaaggacgaacagaaaaagagtggatagcttatctcgttaatactaacaaagaacgctttaaagatagacctgatttcccaacttttgatgaattactcaagactcgccgctatcttttcaaagatgcaccttttgttgcatttgaagaaaatattcgtgatccagaaaatcatcctttcccaactccatcaggaaaaattgaaattttctctaaacgtctctatgacatgaataatgtcgatattcctgcattatctcattatgttcctgcaattgaaggtccagaagataaattgaccgagaaatatccactacaaatgttaacttggaaaggaaaaaatagagctaattcaacgcaatatactaacccttggttacaagaggtacaacgccaagaaatgtggataaaccctattgatgcacaaaatagaggcatcaaaaatggcgatatggtgcgtatctataacgacagagggatcacccaaatacccgctttagttaccgagcgaattattcctggtgtggttggtttacaggcgggggcttggtggtctcctgataaagacggtgttgatcatggtgggtgccctaacgttttgacatcaacacgtatgacaccattagcccatggtaattcacatttaaccgttttagttgaggtaaccaaagcatga

SEQ ID NO: 314341 - DNA, 288 bp, Proteus mirabilis
atgatcacttggttacttcttgctttatctttattgttattagggttccatcgcaaacttgcacttactactttagctataaccaccattagcgcatttataaccggtgttatcacttggtatgtacttccggttatattgagcttaattttactctcttatgcatatcgccattacaaaaccaatcgtcttattgccactattgttattcttgcatttatcgccattattgttgggttaacttttcattttattcctggttttaataacttttcctacattatttaa

SEQ ID NO: 314342 - DNA, 453 bp, Proteus mirabilis
atggtgacggagtcgctgggtaataatctttactcaaccataatggctggggttatcttactttgggaagatggctcatatcctgtggcaatggttatttttattgccagtattatggtacctagtttaaaaatggtggctatcggttggctatgttgggatgcacataaagctaaaggaaaacgtgatccggcgagaatgcactttctctatgaagtggttgaatatgtagggcgttggtcaatgattgacgtttttgttatcgctgttttagcttcattagtcagaatgggacgtctgatgagtatctatcccgattttggtgtagtgctatttgcattggttgttgtattaacgatgttctctgcaatgatgtttgatcctcggttaacatgggataaatgtactgccgatgatgataaacccatgattaaggagcctaagggtgactga

SEQ ID NO: 314343 - DNA, 1554 bp, Proteus mirabilis
atgtttaaaaacatcagtatagaaaaaaccgttaaagttatgctggctattttatttgtacttattatgagcattatttactttagttatgatgcttcaacacgctcttatcataactttgtttcatcaaataacttaagtcagcaaatgttgctgatgggaaaagcgcgttatcaaatggcggtgatcagagcgaatattaatggattggatgggcagttaagagtgaatgaaaaaccttctgctaaataccttcatcaaactcaagaatatataaaaatcacccgtgaagagatccaccgttgggcggatgctgaaaagttaaccatggaagggcgtcaggttgctgatgatatgacgaaacgctttgatgagcttttagatatatttaccgatgccttagctaaattacgtaaaggacaattgactacgcactctgctagtcaaaaaatggatgaactcaacgagatcaccatgacatattatgcagtcgccaatggtattgagaataattatattgatattgcgaaaacctcacaacagcgcattatgctaatggcgttagtcacagcgattattgtcattatgctctttatcattatcttacgttggttctcccatagctttatcggcaatattaaagtgcttattaatatttttagtaaaatgagccaaggcgatttaagtatgcgagtagaaaatcacggtaacaatgaatttggtaagctatttaatgaaatgaataaaatgaaagtttcattaagtcaaatgattgcttcggtaaaaaatgcagtaaacaccattagcgtcagtgcaagtgaaatagcaacaggtaatactgacctctcctcacgtactgaagagcaggctagtgcgctacaacaaactgttgcaagcatggagcaaatcaaaacgacggttgaaaaaaatgccgataactcacgccaagctagccagttggcattaagagcgacaacgtcagcacaaaacggcgaaaaggtgatggataatgttatcgaaaccatgtcatcgatttctgaaagtgcaaaaaagatctcagatattaatgacatcattaacagtattgccaatcaaaccaatattctctcattgaatgcagcggttgaagcggctagagcgggtgaacaaggtcgcggatttaccgttgttgcagccgaagtgcgtaacttagctagtcgtagtgcagaggcagccaaagagatcaatgaacttattacccattcggtaaataaagtacaggttggatcacaacaagtgagcgaagcagggcgctccatgtcggaaattgtgaccaccattagtcaagttaatgattttatgcaacagattgccttagcctctaatgaacaaagtatggggattaatcaaattgctatggccgtaagtgagatggataccgtgactcaacaaaatgcggcacttgtggaagagtctgccactattactgccaatatggatgacgaagctcatcagcttgccaacttagtctctcaatttaaagtggatgagaaagaaaatactaggcatgcataa

SEQ ID NO: 314344 - DNA, 336 bp, Proteus mirabilis
atgaagaaaaagattttaagctggcttgaatttattactattggcttagcaataaccttcgtctttcctgtacatgctacaactactgaaacaataatcagggcagtgtgtacctctgaaagtggtttaaatacaaaatattatcagcaaggtatagaagtatggggtggagatttcttttatgatggttcaccaatggaaaaatggctgagcgctcaagacaaaagatctggtggtttaggtgattatacttgctacatccagaaagtagcgacaccttatcctaaatctgtgatagatgctttaaaagcgtcaaaaaataactttaaaaattaa

SEQ ID NO: 314345 - DNA, 315 bp, Proteus mirabilis
gtgaaaaatgtgattatttctggttttcatgactctattggtatttatcaagccgttaccgataaacagcaaaaattagcggatgaatggctaacactaattggtttaactgcactcgctaaccatccttttcactcactttcatggggacaacagcgtctagtattaattgtaagagcattggttaaacacccgacattattgatcctcgatgaaccactacaaggattagatacaaccaatagactattagtacatcgactgatttttattaaagaaggagatatctatcgttaccaacaacaaccctgttaa

SEQ ID NO: 314346 - DNA, 150 bp, Proteus mirabilis
atgaagaacattgtagagcctacaggctgtttaagtttagctgcagctcgtcaatttggtgataagttaaaaggcaaaaaaattggcattattatcagtggtggcaatgtcgatattatgcaatatggtcattttttatcacaaaaataa

SEQ ID NO: 314347 - DNA, 195 bp, Proteus mirabilis
atggataaggtagttgcgttaggcgtgacatttacaggagatacatctaaaaatgatccagtattaataagcagaattaaatttggcaataaaccactgacttttaaattatcagatgtatcagtaaaccaattaatgcaatacggtatggttccattcttagtaactcctgaatatttcacactatataagtaa

SEQ ID NO: 314348 - DNA, 624 bp, Proteus mirabilis
atgttaaataaaaaaatagcgtcggtgatgctatcaacaattattgctgcttcttttgctacggctgctaatgcagatactcgtgttgcacaagcaaccgcgacttggcaagcaactgcaattaaagatacaaccagtatgttagttgtcactccattaaaaagtctgacttttaattatgctgaaggccaaaaatcatttaaccaacaaaatggtgcatttgatattgctattcaaggccaatctggcgcaaccgattttaaattatcatcaaaactgattgctaatacgttagcaagaacaactgatgattcaacattaacagttggtgttaaatggaatggggaagacctttctaaaacgactgatgtcgtgttaattgatacatcaaaagggttaacctcaggtttagataatttagctgctgatggtatttacaatggctctgagcgcgctacagatcgtggtgaattcacttttgtaattgccagtgcacaagcagcaggagcaacagccgattttaaatcactggctgatggtgtctgggatggtgatgtaaaagtgcaatttaccgccacttgggatggtgacttttctaccgttaaacctaatccagaaccttaa

SEQ ID NO: 314349 - DNA, 639 bp, Proteus mirabilis
atgctaaagcgtcctttgtctattcaacatcatgattttgcgggttttatgttgatggagtgcctctttgtgatgacgataagtagtattttattagtttgtattggacgtgcttatccttatattatcaatgagttaacttcttcttatcaacaatatcgtttagagatttatctaaaacagcgtttgcagttactggagacgcaattaaggcgagcagggtactgcaatggtgattgcactgttaaaaaagcttctttacctgcatcacttaaaataggtcattatccttatcaccctcatggctcttgtgttttgtttgtttacgatatgaacaataacggccgttgggagagtccagaagaacaagagagtgattactttggttttagattaaaaaacggtcagcttgaacaacgtcgtggtgtgcaaaattgtgattcaacaggttggcaacagatcttcgaaaaagaagaaattgaggtgacagaatttatcttaactccctatacacactattctccaataaaaaaacgtgcatttaactatctatcattatcattaaaattccaagcaaaacaaaatattaacctaaaagtacactatcaaacatcaatactattaaggaatatttcgtga

SEQ ID NO: 314350 - DNA, 1278 bp, Proteus mirabilis
atgagtaacggaatatcgaaaacagatttaaatcttattccagctggctataagcagacggaagttggggtaattcctgaggattgggatgtaattcaacttggtgattgcgcatcttatgttggatcggggaaaactaatactaaatccagaggtgagtaccccctatatggatctacaggattaatcggaagttgtgagttacctgaatattctggagaatcgttgcttgttgcgcgcgttggtgcaaatgcgggaagattgaattatgtttatggagagtatggagtttcggataacacgatattaatcaaaataaaaccaaccaataacattagtttttttaaatattggttgatacgaaaaaatctcaatactttagtttttggttcaggccaaccgctaataacgggaactcaacttaaagaattgtatttgcctcttccttcaaatacagaacaaaccgccatagccaatgcactatctgatgtcgatttactgattagtgaattagataaactgatcgccaaaaaacaagctatcaaaaccgccactatgcaacaactcctcacaggccgtactcgtctgccacaattcgcactacgtgaagatggttcgaaaaaaggtaataaacaaagtgagttgggtgaaattcctgaggattgggaggttgttaatataggtgaactagggcaagtagatcctgaaaacctaggggctacaacttcacctgattacgagtttaactatatttctctagagcaaatagaaaaaggtgttattaagaatacaacaagatctatttttaaaaatgctccatctagggctaggcgagtgctaaaaaaaggggatattttagtttcaactgtcagaccaaatttaatgtctcactattttattcagaatgaggttaatgacttaatttgttctacagggtttagtgtaataagattttttgaagaaaaactttctcctggatatttgtatcaacacctattctcgtcagtgatcaataatcaaattgagatgttgatttctggatcaaattatccagccataaatagtggtaatgtcaagcaactaaaagttcagattggtagtgttaaagaacaaaccgccatcgccactatcctttccgatatggataaagaaattcaagtgctggaacaacgccttaataaaactcgcaaaattaaacaaggcatgatgcaagagttactaacagggaagacgagattggtacagccttctcctacggatgtttgccatgtagattaa

SEQ ID NO: 314351 - DNA, 174 bp, Proteus mirabilis
atgaatattactgaatttgtagctaacaggttaaaaaattcaacagagagtgagttaaaagagattattactaatgggataaaactaaatgactgcgatatgttggaagttcttgaaaatgagtttatatctcaagcaaaagaaaaattaagtaatgctaaaaatctaaattaa

SEQ ID NO: 314352 - DNA, 495 bp, Proteus mirabilis
atgaacacatctgacataatcaccattattgggatcattattgggcttgtgggtgtatatccatattttatttctagaaaaaaaaataacgctgaacagattgaaaagatagctaaattactagttaatcgtaattggaataacttaggtctaaatatctatccatatccagctattgaaatttatgtatctaattctaatcacactggttttatagaaggaacaattacaaactgtaattgtttgtctatagatagtgtaaataattttttatttgaagggaaaatcaatcacaaaggtattgcctttatcaacatacaaatagatattggcactggcgggagaaaatataatgtgggttacgcaaaaattaaatataaaattgatgatgactcattaaactattattacatctctgatcacagagataatccgatattatcacataatcaagctttacctcgttttaacacatttggcttaactggttgttaa

SEQ ID NO: 314353 - DNA, 294 bp, Proteus mirabilis
atgattgatggttggcgggtaataaagttagagcctgaaaaacaactgactttactcttcggtatgaaagcccccggtttaggacgcctctcttttactattcacgatagtggtaacctacgctcattagatgtccgtgcttggtggcatcctgctggttttagtggtttactctattggtttgccatgatgccagcccatttatttatttttaaaggtatggctcaaaccatctcaacttgcgcctatagattggataaaaatgcacctaaaaagcccgagcaatcgtcctaa

SEQ ID NO: 314354 - DNA, 1020 bp, Proteus mirabilis
gtgtctgaaaacaaaactccacttgattatttcaaaagtttatcattaccatacaaggatacacatgatttaatctattataacggcccaattaattggaatggttatgaaaaaataacagaggtttgcaggaaaacaaaaaatggaaaaggtgttatcctaattctaatgacatatggaggtgaccctaatgctgcatatagaattgcaagagctctaagacataattatggcaaattaactataataataccaagtgactgtaagagcgcagggacattaataacaatagctgctactaatttggttataggtgactgtggtgagctaggtccgctagatgttcagttaagaaaacaagatgagatgtttgaaaatagctcagccttagattactatcaagccttggctgggctgcaaaattttgctaaatctgcatttaaagactatattgtagatattaaatcgaactttggtgttacagctaagatggccgctgagtattcatctgcattgactactggtctattttcaaagatctatgcacaactagatcctataaaattaggtgaagtccaaagagcggtgcagatagctgaatcttacggagaaagattaaattcttatgataatattttacagactaatgcaatgagagagcttgttgctggatatccttctcatgcatttgtaattgatagaaaggaagcttcaaaactatttaagaatgtttctgcgccacgagatgagaatgaagaaaaaattgtaacattcataaattctcaattcaaaacaaggttgcgtagttgtacggtgtttaatatatccgctataagagaattaacagaaagaaaaaatgaagagtctacttctaaagaaatcaaggagccaaaagatgacaaaccgtctggagaaccaaaaaaatctaaatctagagctagaaaaagagtatcaacaaacggttcaggaaatgttcgttccagagatggagaagagacaaatgttcaaccaaacgattga

SEQ ID NO: 314355 - DNA, 954 bp, Proteus mirabilis
atgtccgctcgtcgttcaattggctcattagcaaaaccggcaacttatttaaccgcattaagtgagcctgagcgttttcgtttaaatacctggttggcggatgaacctatttcagtgcctattccgggaggaaaaccatggcaaccacgtaactacgatcgtggttataaagggcgattaatgttggtggatgctcttgctacatcacgtaatgtaccaacggttaatcttggtttagaagtcgggttagaccaagtgatcaaaacgtggatcaaactaggtgcccctgcagaaaatttagaaaaagtaccagcgatgttacttggcgcactaaacttaactccaatggaagtggcgcaaactttccaaacaatcggaagtttaggtaatcgcgctaaattatcggcattgcgctccgttatcaaccaagatggtacggtgctttatcaaagctacccgcaagcagaaacaacggtttctccacaagcagcatatatgacactgtttggtatgcaacaggtggttaattcaggtacagcagcacgagcattaaaacctaaatttggtcaatataaccttgcaggtaaaaccggaaccaccaacgacttacgtgatagctggtttgcgggtattgatggtaaagaagtcactattgcatggatgggacgtgataataatggcccaactaacttaacaggatcgacaggggcattgatcctttatcgtcattatttagaaaatcaaacaccattaacattaaatccacctgtaccagaagatatagcacagatgtcgattaatgctgaaggtaactttgtttgttatggtggcggcgtgcgtacattacctgtgtggacagcagatcctgatagcctctgtacaccgttaccacaagagagcgacggcgacgatagtgcggcgcctaaatggttacgcgatctgttttctgagtaa

SEQ ID NO: 314356 - DNA, 264 bp, Proteus mirabilis
atgacaattgaacaacaaaaagagatgcagtggttactctctgatccagatacggtccgttttcgtgatgagcaattgcttgcagaaactgaatttcgttatcatcaacatgagtttggtcaattgctttatgtgatctctggagtaatggatttagaagctggcgggcagcgttttttagcgccacctgaatttagtgtatggatccctgaaaaagtagggcacgcaagttacaataaaaaaccttatcttttaaggtgctag

SEQ ID NO: 314357 - DNA, 855 bp, Proteus mirabilis
ttgcatcatgttgaattaactcaaaatagtgcaccaattattaaagcgtatgcccaattatcccgccacgaagagttattatcgctggtggctgataaaagcaaacttcagcaatatgcgcaaacctacccaattaatgaaatggtacgtcaatatagtgcgcaacctaatgctcaagagtttattgatatattgcgcccattaactccacgtctttactccatcgcttcatcacaacaagaagttgatgatgaagttcatcttaccttaggtgttgttcgttataacgtcgatcagcgtgcttatacaggaggtgcctcagggttcttagctgatcaacttcaagaaggcgatacagtaaacgtttttattgaacgtaatgatcattttcgtttacctgaagataatcaagtccctgtgattatgattggcccggggacggggattgcgccttttagagggtttatgcaacaacgtgaaagtgaaggtgcgacggggaaaaactggctcttttttggcaatcctcactttgtagaagatttcctttatcaagtggaatggcaacgttatgtcaaaagcgggttgttaacacgtattgatttagcatggtcgcgtgatcaagccgataaaatttatgtgcaagataaattacgggagcaaggtcaggaaatttggcaatggttacagcaaggtgcttatctctacgtttgtggtgatgcatcaagaatggctaaagatgttgaacaaacattgttagaaatagtaatgacccatggcaataaaaatattgaacaagcagatgattatttaagtgagctacgtttagcacgtcgttatcagagggatgtttattaa

SEQ ID NO: 314358 - DNA, 396 bp, Proteus mirabilis
atgctactcgggtttattccactgattttattacgctggcgaatgaatattctcagcctttctgatgaagaagcgcgctccttaggccttaatgtagaaattaccagacttatctttattttatcggccacattaatcaccgcgagtgcagtttctattgcgggcattattggctggttaggtttaattgttccgcatatcgcaagattgttagttggtgctaacttcggatatcaactgcctatttccttacttgtgggcgcaacaatgttattaataacggatacactagcacgaactattgcgaatattgagttgcctttaggcattttaacctcagctattggtgcgcctttctttctgatgttattactcaaaacaaggcgggatagatga

SEQ ID NO: 314359 - DNA, 219 bp, Proteus mirabilis; identical to SEQ ID NO: 312541

SEQ ID NO: 314360 - DNA, 642 bp, Proteus mirabilis
  misc_feature (470)..(479): n is a, c, g, or t
atgactgatgatattttactgaatcatgatgatgaagagcgcattacaaagaaaaattaccaactgccactaagaggaaacaacatcaatccaatgatagatgctgctacacctttattaggcatggtattgcgcatgaaagcgatgtctgaaaccccactttcagaaaagctgtaccaacaagttgtcatggatattacctctattgagcaacaattacagatccaaggttacgagccaggtgccattgtttcatttcgttatgtgctatgtacttttattgatgaaaccgcccttggattaggctgggatcaagataatggttgggtaaaacaatcattactggttcattttcataatgaatcatggggtggtgaaaaagtctttgtcttaattgaaagattattaggtgaacctaaacgttacctcgatctgattgaatttatctacctttgtttatgcctaggatnnnnnnnnnntgataaccaacaaagccgttatcgtttaggtaagcgtttaggggctcgctatattcttataggtacagcggtattcgcgttgattatttatagcatttattcatccagactgaattatcaaacactcagtattgtggaacaacttaatactttacttggctag

SEQ ID NO: 314361 - DNA, 1950 bp, Proteus mirabilis
  misc_feature (1928)..(1937): n is a, c, g, or t
atgtggcattctagtcatatcaatgaacctcagaacaatgatgaacagattatggtccagatagcagaaaacccctttatccttgtagatggctcttcatacctttatcgtgcctatcatgcttttcctccgctaactaatagcaaaggagaacccacaggggcgatgtatggtgtgttaaacatgctacgcagcctaataattcagtataagcctagtcatgtggcggttgtgtttgatgctaaaggcaaaacattccgtgatgagttgtatgaggaatataaatctaatcgcccaccaatgccagatgatctgcgtgagcagattgagcctttgcatgaaatggttcaagctatgggtttaccgttactttctattactggcgttgaagctgatgatgtgattggcacattggcattaaaagcagccagtgatggtcgtaatgtgttaatcagtaccggtgataaagatatggcacagctagttacgcccaatatcacacttatcaacacgatgacgaatgttattttaggccccgatgaagttaaagaaaaatatggggtgccaccggagttgattatcgactttctcgccctgatgggtgactcatcagataatattcccggtgttccgggggtgggtgaaaaaacagcattagggctattgcaaggacttggtagcttagaggatatttatcaacagcttgataaaatagccacattgagtttccgaggtgcgaaaacacttggcgctaaaatggttgaacatgagaaagttgccaaactttcttatcaattagcgacaattaaaacagatgtagcgcttgataaaacctttgatgacttagtggttaatgaacctaatttagataagttacttgaaatgtttacgcgttatgaatttaaacgctggataagtgacttacaaaatggtggttggttagctcaacgcagtagccgtaaagcgccagtcccctatagtgcagaagtcgcaacaccaaaagaacagccgcccgcagacaatttcccggttatctctcaagagaactatgagtctatattgactcatgaaagcttaatgcgctgggttgaggtactgaaaaaagcgcccgcctttgcttttgatactgaaacagatagcttgaataatattgatgcacgtttaatcggtctgtcatttgcggtagagccaggcaaggccgcttatattccattgcgtcatgattatctagatgcaccagagcaattacctgttgatgaggtactaactgctttaaaaccgattttagaagataaaaccatcttaaaaattgggcaaaacctgaaattcgaccgcggcattatggaaaatgaaggcatcgaattaaacggtatttattttgataccatgttggagtcttatgtcttaaatagtgtgagtagccgccatgatatggataccttagcggaaaagcatttaaatcataaaacgacgacatttgaagagattgctggtaaaggtaaggggcaacttacctttaatcagattgaggttgaacaagcgaccttatatgcagcggaagatgctgatattaccttgttactgcatcaagcgctttatcctcaaatagaggcgattgcaccgctaaaacacgtttatcacgatattgagatgccattagtccctgtgctttcacgcatggagcgtaagggcgtattgattgatgcacaagtgcttgccatgcaatcccaagaaatcactcaacgtttagctgagattgaaaaagagacattcgcgttagcagggcaagaatttaatctctcttcacctaagcaattacaagagattttatttgaaaaactcaatcttcctattatcaagaaaacaccaaaaggtgctccttcaacaaatgaagaagtgttagaagcgttagcgcatcgtcataagtnnnnnnnnnncgttagcgcatag

SEQ ID NO: 314362 - DNA, 312 bp, Proteus mirabilis; identical to SEQ ID NO: 49033

SEQ ID NO: 314363 - DNA, 831 bp, Proteus mirabilis; identical to SEQ ID NO: 36219

SEQ ID NO: 314364 - DNA, 390 bp, Proteus mirabilis; identical to SEQ ID NO: 28364

SEQ ID NO: 314365 - DNA, 273 bp, Proteus mirabilis; identical to SEQ ID NO: 36220

SEQ ID NO: 314366 - DNA, 429 bp, Proteus mirabilis; identical to SEQ ID NO: 36221

SEQ ID NO: 314367 - DNA, 1278 bp, Proteus mirabilis; identical to SEQ ID NO: 52758

SEQ ID NO: 314368 - DNA, 327 bp, Proteus mirabilis; identical to SEQ ID NO: 52759

SEQ ID NO: 314369 - DNA, 675 bp, Proteus mirabilis; identical to SEQ ID NO: 52760

SEQ ID NO: 314370 - DNA, 249 bp, Proteus mirabilis; identical to SEQ ID NO: 36223

SEQ ID NO: 314371 - DNA, 1200 bp, Proteus mirabilis; identical to SEQ ID NO: 36224

SEQ ID NO: 314372 - DNA, 867 bp, Proteus mirabilis; identical to SEQ ID NO: 36225

SEQ ID NO: 314373 - DNA, 279 bp, Proteus mirabilis
atgatcggtgacccaactggcgcattaactcgtaactttgaaaatatgcgtgaagcggaaggtctggcagatcgtggtactttcgttgttgacccacaaggtatcatccaagcaatcgaaattactgctgaaggtattggccgtgatgcagctgacctgttacgtaaagtaaaagcagctcaatatgttgctagccacccaggtgaagtttgcccagcaaaatggaaagaaggtgatgcaactttagctccatcactggatttagttggcaaaatctaa

SEQ ID NO: 314374 - DNA, 744 bp, Proteus mirabilis
atgactggagaagtgaatgagaaatatttaacaccgcaagagcgcaaagcgcgtcagatggtgaaggcggtaaacgaagcgagcccacgaaacttaccggccgacgcggtggtatgcccatgtgaaaatgaacatcgccctgtttatccggtgcgttatgcatataccaacttttattgtgatttacatttttctacaattgaacaagcaccaaataaaacgttagaagcgagtattcctccttctattaatcaattattgaatgcgaaagatgttactgctagtaaaggattttctgcaagattattaagacaaggttgggtttatgtttttgaagaaggcaattaccctactagaagtaattctagtaataaaagttatcaagaacaaaatgttgatgcgacaaaaggacgcctattagtttttcaacatcaagttacaaccagtgatggcaatgaaaatttcattccatatatatttaagcaattaaaaaatgggggtgtcactttaaagaaaaacggaaatagtaatccttatttagctataccgaaagatgtgaaggaagcgactatcttattcagcgaaagtaaattatctgattacacacttaaaaaaatcatttcatcttctaagtttagatcgaaattaatgcaaaaaatcaattttattgattacaacaataacgattattgtattgagctaaataaagataatttaaatcgacttgttgaggattataaataa

SEQ ID NO: 314375 - DNA, 234 bp, Proteus mirabilis
atgacacatcaggaaggaaatatactgacggtgagtgctgtaacacctgatttaaatatgactcgccaaaaagcggcaacccccgtcaccattaatgtgacagtgaaagggaaatggcaacccacagctcaagacagtgaggtaaaatataacgtttctggggataataccgaacttattttcaccagttactttggcattccacaagaaattaaactctctcctctctcttga

SEQ ID NO: 314376 - DNA, 615 bp, Proteus mirabilis
atgcatgacaatgcggtttctcgacttcgtcaatatcgagtttctatctctacacgcccatataaagccagaggctttcgtgttaaacgatgcactttttgtttattacctgaaaaacagtgtctgtgtgacaccatcattcatcaaaccgcgaaaagccgtttttgtttaatgatgtacgatacagaagtgatgaaaccaagtaatacaggaaaattaattgccgatgttttacccgatacacttgcctttttatggtcacgtaccgagcctgaaaaagccttacttgatgcaattaatgatccgcatcgacaagcttatgtcgtcttcccagacagctatgcttctccttcgcgaaaagtttatcaccagttacctgcaaacagtaagccaccgctatttatcttactagacggcacttggacagaggcgagaaaaatgtttcgtaaaagcccctaccttgatgcattaccactgttttcaattaatgaagccagtaaatgtgactacatgctccgtcaagcagcaagagaagagcaacattgtatttttagttactttcgtcaacaatatttaattggaaaaccagacagacgtcaggcaaaagaagagtaa

SEQ ID NO: 314377 - DNA, 141 bp, Proteus mirabilis
atgacatttgccgcgatcactatgaatgtcgatgcggcttttgtgatgtcgaatcatatattgcgcatgttgatcattcaaagtattccttctattgccttgttttacagtgaacgaaagcagaaaagaaaacgtgagtaa

SEQ ID NO: 314378 - DNA, 759 bp, Proteus mirabilis
atgttagggggattactgggtgagatcagcgcccatacgccatttatctttgcggctatttctcattcgttattatttatattttcattactttgtttccaagaaactcaaaccacaaaaatatcgactgaaatatccgtattaaatcaggatacagcgcctcactctgccactggttttattaaaaagagtctctgtttttggcttattgcctattttattattcaactaatagggcaaattccggccaccatttgggtgctattcacacaagtgcgtttcgcttggcacactactgaagtaggtttatctcttgcatttcttggcgtattacatattttttttcaagcggttctcgcaggaaaactggcgcaaaaatggggagaacgcaacacggttatcattagcatgtcaattgatgcatttggttgcttattattagcctggataagccatgtttgggttatgctccccgctttaatctgtttagctgcgggaggaatgggacaacctgctttacaaggatatttatcaaaatctgttgatcatcatgttcaaggacaattacaaggaacgttagtcagtctaacgaatataactgggattgtcggcccgttactcttctcttttatttatagttacagcgttgaatattgggatggcttattgtggtttattggtgcaatgctttacagtgggttacttgtagccagttattttaaacagaaatcaccaatattaaaaaaatttccctcataa

SEQ ID NO: 314379 - DNA, 534 bp, Proteus mirabilis; identical to SEQ ID NO: 104952

SEQ ID NO: 314380 - DNA, 276 bp, Proteus mirabilis
  misc_feature (20)..(29): n is a, c, g, or t
atgagagcaatttccctatnnnnnnnnnntttttgggggaaaggacttattcctgaagcagtgaaagcgcttatttgtcatagctttgagactctacaattagataatctatggtgtggttattttgcagacaatgtaaactcgaagcgagtacaagaaaagtgtggatttaaatatcatcacataattaaagatcagtatgtggagtatttagacgaaataagaacagaagttatttgtcgtttaaccaaaagtgaatggcaaaaacaacaataa

SEQ ID NO: 314381 - DNA, 210 bp, Proteus mirabilis
atggcagaagaggagagtctggtaggtttgggattttatttttccaatattgatatgctgattctttgttttcatactgttttttatcttgtaaataatggtaaaagtcatagtgctcatctaactgaggcagtatttctccgctcaataataaacatatcaatattagtacataaacgatatctgttgttaggtagcgatatcatgtga

SEQ ID NO: 314382 - DNA, 399 bp, Proteus mirabilis
ttgaataaacaaactcttggtggtgttgcttgccaaatttatcaagaatttgatggcacccctaaatttactccggaaagtctagagaaagcattagtattattatcaaaacgtcatcccatgttgaatatagtatttcaccaacagggtacacaattttggtctcctaacccaaatagaaaatatgttacatatcatgattttagtaaattaccaaaagatgagtatgagaaaaaacttttacaattacgggaaaaattaagccatcaggtactaaatgttgaaagcggtcagttaattgattttcacatgatatcgctacctaacaacagatatcgtttatgtactaatattgatatgtttattattgagcggagaaatactgcctcagttagatga

SEQ ID NO: 314383 - DNA, 354 bp, Proteus mirabilis
ttggaaattgataaaaatagaactagcgccaatctctaccattcaaaaatagaactatttactacattagcccctgttatagtggaagaagatgatcaatctatctattattcaccatcaatcacggaaggtgagaaaaaactatctaataaatcaaatggagaaatttattttaattataaagttgagcctaaactaaccacgactatctcaaaagatgaaaaagttatttttcctaatgggagtattaaagaaccgaccttttctatttatactggaagggttagttttaatgaaataatcgagaatagtgatgaaaaggcgtttgcttcttttgttcgatatattgattga

SEQ ID NO: 314384 - DNA, 699 bp, Proteus mirabilis
gtggtcgatgaccgcgaccggcaacctattggccgcccgtacctgaccctcgccatcgacgtgttcacccgctgcgtgctcggcatggtcgtcacgctggaagcgccgtctgccgtttcggttggcctgtgcctcgtgcatgtcgcctgcgacaagcgcccttggctggaaggactgaacgtggaaatggattggcagatgagcggcaagcccttgctgctctacctagacaacgcggccgagttcaagagcgaggccctgcgccggggttgcgagcagcatggcatccggctggactatcgcccgctgggacagccgcactatggcggcatcgtggaacggatcatcggcacggcgatgcagatgattcacgacgaactgccgggaacgaccttctccaaccctgaccagcgcggcgactacgattccgaaaacaaggccgccctgacgctgcgcgagctagagcgctggctcacattggcggtcggcacctaccacggttcggtgcacaacggcctgctccaaccgccggccgcgcgctgggccgaggccgtggcgcgtgtcggcgtaccggccgtcgtcacacgcgctacttcgttcctggtcgattttctgccgatcctccggcgcacgctgacccgcaccggctttgtcatcgaccacatccactactacgccgatgggcactgttgcaaatag

SEQ ID NO: 314385 - DNA, 585 bp, Proteus mirabilis
atgtattttttgatcaagttttatgtcagttgttcaattcattatttgaataacttttctttatatagccgtgagaagaaaaaatttaacatatcctatcttattgttaatgaggtttttttaagtttacttgttaattttcctattgtttttccgctccagaatagtgctactttctcgttagagcaaggttatcttaatattgagtttattgttgcattaatcattcttttatatagtgttctgtttgttatgctttttttatcgaaggcgagtaaaattaattacctaatggggatgattatctgttatagctttgaagaagattttgctgagataaaaaaaagaggcctgttttgccgtgtattatggtttctgattttgatccctttaggtacattgttactctgtttattattctatttgctgaatataaaagaaaatttctttttaatttattcggtgagtttatctttagttatttatctctattttattgagcggagaaataaactctatcaggaatttatattagcatttgatatgattttacgtttaaaagcactaaaaaattttaaggagtaa

SEQ ID NO: 314386 - DNA, 249 bp, Proteus mirabilis
ttggatgttagtcgccgaacaacgtcgttataccaacagtcagaaagcatcaaaacagagcctattgaagataatcaacaatggttagataaattaaaagatctcacccaagagatttattctgaacaagaaaattttaatcatcatcaacctaatatctttattgataatgattggctcatttctatagaacaaagctttttgcaattaaatgaaaaattatctcaattaagaagtcaaataaagtga

SEQ ID NO: 314387 - DNA, 243 bp, Proteus mirabilis
  misc_feature (227)..(236): n is a, c, g, or t
atgatgattttaaaggaaatgagagaagacttttactttgtgttacctgacaaaaaagatgcttatattgaagttaaggctgacaaggcgttgatagaaaaaatagaaagattaatgcaggattactgtttctttattgaggtagtggatcaaggtaaggtagtttttgggtcaatattaaattatttatatgagtattatttcaatgattataactatgatattcnnnnnnnnnnattttaa

SEQ ID NO: 314388 - DNA, 3633 bp, Proteus mirabilis
atgaatacgaacaacattaaaaaatacgcaccaaaagcgcgccgcgaatttatggatgcggttgctaaacgattaaacacctttggtatcaccgcgaataaaaaaggcgagctacaaattgcagaggcgaatctacaaggttctgtacttcaaatcgccggtaacagttttgacggtaaactggctgagccaagaaaacgcatagtggccagaagccagaagctggggtatgcacaacttattgaacaagtagcttatacctggttcaaccgtctgtgtgctattcgctatatggaaatccatgactatctaggtcacggttttcgtgttttgtcgcacccagacaactcccaaggcgctggcgcaacgaacaaagggcgctttgaaattatcaaccatgcgcaagatgctgcggatgaactcgggttagatagagctcgcattatcgaactcaagcttgcgggcaacaaagacgaagagctttatcgtgaattgttgttaggccagtgccataagctacatgaagctatgccttttttattcgacgctttggacgatgaaactgagcttcttctaccagacaacctaacacgtaccgactcaatactgcgtggattggtagacagcattcctgaagaggactggcaacaagtcgaagtgattggttggctttaccagttttacatttctgaaaagaaagatcaggtaatgggtaaggtggtcaagagtgaagacatccctgccgccacccagctatttacacccaactggattgtgaagtacctggtacaaaactcagtcggtcgtcaatggctgcaaacctacccagactctgccattaaaacgcagatggaatactacattgagcctgctgaacaatctgacgaagttaaccaacagctaaaggctattacgccagaatctattgaacctgaaaccatcaaagtacttgacccagcttgtggctcgggccacatactgattgaagcttacaacgtactaaaagccatctacgaagaacgaggtttccgctctcgtgacattccaaagatgattctggagaacaacctctacggcttggacatagatgatcgtgcagcgcagctatctggctttgcgctgatgatgatggctagagatgacgataagcgtatttttacccgtaatgtgcgactcaatgtactgtcattgcaggaaagtaaccatattgacctgccgaccttatggaaagcactcaatctatcgggaagttggcaaagcggcacgtcccagggcttgttcgctgacgaagggcaagatttaagctcgttcaacgcagacaaccgctaccaactgctgaagcgaacgttggcaagattcacccaagccaagacctttggttctttgattgatgtaccagccacagaacatgaacagctaaaagagctgctgagcacccttgtcgaactgcaagagtcaggcgactcaatgcaaaagcctgcggcgaagcagttaattgaatttgttcatcaggctttggttctgtccattcgttacgatgctatcattgcgaatcctccctatatgggagcccaatcaatgaacactgaattgaaaaagtttgcacagagtaaattccctctatcaaagtcggatatgttctccttatttatggaacgatcttttgatttgataaaaagtgaaggttcaaatgctcaagtaaatatgcattcatggatgtttatatcaagttatgaaggcttgcgtgagtcagttttaagcaaaaggacaataagatcgcttattcacttggggccaagagcattctctcaaatatctggtgaggtagttcaaacatgtgcgtggattatttccaatacaaatattccaggctacttgactaaattccatagattggttgatggagtggaggaaagtaagaggctttctcttcttgctagcgaaaatgtttacgaaaatataaagcaggatgagttttttagacttccaatgtcgcccatagcttactgggtgaatgaatcaacactttcgatgtttggccatcatacgataggagatgactttgaagtaaaagccggaattagcactggtaaaaatgatagctgtatattttactggtgggaggtttataaaagtaaaatcggagagtcaaagtccgatagctactatttacttcacaacaaaggtggcgagcttagaaagtggtacggaaacatcgactctattttaaagtatggacctaagaatatttctaggatggaaacatattcaggctttagacatgatggtaaagattactatggtagagaaatgatcgggtggagcaaaataagctctacaaggtcttcgtttagatactatccagtcggcatgagttttgattcagctggcttggcgctatttaaccaatctactgatagtttgctagatgttttagcttggctaaattcagatatttgtgccgatattattccaatgttaaacccaacgctgaatgtaacgcctaaaatcattaagtcactaccatttaaagaattaaaacccacttccagagtggttgttgatgagcttgttagaattcataaaaaagactgggattcgcatgagtgttcttttgatttcgaatttaatcaccttattcaacagaatggtttgaaggtttgtgacgcaacggagagattagttgaagttgcttcaagtttggttgataaggttttgaagcttgaggaagaaaataaccgaaatgtgcgggaatcatatctcggtgattattctaattacagcgaggatacttcacatgtaactttaaactgtaatatgagttataagtatggggatgtagaagattcaaagagtcgatatgtgtccgatattgttgtcgagctttttagctattcaattggctgtatgatggggaggttttcattagtcaaacctggttttatgctgggaaatgaaatctatgaactcaactctgaaaactatggtggttttattcctgatgaggatgccattattcctttgacagacaatgagtggtttaaagacgataccaccaaccgtttccgtgagtttgttcaagttgtttggggtgatgaacatctgcaagaaaacttggatttcgtcgccgaatctctatgcctaaacgccattaaaccgaaaaaatctgaatcagcgttggagacaattcgccgctatttatcgactcagttctataaagatcatctgaagacttacaaaaaacggcctatttattggctgtttagctcaggcaaacaaaaggcatttgagtgtttggtttacctgcaccgttataacgagggcacgctttcgcgtatgcgtaccgagtatgtcaccccgttactcggcaaatacgatgcttatgctgagcaacttgagaagcagattgaaacggctgactcgaccagtgaagcgaaccgcttcaagaaagagttggatgctttaatcaaaaaacaggttgagctacgagagtttgatgacaagctaaaacactacgccgatatgcgtatttcactggatctggatgatggcgtgaaagtgaattacggcaagtttggtgatctgttggctgatgttaaggccattaccggttcggccccggaggtaatataa

SEQ ID NO: 314389 - DNA, 1209 bp, Proteus mirabilis
atggctctgagtgatataaaaattaaaacggcaaagccgctagataagccctacaaactttctgattcaggtgggttatatctgatcgttaatcgcaatggttctaaatattggagaatgaagtaccgctttgcaggtaaagaaaaaatgctttctataggtgtttacccgcaagtgacattagcagaagcaagaaaccagcgtgatgatgcgaaaaaattgttagctcaaaataaagatcctagtgagcaaaagcaattagcacgattagaaaagcacttagcttctgaaagtacctttgaagcagtagctcgtgaatggcacgcttctaaagcggatcgctggtcactgcgttatcgtgatgaaattattgatacttttgaaaaggatatctttccttatatcggtaagcgtccgatagcagagattaagcccctcgaattacttgaagctctgcgtaagatggagaaacgcggagctttagagaagatgcgtaaagttcgtcagcgttgcggtgaggtctttcgctatgcaattattactggtcgagcggaatataacccagcccctgatctggcaacagcattaaccccaccgaagaaacaacatttcccattcttaaccgcagaagagttaccatatttcctgaaagatttagcaagttatacaggtagcgtgatcactaaaacagcgactaaaattattttgctaaccgcagtcagaacacaggagctacgttttgctcgttggcaggatattgatttagaaaaagggatttgggagatacctgctgaagtaatgaaaatgaagcgacctcatgttgtgccattatcaaaacaagtgatcgagctgtttaattcactcaaaccactgtcagggcattatgaacttgtctttataggccgtaatgaccacaggaagccaatcagtaaggaaagtgtaaaccaggttattgagttgcttggatataaaggtaggctgacaggacatggctttcgccacacgatgagcacgatattgcatgagaaaggatataactcggcatggattgaaactcagctcgcgcatatcgataagaacgcgatccgtggtacgtataaccatgctcagtatatgcatgggcgcagggaaatgatgcagtggtatgcggattatatggatgagttggaaaggagtttgagtaatgtgttgagtataaattttaaataa

SEQ ID NO: 314390 - DNA, 2460 bp, Proteus mirabilis
atgagcgaaaatcatatagaagaaattatcaataacattgaaaaacaagtaaataaactaaaaagtaatgatgctaatgaagctgaaacaaggcttaaaattattgatgatgtgatttttgggatattaggatggacaaaagatgatgttgaggttgagcaaagagtttcggaagatggtcatacaacttattgcgattatattattaaaactgtaagttcagccttaattattgaagcaaaaaaaattggagttgtcttcaatacaattgaacgtgattataaaatgaaactaaccaaatcagcagttagtggagacttaggggatgcaattatacaagctcgtgactattgtcgaaaacttagtgttccctttgctatcgtaacaaatgggctacaatggataatatttccagctaatagaatagatcaagtatcatttcattcttcctacgcaatagtttttaactccttaattcaatctttaaagaaagattttgatgagttttatggattactatctagagaatcagttattaattcaagcctagagcataatttacttggtgaaaacacagaccaaatagaagaaagacggttaaaaaatttagtaaagaaatcatatacaaaaacaataaacccaatgtatcctccaattgaggatgctatcacaactgcctttagccaagctattattcaattcgagtcaaatttatttgaaagatgctatgtcaacactccagagagaataaaattcgataaaaaaattaatatgtatttatccagaagccaacatttattttcgaatactcccgttcgcccactacgaaaaaaagaatccaatatatttaaacaatctctagttgatgcacatagaaagtcaaagccattgtcagtcatcatattaggtactgttggtgcaggaaaaacgacatttttacattacacaagaaatatatcagcagcagaactatttaaaaaagaaaaaaataaattaactccacattggattagtattgatttcttaaaacacacagatgataaaaaacctattaacttcatctatgaatcaatttttgaatatattataaatgatgaatacttaaatgattatactctttgtataaaaaatgcgtatgcagacgaaatttctgcaattaaaaaaggcccaggctttttaattgcaaaagaccaagatgctattaatatcagaatatccgataaactaatggctgattatgataataaaattccttacgtcaataaaatattgacatatgttactaaaaaaactgctgtattccttactgttgataatgtggatcagttatctgaagaaatacaatcaactatatttacagattgtatttctctgtcacaaaaaattaatcttaagctaataatgtcactaagaagttctacttatattgaacataggaactctccatcatttaatgcttttgaattcgatccaatattaatagagcctccacaaattgaatcagtattatcaaagcgatttaatttagctaaaagtattgtggaaggtacctcagctgattttgttgctgaaaatggtataaaagttcatgtagataacttagcagatattattaatttagttcaatcctctgtattagggactgaggtaggaagtttattagaagtattagctgctggtgatgtgcgaaacgcacttaaaatgactcgtcaatttattgagcatggatatacaaatccaggaaaagcaattaatacatatcaaatgtctggctcttatgtcctacctcgtcatgaagcttttagagcaattctcttaggaacacatagcgtgtattcagaagaatattcattagttggaaatccttttgacgctaggttaggaaaaaccgctctacaatcattacggttatttatattatctgcactagttcaatatagttcagaccctcaatttgaatatattgaaggagaaaaaatcaggtcatatctaagaaagataggagttggtgataaggaaagcctacaagtgctaagtgatctttgccaatgtagatttataaatacagcaacacctgatcaacccaattttgcatctagctttttcccaacgcgattaggcgggtatattattagagatttgatagcaaatttcacatttttagaatgcaccttgatggatactttcatcgctaaagattcaacatgggaaaacataaagaaatttgatagagaaattatcaattgctctactgacattgtaaaaagactagaatttagaaccagaaaaactatttgtttcttcgattacatggaatcactctatctttctttacatcaagaagctatcaggcgcaacctacccaaggagtggaaaagtaatccattcaaagaaattcgcaccttgctagaaagcaatctaaaaaaagctcttgaatctgctagaaaaaattatgaatag

SEQ ID NO: 314391 - DNA, 249 bp, Proteus mirabilis
atgcaagcgggggtgcctattgtgcctgtttgtgtctctaccacacaaggtaagataaaattaaatcgctggaataatggctacgtgattgttgaaatgttgcctcccattgatgtatcaaaatataacaaagatcaggtgagagaattagctgaagattgtcgtcagatcatgaaggctaaaattgaagagcttgataaagaagtggaagaaatgaataaacgcgattttgcaggtaagttaaattaa

SEQ ID NO: 314392 - DNA, 174 bp, Proteus mirabilis
gtgggtgagcacactgctatttttgcggatattggtgagcgagtagagattagccataaggcatcaagtcgaatgacctttgcaaatggtgcagttaagtcagctatttggttaagtgaaagaaagtctggtctttataatatgaaagatgtgctttctttagaagaattatga

SEQ ID NO: 314393 - DNA, 624 bp, Proteus mirabilis
atggcaaaattagataaagaacaggttattgataacgcattgattttattaaatgaagtcggtatggaagggttaacaacacgtaagttggcgcaaaaattaggggtagagcaaccgacactttattggcatgtaaagaataaacgtgcgttattagatgctttagctgagactattttacaaaagcatcatcatcatgttttgccattagcgaatgaaagttggcaggattttttgcgtaataacgcaaaaagttttcgtcaggcgctattaatgtatcgtgatggtggaaagatccatgcaggcacacgaccatcagccaatcaatttgagacatcagagcaacaattgcaatttttgtgcgatgctggctttacgttaacgcaagctgtttatgcattaagttccatcgcgcattttacacttggttcagtgcttgaaacccaagaacatcaagagagccaaaaagagcgagaaaaagtgccaaaaacagagataaattacccaccattattaacacaagctattgatattatggatagtgataatggtgaagctgcattcctttttgtgctcgatgtgatgatttcagggctagaaacagtgctaaataatcatcattaa

SEQ ID NO: 314394 - DNA, 555 bp, Proteus mirabilis
ttgggtattttacgtttacctacacgcaccgcagaaggtattcacgccttagtcaaattattagccccgtctacaaatgtagatattattccacacgatccacggcaaattatacttgataaaccaacgcaaatgtcgtgcaaaaatccaacaacgctagaaaataaacctgtattaggtgcttatgcatttgatgtaaatagccaagtgctaatacaacttcaaacagatgataaaaaagaatctaaaggctggttacctgatggcagtatttaccaagattttatggcattactccgcgtttatttaggttcaagagttaacgcacgattatgcttaagactacctagacatcttttagctgatgcaacattaagttcaaagcaaaaacaaggtgttcaattaggtcgtactgctgttatgcgccccttgtcatctaaagctaaaaacaatgcaactccttcctatatcaatattggattaggtttttatcaatacctagccccccgaactcaacattataaaagtgaagaatatggcaattataaattctaa

SEQ ID NO: 314395 - DNA, 378 bp, Proteus mirabilis
gtgcattgtccgacggggtgggttgatccgtttgggttggcgggtgattgttgtgatgagttactagttcttgctactaaccctagaagtaaaacagttcaagagatggctgaagatttagctaatcgaattaatagaaatacagtgacattttccacaccaacaagcatgggacatattgatttaagaggaagatctcactttgataaagtgacacaagctgatattccaacaccacatgttcaagtttcaccaattaacgttgctcctaatggaaatcgcttccctcttaaaaaactagaagcggcaaggccagccacaaaacaagatattagaacagcggaaaaactagcagaaagacaagggcttttaaaatga

SEQ ID NO: 314396 - DNA, 288 bp, Proteus mirabilis; identical to SEQ ID NO: 294278

SEQ ID NO: 314397 - DNA, 420 bp, Proteus mirabilis; identical to SEQ ID NO: 310605

SEQ ID NO: 314398 - DNA, 369 bp, Proteus mirabilis; identical to SEQ ID NO: 294279

SEQ ID NO: 314399 - DNA, 1440 bp, Proteus mirabilis
atgaacgggataattagctatgaagtagaggtaaaagatagtgatttacgtttggctcaatggagtacaaatcctaaaggaattttaattttacccaacaacaaagatgtttataccactatcgttgatgaccataaaacgaagatctctttaactggcaatcgtagtggagtggcttcattacagttgattctaagagatgaagataatgaagataatgcctattatgccccgccgttgcaaattcgagtgacacccgcgatccctaataccgattgctcagcggctaattgtgagaggtttgatgatttactgacaatcaactctgaatctatgcaatggccgagcaaatgggaagaggtatctaaaagctttgtggtacaccttcaaagtcaagaaggtgaagatatgcaaaacaaggaggtcacattagtttacgataaagacaacagcacactacttactcagcctgaaatttataattccgaaggtgagttaagcaatatttcaaaaaccaataaatatggtattgcaaactttaaagttagatttaaaggtaccgagccaaagcagattgctgttttttatgctgaatcagaaaacagtgaagatatagataacccactcaaatcaagaaactattatgttgaaatgacgacagagaagttgccgtctcctaaggttcctgcaacgctaaatggtattctaagctatcatagtgaaaattactgtgtaaatgcgaacctaattttaggtcgtgatattagtgaaagtacacaagtagggttctattttaatgatcaacttaaaatgttgccctgtactgataaatcagcggtatcggtcaggttagagaatcaagccttaacgaatggcgttcattatatctctttcttcactgtggatatttttaacaatatttgtttttcacgccgtgaacgtattattgtggataattccttaactggggaatgcggtaaacaaattaaaaatattgcaccgaagccttgtattagcgtcactattccgcaaatttgcgatcgttattttaattctgtcaatattcggcttgtgccttctttatgcttacaaattaaaaaccgtgttgcaaaattggatatccaaaaaatggttataatctttaatggatatactaaagtcaatagcagtgagcggacattggtttatcgttctacattagaaatttatgccgatgatcctcgtttaggtgatttcctgcaagatactacaccaagcaatgagccgataagtatgattgaaatatcagagcctgcattagaaagtattttggcggatgcattgccaaatatcgaagtgggacaattaggtattcaggtgatggtatttgagaaaaatggcaactgttacttatgtggtgaaaatatgtataccgtttctctacgcttaccttgtgcttaa

SEQ ID NO: 314400 - DNA, 267 bp, Proteus mirabilis
atgaaaaaaataattttattatctattgcggtatttatttcaggctgtgctgatagaaaacctataaattatcagacagtggagtgtgttggtttaattaaaattcaggctattgaaaaatatcagagttttaaattaagtcgctataataatgataataatatgtattttggatacggtaaagcaggtttatggcaaggcggttgggttagctctgatatgtttgacaaaatatattgcaaagataattcacctataaaaaaataa

SEQ ID NO: 314401 - DNA, 540 bp, Proteus mirabilis
ttgcaactgttcagtctgttcttgaaaaaaaacaatcccgttatcagtaaaattgattttgattgtggtctgttagaacaggttctcgatccagataatgtactcagttggggatactggattaaacatcattgtcactgcgtttatggcgaggacttaagccatcactttcaagctttcaaaccttcaaaagctattgcagtggccgtgaatggtgactttatggaggttttggacaaactagtcattcaaataaaagcatcttctaatgaaaataaaaagttacagcttcggcgctcggctgcacgaaagcttatcagagcaaccaacatccttcgtagtgaacaagataatgactggccggactctctccatgagtaccgcgccaaatttaattcacggtatcctgcattagcggaagatatggattacctattagaaattagtattaaacctcgagagagcatagcagactttgaaaaacgggctatggcatttgcccgctggcttagctgtgaatttaataaccaaaaagcctaa

SEQ ID NO: 314402 - DNA, 360 bp, Proteus mirabilis
atgtcttctgttcatgaagtgatcccatggccgacttttgctagttacgctgccagtaaaggtggcgtgagaatgttaacgcaatcactggctcttgaatatgcacactatggtattcgtattaacgccattggcccaggtgctattaataccccaataaataaagaaaaaatgcaagatgatgcgttacgtaaagaattagaagagatgatcccaatgaaatatgccgcagagcctgaagcagtggctaatgttgctgcttggttagcatcggagcaatctacttatattactggacaaactattttcattgatggcggtatgacactttatccctcatttcaaggtggaaaaggttaa

SEQ ID NO: 314403 - DNA, 390 bp, Proteus mirabilis
  misc_feature (358)..(367): n is a, c, g, or t
atgtatcacgatcttcaaggaaaagttgctgtagtaacaggttcgtcacgaggaattggtgcagcagtagtgacgagattagttcaagaaggaatgaacgttgttatcaactatcactctgatgaaaatgaagctcaagcattagccgatagcctaaatagacatggtaaaggtaaagcgattatttttggcggtgacattagtgatgaaaaaattgctcataactttatttataaggcgattgaccactttggtcagctcgatcttctgatcaataatgcgggaattgagacacaaaccccttcccatgcagtgaatttagaagattggcgtaaaattattgatataaatttaaccnnnnnnnnnnaagatcaaaggcaatattattaa

SEQ ID NO: 314404 - DNA, 399 bp, Proteus mirabilis
atgccaaaaatattatgcggttgtggtagaaaagcctgctttgagacttatttatctggtcgtggttttgaacgtatgtataaagcctttaatggttcaccacaaagagcggtagatatcgttgcacaatattatcaaggtgatgaacagacccaacagcatgttgaccgctatatgaaagtattagccatttaccttagtaatattctgactgtacttgacccacatttaattgtcattggtggcggtttatcgcaatttgacgcactgtataccctattacccgattatctctcacattgcgtatacggtaatacgcaaattccaacaatagaaaaagcacgttatggtgatgcgggtggagcaagaggagctgcctgcttaaatttattagactga

SEQ ID NO: 314405 - DNA, 228 bp, Proteus mirabilis
atgataaaggttattgcagaagattttattaaatcaggatcaatagaaacggtcttaccactttaccaagaattggtgaaagctagccaacaagaagcactttgtattagctatgatttatttgttgatgagaaagatcccggtcactttacgatgattaaacaatatacaaaagcagagtcaaaaatcactttagtcaatagtgtatttgataaaaatatagattaa

SEQ ID NO: 314406 - DNA, 321 bp, Proteus mirabilis
  misc_feature (301)..(310): n is a, c, g, or t
atggaactttctacattacttctttttatcccagcctgttttgctttaaaccttgcaccagggccaaacaacctgctttcaatcaataatgcagcctactatgggtttgctcgttcatgtgcaggaggtctcggtagattactcgcattcgtgattatgattgttctagcttcatttgggctagctgttgtattgcaaacatctgagttcattttcagtgtaattaaatttgctggggttgcttatcttttgtggctcgcatatcaattatggaaagccccaactgatgaatttaaatttnnnnnnnnnnaagaagaataa

SEQ ID NO: 314407 - DNA, 264 bp, Proteus mirabilis
atggcacaattggacgaattaagtcaacgcctagatcgttttgatggtgatcctaaaaaatatattacaggttcagaattaaaatctattatttttaaaacaaaacaacattttaaccaggctaagccattagaagaagagttacgattacttgaaaagaaatctatagaaaataccatttctgattatgactatcagcaagttgattatcatttcaaacagttattaaatcgatatgctttactaaaaagtcaatctaaataa

SEQ ID NO: 314408 - DNA, 171 bp, Proteus mirabilis
atgacggtcgttaatcatattacggtgacaggaaatggtgacgctgtacttgcgcaggcaatgaaggaagccgcacaacaagggacagaagcaggcgcacagaaagctcacgcgatgatgttacaagactttcaaagtaatggcgcagcacgcagaacattaggagtttaa

SEQ ID NO: 314409 - DNA, 927 bp, Proteus mirabilis
atgttgtgggcaatgggcgcattattaaccatgttttatctcatcaacatctttaatgatactaaatcagatatccgacaagaatatagtaataactataccgatttattgggcttctttcgccaaacctcgagtactatccgcgatttgcaatatttagcagagcggcatcaagagcaactcaatttaaaccctaagatgaataattcttttttttatgaagggcctttttcacttcataaattaagtgaaagtgccgattgtgaattattcaaagggcaaacaaacaattattttcgatcatttaatagtattctgtattactggaaagataatacccctgctttacaaggtatcaaccaagtatttatggttggctctcatagtatgtgtatgattaatttcccattgcgtgcatcacctattgatactgaactgttgaaaaaaatggtttatgaaaatacacgtaattacattaatcaacgagctcaagggaaagagagtaatcaatactggatagtacctgatgccaagggggatagcggtatcctctatgtcatgtcgccagtttatgcgtcagggaaatttattgcactcattggtatcgaaagggcgatccgattggagtatttttcacctacgaaagatcgcgttatctctattcatcttttaaacaataaaaataatccagtcttaagttatcctgaagagaataattatcgcagtgtaagggatgtaccggatgttagtgctccttactttggctttgatgatgattttagtgatttagttgcaaaacgtaagctacttccttcttcttttagtgtggtttattcactaccattaaaacgattgttatctttattttcgtttggatttttgagcgaaaaatattttcacctgcagaaaataatgcttcacgcttag

SEQ ID NO: 314410 - DNA, 627 bp, Proteus mirabilis; identical to SEQ ID NO: 307473

SEQ ID NO: 314411 - DNA, 1374 bp, Proteus mirabilis; identical to SEQ ID NO: 307474

SEQ ID NO: 314412 - DNA, 621 bp, Proteus mirabilis
atgtcaaaaccatcatttgattctattgaatcgcaggcaagttacggtattggtctgcaagtcggtcaacaactgactgaatcaggtctccaaggattagagccagcagcactgcttgccggcttgactgacgcgttagaaggcaatactccttctgtacctgttgaaacgttacacaatgctttacgtactatgcatgagcgtgctgaagcagttcgtcaagagcgtcaagcagcactggcagaagcaggtaaagtattcttagcagaaaatataaaaaaagaaggcgtgcaggttactgaatctggtttacagtacaaagtactgaaagcaggagatggcgctattccagctcgtactgatcatgttcgtgtgcattatactggtcgtttaatcgatggtacggtatttgatagctcagtacagcgtggtcagccagcagaattccctgttaatggtgtgattgcaggatggattgaagcattaactttgatgccagtaggttctaaatgggaattatatattccttaccaattagcttatggtgaacgtggtgcgggggcggctattcctccttttgcaacattagttttcgaagtagaactattagaaattttataa

SEQ ID NO: 314413 - DNA, 603 bp, Proteus mirabilis
atgaccattgctatggggttattagcacttttctgtgttgtattaggtgtgggtgcggcttttgttgcgccaattattgccaatattgcaatgtcacttagcgaaaccagtgcattaacagtgactcaaggtgcgatattaatccctgatagtgcatcacaagcgatgttctctcctgccttaacatttattttattaatcgccttaccactaattccattcttaatttatctcggcttaaaaggtggtcaacctgcatttcgccgtaaaggtaatccatgggcctgtggttatgtctgggaaaaagacatggcggtgtccgctgggggctttactcaagcactacgtagtatgtttgcaccactttatcgtatgcgtaaacagcttgatccatcaccttggctttcacgtggctttaataaaacacagcgcggtgctgaaaaggtcgaaccattctgggatgaaagcattatttatccattggttcgtggtatccaacgttttgctaaacgtatccaatgcctacaaggcggcgatttcagactctattgtctatacgtggtggcagcgctggtcatcttacttttagttatcgcagcgtaa

SEQ ID NO: 314414 - DNA, 504 bp, Proteus mirabilis
  misc_feature (480)..(489): n is a, c, g, or t
atgaaaaacatacgtaacttttccattatcgcacatattgaccacggtaaatcgacgctatcagatcgaattattcaaatttgtggtggcttaacagatcgtgaaatggctgcgcaggttcttgattctatggatcttgagcgtgagcgtggtatcaccatcaaagcacaaagcgtaacactcaattataccgctgatgacggtgaagtttatcagcttaactttatcgatacgccaggacacgttgacttctcttatgaagtttctcgctctcttgccgcttgtgaaggtgctttactggttgtcgatgcagggcaaggggttgaagcccaaacattagcaaactgttatacggcgatagatatggatcttactgtcgttccggtattgaataaaattgacttacctgccgcagagcctgagcgtgtcgctgaagagattgaagatattgtcggtattgatgcgaccgatgcagtgcgnnnnnnnnnngcgttgttctgctaa

SEQ ID NO: 314415 - DNA, 768 bp, Proteus mirabilis
atgggtattgatacagatggtgcatatcaggctatttacgtggataccccaggcttgcatattgaagaaaagcgagccattaaccgtttaatgaaccgtgcagcaagtagctctattggtgatgttgaactggttattttcgttgtcgaaggaaccaattggacgcctgatgacgaaatggtattaaacaaattaaaatcactacgttgtcctgtgctattagcgattaataaagttgataacgttacagataaaaccaagttactgccacatattggttttttaagtcaacaaatggattttctagatgtagtgccgattagtgctgaaaaaggcatgaatgtcgatactattgctaaaatagtgcgtaactgtttacctgaagccattcatcatttcccagaagattatattactgatcgctctcaacgttttatggcgtcagaaattattcgtgaaaaattgatgcgctttttaggtgaagaattaccttattctgtgacggttgaaattgaacaatttgttactaacgatcgcggtggatatgatattcacggtttgattctggttgaacgtgaaggccagaagaaaatggtgattggtaataaaggcgctaaaatcaaaaaaatcggtacggaagcccgcatggatatggaagatttatttgaaaacaaagttcatcttgaactttgggtgaaagtaaaagcgggttgggcggatgatgaacgtgctttacgtagccttggctatgtggacgatttaaaatag

SEQ ID NO: 314416 - DNA, 957 bp, Proteus mirabilis
  misc_feature (942)..(951): n is a, c, g, or t
atggaatggatcgtagatccgacgatatgggtaggtctttccacccttattgttctcgaaatcgtacttggtattgataaccttgtttttattgctattctagcagataaactcccagcaaaattaagagataaagcacgtatcacaggattattgtgtgctcttattatgcggattgtactgctatttagtctctcttggcttatcaccctaaccaaacctcttatcacactgtttgatcatcctttcagtgccagagacttaatcatgctcctcggagggatattcttacttttcaaagccacaatggagcttaatgaacggctagaaggtaaagatcataacgagggaaaacaacgtaaaaccacgagtttttggtctgttgttgcacaaattattgtactagatgctgtattctctctagactctgttatcactgcggtagggatggttgaccatctcggcgttatgattgctgctgtaactattgcgatgttcttgatgatcctcgcaagtaagccattaaccacatttgtcaataatcacccaactattgttattttatgtttaagcttcttattgatgattggttttgccttagttgcagaagggtttggctatccaatacctaaaggctatttatacgctgccattggtttctctattatgatagagatatttaaccaactcgcacagtttaaccgccgacgcttcttatcagcttctcgctctttgcgtgaacgtacagcggaagcggtattgcgcattattaatggtaaaccagaagcctctgaacttgaccctcacacttctgatttagttgctaatacagaagaggtgtttgatcctcaagagcgccaaatgattgtgcgcgttctgggtttaagccagcgaaacgtcaatagtattatgacttcacgccatgatgttgaatatgtggannnnnnnnnnccatga

SEQ ID NO: 314417 - DNA, 405 bp, Proteus mirabilis
ttgattaaatcagctatactggttctagaagatgggaccgaattccacggcaggtcgataggcgcagaaggcgctgctatcggtgaagtcgtttttaatacttccatgaccggttaccaagaaatattaaccgacccttcttactcccaacaaattgttactctcacctatcctcatattggcaataccggcgttaattcctcagatgaagaatcagcaactatccatgctcaagggttaattattcgcgatttacccctagtgatgagtaattatcgtgccgaagagagcttagccgattaccttaaacgtcatcagattgtggcgatagctgatattgatacacgtaaattgacgcgattattgagagaaaaaggcgcacctaataccacaccttgttgctga

SEQ ID NO: 314418 - DNA, 834 bp, Proteus mirabilis
  misc_feature (174)..(183): n is a, c, g, or t
atgttaagttttgaacagctttccattgatattgcgcagtttcgttggttaggaaagcgcacttggcagcctttattaaaatctatttctcttgatattaaacctggcaaaatgctggctttagtggggggcagcggtgaaggtaaaagtttactcctgcaaagtgcattgggnnnnnnnnnnctcctgcaaagtgcatggggactactacctgctaatatgcgaacccgaggcacaattaaacttaatgggcatccgttaaccgagcgagagcttattgcttatcgtggtaatactttttgctatattcctcaaggtgtaacagcgcttaatccgttaattagcattggtgaacaactgggccgttcagcgcggttaagtggtgctgatatcacctatgaagatattaaacaccaatttggtttatatcacctctctagctcgttagtgaaaacttaccccgcaaaattatcggggggaatggctaaacgagtactcgcctgcaatgcaacattatctaatgcacaatatatactggctgatgagataacatcatggcttgatgatgaacacgcttgtttattgctagagcatttaaaagagttatgtcaccaaggtaaatcagtcctatgggtcacccatgatttagctttggctgctcgttatgccgataccattgctgtgttgaggcaaggggagctaaatgagatagtcgctgctaaagcgctttatcatcatggtgggagtgagtggctaaaaacattgtggaatgcactgcctgaacagcagtttttagatctacaagagggggcttgcaacccatacccatattga

SEQ ID NO: 314419 - DNA, 150 bp, Proteus mirabilis; identical to SEQ ID NO: 303094

SEQ ID NO: 314420 - DNA, 201 bp, Proteus mirabilis
atgataaccataagaaaagctgtactttctgatgttgagcagattaataccctgtatggctatttatttgctgagatggcgaaattacagccagaaagattaaaaccgggtaaacaagatgaagcatttattattaatggcattaaaaatgataaatttcatctttactattgcccaaatacaagagacaccgctatttaa

SEQ ID NO: 314421 - DNA, 141 bp, Proteus mirabilis
atggatgcgacagagctagaaatagcgaaagagtggggttgtgaagaagctaagccttcgattagtgcaagggtgtgggctccccctgtgacgattaatattttggcattaggctcgtgctgtttgatggtttttatatga

SEQ ID NO: 314422 - DNA, 171 bp, Proteus mirabilis
ttggcacagagtaaaggaaaaactcgtcgttatggtaattattcggggctggctttagagacacaatattttcctgatgggccgaatcatcctgaatggggtgagaaccaaggtattttagctgcaaatactccgtggcatagccaaacaatatataaattttatcagtaa

SEQ ID NO: 314423 - DNA, 411 bp, Proteus mirabilis; identical to SEQ ID NO: 309173

SEQ ID NO: 314424 - DNA, 324 bp, Proteus mirabilis; identical to SEQ ID NO: 299968

SEQ ID NO: 314425 - DNA, 2904 bp, Proteus mirabilis
atgccttttactcttggtcaacgttggattagcgatacagaaagcgaacttggactaggtactgttgtggcaattgatgcccgtatggtgaccttactttttcctgcatgtggcgaaaatcgtctttattcccgccatgatgccccaataacgcgggtgatgtttaatgtgggggatactgtcaccagtcatgaaggctggaagctcgccatcgacaacgttgtggaagataatggcttacttatttatcacggcgtacgtttagataccgaagagccagcacaactgcgtgaagtattcttagataacaaactcacttttaataagccacaagatcgtctttttgctggtcaaatagaccgtatggatcgttttgctttacgctatcgtgcgcgtaaatttatgagcgaacagtttaagcaagcacaaagtggtctacgtggtattcgcgcaagtcttattcctcatcagctctatattgctaatgaagtgggtaaacgtcataatccacgcgttttattagcggatgaagttgggctgggtaaaactatcgaagcgggtatgataatccaccagcaaatcatggatggacgcgctgagcgtgttttaattatcgttcctgaaagcttacaacatcagtggttagttgagatgttacgtcgtttcaacctacgtttttcactgtttgatgatagccgttatagcgaatctttattagatagcgataatcctttcgaaacagagcagatgatcatttgctcattagactttgtgcgtaaaaacaaacaacgctttgaacaccttgttgaagcgacttgggatatgttagttgtcgatgaagcccaccatctggtatggagtgaaaaggcaccaagccgagaataccaagttatcgaaacgctagctgaagcgatcccttctgtattgttattaaccgcaacaccggagcaacttggtcaagaaagccattttgcccgcttacgtttgctcgatcctaatcgtttccacgattacaacgaatttattaatgaacaacaaaaatatcgccccgtagccgatgcggtaaccattttgctttcagaagatgatttaaataacgaacagcaaaatagcatcagtgagatgatcagcgagcaagatatagagccgttgctaaaagcctctaatacccaaggtgaagagcgtacaaaatctcgccaagcacttattcatatgttgatggatagacacggtacgggtcgtctgttatttcgcaatactcgctccggcgtcaaaggcttccctaaccgactgttgcacgcaataaaaatgccactaccaactcagtatcaaaccgccattaaggtggctgagattatggcagcgaaaaagagcctcgaagtacgagcaaaagagatgctctatcctgaacgtatctaccaagagtttgaaggtgaaaatgccacatggtggaactttgatccacgcgttgaatggctactaggctttttaaccgccaatcgtcatgaaaaagtattagtcatttgtgctcaagccgccacagcattgcaattagaacaagttttacgtgaacgtgaaggtattcgtgctgcagtattccatgaagggatgtctttacttgaacgagatcgtgcagccgcttatttcgcctcagaagaggaaggcgcacaagtgttactatgttctgaaatcggttcagaagggcgtaacttccaatttgctaatcaactagtgatgtttgatctcccctttaatcctgatttattagaacaacgtattggtcgtcttgatcgtatcggtcaaaaccgcgacattgatatcagtgtgccttatcttgaaggaaccgctcaatctgttctattacgttggtatcacgaagggttagatgcatttgaacatacctgcccgacgggtcgtacaatttatgacaacgaatatgatgcgctagtcaattatcttgctcaacctaatgaactaggtgattttgataagtttatcgtttcttgtcgtaagcaacatgatgagatgaaactcaaactagaacaaggtcgtgaccgtctattagaaatgcactctaacggcggtgaagttggcgttgagttagcgaataagattgcagagcaagataacgatcccgatctggttaacttcgccttaaacttatttgatattgtgggcattaaccaagaagatcgtagtgatagcttaattgtattaacgccatcagatcatatgttagttcctgacttcccaggattaccgcaagatggttgtacaattacctttgatagagagcacgcactctctcgtgaagatacgcaatttatcagttgggaacatcctattatccgtaatggattagatttagtcttatctggtgatacaggtagttgtgcggtttctttattgaaaaacaaagcattacctgtaggtacgctattagttgaactgatttatgtcgtagaagcgcaagcccctaaacaccttcatttaactcgcttcttaccggcaactccagtacgcttattacttgatttaaaaggtaataatcttgcatcacaagttgaatttgaaagttttaaccgccaattaaatgcggtaaatcgccacacatccagcaaattggtcaatgcggtacaaaatgaagttcatcatgtactaaaagcatctgaatccttaatggaagcggaagcgaaaacgctaattgaacaagcgaagcaagaagcagacaacgcattaacacatgagttatcacgcttagaggcattacgtgccgttaacccaaatatacgtgatgacgaagttgaagcaattgaaaatgagcgtacgcatattcttaaccacttagatgaagcgacatggcgcttagatgcgatccgtttaattgttgttacccaccaataa

SEQ ID NO: 314426 - DNA, 2322 bp, Proteus mirabilis
  misc_feature (1227)..(1236): n is a, c, g, or t
atgtataaaaataaacagtgggaattagatagaagaacgctattaaaaggaatgggagctattggtttggcagctctttcccctaatgcgtttagcctagctaatgaaaataaacccatatttaaccagaaaactcggataaaattatctgaatatcaaacttttcaatccacctgtgcaatggaatgtctccattgtaacctaaccgcttttactcatcagggaaaactaatcaaaattgaagctacagaaggctttaatgtcaaatgttgtttacgaggaattagccgaactaaatgggtatatcataaggatagactcactacacctttactacgtgttggcgaaaaaggtaagactgagtttaaacctattagctggaatgacgctttagatcttatcgaaaaaaacattcgagaaactattgataaatatggtaacgaagggctttttatttctactcacgctggaaatatggattccatcaaaaatgatatgggtaaagcctttttcgactatttaggcggctctacaaaacaagccggctccttatgttgctctgcggttactgcagctatgatccctatggttggcctacgctatgcagatacgcgtgatacggtaaaagatagccgttatattctatgttggggcaataacccagcagtgactatgcacgcctactttaaaaattataatcaggctcgccgtaatggtgccagaatggtagtcattgatccgcgttttaatgaaaccgcagccaaagctgatgagtggatccccattattccgggtaccgataccgcccttgcattaggaatgatcaaattaatcattgaagaaaatcttacagataaaccttttttgcgtgcctataccggagcggtgtatttagtcgatgaacaacaaaaactactacgtgattcagctagtgataaagatagctatttagtctttgataccctaactcagcaaattgttcgccatgatacccccaatattgtaccggcgttaactcatgatgaactgccaaataaaataaattacaccaccgtttttgaacaaatctatttacaagctaaaccctggactatcgaaaaaaccagtaaagaaacagatattccacaagagactattattcgtttagctcgagactacgcgacaataaagcctgcaatgattgtacaaaatatgtctggcgcacaacgcactgaatttggtgcctannnnnnnnnngctctattaaccggcaatattggtaaaaaaggcgcgggtatttgtgatgccggtggcgtgcgtcagatggcaaaatttaatcctattattcccccagcaccaaatgttaaacccattaatcccattcctgttgcaaaagtgggtgaatggatagtcaacgaaagaccccacccgattaatttctggtggatcatgacaatgggggtgatgacacaattacccaataccaatatggtacgtaaggcgctaaaaaaagttccttttgttgtcgtagccgataatttaatgtcatcaacagcgctttatgccgacttagtacttccagtgacaaccatttttgaagatacaagtttaatggctggtgtgcgtagccaatatgttcaattaatggaaaaagccgttgaaccaccaggagaagcaaagcctgattattggatttttgcccgccttgctgaacgctttggtttcggtgacgtatttaatcaacctattgagcactatattgatacttgcctcgcgggatcggggattacgcgggaaatgctagaaaaagggcctgtacgaccagtagaaggcgattggatcccatttaaagacggaatatttcgtacatcaacccaaaaagcacatttctttattgaagaatggcaagataaaaactactcccctatagtcacttattatccagtaaaggaatcgacaacaggctcccctgaattagcaaaaaaatatccgttaatggctgtgcaacgtaagctagcacgtagtgttcattcaagccatgggatgaatgaatggattttagaagtacagcgtaatcaaccaaatattttaatacatcctaatgatgcgttatctcgtggaataaacaatggtgattgggtgtttgcttttaatgatagaggtgaacatagagcaatagccgttgtcaccacacacataaaacaaggtgttgtttctcttgataatggttggtgggaacaacaaggggggagtagtagccatgtaacaaatgaccatgttgaacctttaggtaatggtcattgttgtaacagtaccctagttaatgtgagacgggaggcataa

SEQ ID NO: 314427 - DNA, 2169 bp, Proteus mirabilis
atggcgactcaacaaaggatacaaacctcatctgagaaatcaccggtattccagttttcagtacgtcccgataaggtcggaattatcaccattaatgttgtagatgaaaaggtcaatacactgaaagctgcttttgttgaacagtttcaaaatgtattaaaacaggctcagcaacattcaggtgtaaaaggattaattatcacctcaggtaaacctgataattttattgctggtgctgatatatcaatgattgcagattgcaaaaccaaagaagaggccaccgcattagcaaaagcaggacaagatctttttactcaattagaaaattatcctttgcctgtcgtcgcagccatcaatggcgcctgtttaggtggaggattagaactagcattagcctgccatgggcgaatttgctccgataacagtaaaacacgtttaggccttccggaagttcaattaggattactaccaggttcggggggaacccaaagattaccacgtttaataggggttacgaccgccttagatatgatcttaactgggcgacaaattaatgccaaacgggctttcaagcttggcttagtcgatgacgttgtgccacaagctattttattagatgttgcagcccaatggattttaacagctaaaaaagctgctaaaaaacagactattatggagcgtttttgggcaaataccacattaggaaggaatatcctctttgatcaagctaaaaagcgcactttagctaaaaccaaaggtcattacccagcggcagagcgtattcttcatgttattgaacgaggcttagagaaagatattcaaacaggttttaaagaagaagctaatgcgtttggtgaattagccatgaccccggtttcatctgcattacggcatctcttttttgcctcaacagtattgaaaaatgaaacaggatcatctgcaaagccagataacttacaccatataggtattttaggtggggggttaatggggggcggtattgcttttgtgacagcaacaaaaggtaatttacccgttagaattaaagatattagtgataaaggtattgcgcaggcacttaactatagttggaaagcgttatcaactaaggtcaagaaaaaacggctctctgctcgtgaacgccaaagacaaatggggttattatcagggacattggattatagcggtttccatcaaactgaccttattgtcgaagctgtttttgaagatttggctttaaagcaaaaaatggtggctgatattgaagccttaggtgaaggtaagatcatctttgcttcaaatacttcttctcttcctatccataaaattgctgaaaaagcacaatatccagaaaaaataattgggctgcactattttagtcccgttgaaaaaatgcccttagttgaagtgatccctcatgaaaaaacggatgctaagacaatcgccacaaccgttgcttttgctaaaaaacaaggcaaagttgccattgtggtaggagataaacccggtttttatgtcaatcgaattctcgccccttatattagtgaagccttaacctgtttggttgaaggggaaacgatagagaatattgacaaagcattagttcaatttggctttccagtcggccccattcaacttttagatgaagtgggaattgatattggtactaaaataacgcctattttagtcaatgagtttggtgagcgttttgcatctccttctgcggtggatgcggttattgcggatgacagaaaagggcgtaaaaacggtcgtggtttttatctctataatcagcatgccttacctttctctttaggaaaaaataaaaagcgtgcagatccgatgatttatcgcttattacaggttaaacctaaaaatcagttatcggcttcagaaataaccgaacgttgtttattgcttatgcttaatgaagcagttcgttgtttagatgaaaacattattcaacaacctagggatggtgatattggtgctgttttcggtattggttttcctcccttctttggtggaccattccggtatatagatagtatgggaacaacaaaaatagtcgataagcttaatcaattaactgaaaaatacggtgaaaagttccagccatgtgagcgattagcggcaatggccaagttaaatgaacgattctatagctaa

SEQ ID NO: 314428 - DNA, 453 bp, Proteus mirabilis
gtgagttactacggcattgatgaagataccggccttgaaattcgagttcgtcctgatatcgaaattcaaacagaaaataacagattaggttttgacctcaaatcagtagcacttggtcgatttaaacaagatgccattgaaaccatgatccgcagagaaatcattaatcgcgattatcacatcagtgcagctatgtattgtgatgtggcaatgctggatcagttcttctggatattcgttaacaaagacgagcattaccactgggtcgctatcgttgaagcctctcctgaattacttgaactgggtcgcgctgagtacaaaaagactctgcgtgatatccgtgaagctatgggtacaggatattggccagcgcctatcaccactactctcactatcggtatcactgactttgagcagagaaagttagaagaactgcaaaacgaagtcgcttaa

SEQ ID NO: 314429 - DNA, 2001 bp, Proteus mirabilis; identical to SEQ ID NO: 311324

SEQ ID NO: 314430 - DNA, 249 bp, Proteus mirabilis
  misc_feature (237)..(246): n is a, c, g, or t
atgatgtatttgattggatttgtgtttgcattatggctagcaaaccgcagagcggcaaaacctaacagtggttggcaaaaaagtgaagtcgaaacattactttatgtagggtttgtgggcgtgtttattggtgggcgtctaggatatgttttattctataacttaccggtatttttagataatccactttacctatttaaagtctgggatggcggaatgtccttccacggtggcttnnnnnnnnnntaa

SEQ ID NO: 314431 - DNA, 186 bp, Proteus mirabilis
atggcgattgcaccagatgaaaacccaattatctctgatgttaaagagtatccaggtctagttattaatactgcaacaggttggggaatgaccgaaagccctgtatcagcagaaattacagcagatttattattaggcaaaaaacctgtattagatgccaaaccatttagtctgtatcgtttctaa

SEQ ID NO: 314432 - DNA, 1221 bp, Proteus mirabilis
atggcaataagtagaagaaaatttattcttggtggcacagtggttgctgttgctgcaggcgctgggattttaacacctatgttaacgcgagaagggcgttttgtacctggtacgccgagacatggttttgttgagggaactggcggtccattaccgaaacaagatgatgttgttgtaattggtgcgggtattttaggtatcatgaccgcgattaacctggctgagcgtggtttatctgtcactatcgttgaaaaaggaaatattgccggcgaacaatcatcgcgattctatggtcaagctattagctataaaatgccagatgaaaccttcttattacatcacctcgggaagcaccgctggcgtgaaatgaacgctaaagttggtattgataccacttatcgtacacaaggtcgtgtagaagttcctttagatgaagaagatttagaaaacgtaagaaaatggattgatgctaaaagcaaagatgttggctcagacattccatttagaacaaaaatgattgaaggcgctgagttaaaacaacgtttacgtggcgctaccactgattggaaaattgctggtttcgaagaagactcaggaagcttcgatcctgaagttgcgacttttgtgatggcagaatatgccaaaaaaatgggtatcaaaattttcacaaactgtgcagcccgtggtttagaaacgcaagctggtgttatttctgatgttgtaacagaaaaaggaccaattaaaacctctcgtgttgttgtcgccggtggtgtttggtcacgtttatttatgcagaacctaaatgttgatgtaccaacattacctgcttatcaatcacagcaattaattagcgcagcaccaaatgcgccaggtggaaacgttgctttacccggcggaattttcttccgtgagcaagcggatggaacgtatgcaacttctcctcgtgtcattgttgctccggtagtaaaagaatcatttacttacggctataaatatttacctctgctggctttacctgatttcccagtacatatttcgttaaatgagcagttgattaattcctttatgcaatcaacacattgggatcttaatgaagagtcgccatttgaaaaatatcgtgatatgaccgctctgcctgatctgccagaattaaatgcctcactggaaaaactgaaaaaagagttcccagcatttaaagaatcaacgttaattgatcagtag

SEQ ID NO: 314433 - DNA, 1242 bp, Proteus mirabilis
ttgtgccctcagtgcgatctggtagtgagtgttcctgaattagcccaaggaaccaaggcgacctgtccacgttgtcacactttgctaacagcacgttggcgacaacctttttatcagccagtagccttggcgattagtgcattatttatgttattaatggcttgccaatttacttttgtcagtatggaagtggcaggaattaccaataacattactttaatgcagatcccaaatgtgatgtttagcgaaaattatgttgagctaggcgctttctttttactctttgtacaagtggttcctgctttctgcatgatagctattttactgctttgtacacccattaagctgccaagaaaattacaaatttggctatcacgaattcttttccaattaaaatcgtggtgtatggcagagatttttttagccggtattttagtcagttttgtcaagttaatggcgtatggtgatatcggcttagggttaagcttcctaccttatgtactttactgcttattacaaattcgtgcatttcaatgtttagatcgccatacattatgggaaaaactagaatcgcgacccgcttatcctaaaattgaatcaggtaaaacaggtttaaagcaaggggtaagattatgtcgttcttgcactgctattttaccggctgatcaatatgaatgtagtcgttgtgaagtaaaagggtatgcgagaaaacctcatagtttgcaatggacgctctctttcttaattacttctttaattctttatattccggctaatctattgccaattatggtgacggaatcgctgggtaataatctttactcaaccataatggctggggttatcttactttgggaagatggctcatatcctgtggcaatggttatttttattgccagtattatggtacccagtttaaaaatggtggctatcggttggctatgttgggatgcacataaagctaaaggaaaacgtgatccggcgagaatgcactttctctatgaagtggttgaatatgtagggcgttggtcaatgattgacgtttttgttatcgctgttttagcttcattagtcagaatgggacgtctgatgagtatctatcccgattttggtgtagtgctatttgcattggttgttgtattaacgatgttctctgcaatgatgtttgatcctcggttaacatgggataaatgtactgccgatgatgataaacccatgattaaggagcctaagggtgactga

SEQ ID NO: 314434 - DNA, 375 bp, Proteus mirabilis
  misc_feature (265)..(274): n is a, c, g, or t
atgatttgggatgcagaaaaaaaaggtatcctgaaacccggcgtagagctagttgagccaaccagtggtaatactgggattgccttggcttatgtagctgctgctcgtggctataagctgacactgactatgcctgataccatgagtattgagcgccgtaagttattaaaagcattaggcgctaaccttgtgttaactgaaggcgctaaaggtatgaagggagcgattgataaagcgaacgaaattcgtgatagcgatcctagcnnnnnnnnnnccttctactacaacaatttagtaatccagcaaacccagaaattcatgagaaaaccacaggccctgaaatttggaatgacactgatggcaaagttgatgtag

SEQ ID NO: 314435 - DNA, 1128 bp, Proteus mirabilis
atgaaatttgatattgcggttattggtgcgggcattattggtttatctcatgcatatgcagcggctcagcgaggtttacgtgttgctatttttgagcgcagttacacgcctgtgggcgcttctgtacgtaattttggtcacggattaattttgggtcaagcgccgggaaaaatgctagatttagcaaaaaatagtcgtgaaatttgggcaactatggccaaacaggctaaatttttaacgcgtcaaaaagggacttatctgttagcacgtacacaatctgagcacgctgttcttgaagcctttgtcgatggtcgagctaaaacctatggttatgattgtgaattactttctaaaacacaattagccatggtttatggtggtcaattgcaacaccatagagcggcattgcatggcaaagaagatcaggtgctattttcgcgagaagcgatcccacagttagcggcttatctaggcagcttagctaatgtaacgagttatttttccacattggtacgggatattgatgtagatacgggggcattgatcaccagcaatggaacatttagtgcagaaaagatcattgtctgctcagggcacgattatcaaacattactggctgacgaaataaaaaagcttgatcctatagtttgccgcttacagatgttgcgagtgacagcagagcaaaatattggattggcgcatgcgctaatgacgggattaagttgtactcactatggtgcatttgctgatttacctgaggcacaggctttagcgaaagaaattaaaatgcaatcgccgttgattgagcagtatggtattcatttattaattaccccgactccttatggcgatcttattattggtgattctcatgaatatagcttagatgcacagccttttaacagcgaagaggttgataacctcctgatagagttagctgagcacacattaggttgttcggttcaagtaaaagagcgttggcaaggagtttatggggcaaaaggaaaggagccgatttcaattttaacgccgagtgaaaaagtcactgcagtattgatgcgaacgggtttaggaatgagtgttgggcctggtttaggtgaacaaaatattcgtcaactatttgattaa

SEQ ID NO: 314436 - DNA, 981 bp, Proteus mirabilis
atgaaaaagatattaaataaaccagaaaattatgttgatgaaacattagctggcttatgccttgcacataatgatatttatcgtcaaccacaaccacgtttaattacgcgagctaacagctcagataaagctaaagtgggaattgttactggcggaggatcagggcaccttcccgttttcaccggatatgtaggtgaaggtttattagatgccgccgcagtcggtgatgtatttgcctcaccgtcagcagatctaatggctgatgcgatacgcgctgcggataatgggcagggggtattactgctctatggtaattatggtggcgatattatgaattttgatatggcttctgaaacggtagattttgaagataatattcgatgtacaacggtgttagcgacagatgatattgcttctgcaacaccagaagaagcgcataaacgtcgtggtgtggctggaatgatttatggttttaaaatggcaggggccaaagctcaagaaggggcatctcttgatgaggtgacccgcattgctcaaaaaaccatggaaaacacgcgaacaataggctgtgccttacccgctgttggacatgctacctttgaaatagctgacgatgaaatggaaatgggaatggggatccacggtgaaccaggaatttggcgcgataaattacgtagtgcagatgatattgctgaagaaatgtttcaacgtttacaagccgaattatcactaaaaaagggtgataaagtctcagtactagtcaactcgttaggtgcaacgcctttagaagaactctatattttatataataaagttgttcaacttattgataatacaggggcgactatcattcacccattagtcggccgttatgcaacatcaatggaaatgaccggtgctagcttaactttttgtaaacttgatgatgagcttgaagctttattgaatgcacctgcacactgtgcattttggagagtgtga

SEQ ID NO: 314437 - DNA, 363 bp, Proteus mirabilis
atggaaaacattactgagaagaaaaataagattgatattcttaatatcacctctaggttacatgcccaaggaattcattcttttcaagaagttaattatgctcaaattgaacctgatggacaaataacggtggtgtgtgatggtgctaaaatgccctctatcattattatgaaagatggagtgatcagagcttctgaacttgagcagatagaacgagatgaaaattggttaaacgaagagatgaaaaaacagcatatagataacccagaagatgtttttttagccgaattttgggatggtaaagtcaatttcattttgcaagacggtaagatcaaacacgatttcattccgactgctgagtag

SEQ ID NO: 314438 - DNA, 792 bp, Proteus mirabilis
atgtgggcaatagcggcttttgttcccgccattgtttcattatttttaatgccgattgtgatctactttttatataaaccagagataacccatacgccgaatgctccccactttgccaaagagcgtttagctcaattaggccctatttcattgccagaaaaaatcactttgggagtatttgcactgttattaattatgtgggcaggaatacccgcactattatttggtgatgcatttagtattaatgcgactactgcggcttttattggtttatcaatcttattatgtactggcgtattaaattgggatgatattttaaaaaacaaaggcgcatgggataccgtagtttggttttccgcattagtaatgatggcctcttttttaggaaaattaggtctaattaaatggctctcattaagtgttggtgccggtattgatagtatggggataagctgggtaagtggtatgatattactcgtgctgatttatgtctattctcactatttctttgctagcaccacggctcatattaccgccatgtttgctgcattctatgccgcaggtttagctcttggcgcgccaccaatgttattaggacttattttagctttctcttcttcattaatgatgtctttaactcattacggtacaggtactgcaccgattattttcggctcaggctacgcgaccttaggtgagtggtggaaagcaggttttgttatgagcattgttaatctcattatctggataacccttggtagtttatggtggaaggtgctggggtattggtaa

SEQ ID NO: 314439 - DNA, 363 bp, Proteus mirabilis
  misc_feature (351)..(360): n is a, c, g, or t
atggtttcaatgagtcttaataaaaccggattaggtgctagaattggctactattttatttcgttatttggtaaaaaaaccattggtatcgcttattccctagctattgcagaaacgatcctcgcccctgttacgccaagtaatacagctcgaggtggcgggattattcacccaataatgcgatctattgccgatagctttaattcaaaacccgaagagggtactagtggtaagattggtcgttatttatcgctagtcaattataatatcaaccctatcacctcagcgatgtttattactgcaaccgcgcctaatcctcttattgtaagcttaattatcggtgaaacaggnnnnnnnnnntaa

SEQ ID NO: 314440 - DNA, 465 bp, Proteus mirabilis
gtgattgattatgaaatattatttgatgatatcccactcgtttatctacacaaaaatcatccgttaatgaaaatgaagtgggatcttaataattttttatcgttttctcaggtgagtacagaatatgacaaacaaagtcattgggctttggataatatcttaaaagaaatgaacaaaagtcgtcagatagcaattacttatacttcttttgagcaatctctttttatgatatctcaacctgaccatcaattaattacttgtgcaccaggatattgtcgttattatgtaaaaacacattttcccgatattgtaacattacctatccctctcccccctgtgtttttagaacagcttcatctaccttttgttttgttatggcataagcgtaatagccataatacaaaaattatatggctaagaaatacaataagaaaaagtattaaccaacaaatctccgatatctga

SEQ ID NO: 314441 - DNA, 753 bp, Proteus mirabilis
atgagctattttgaaggcaaaacggtgttagtgactggggctgcaacaggagtaggggaaggcgttgcccaacgattatatcaagcgggtgcaacagtctttataagtggacgacaattagaacaggttaaaaaaaccgcttacacaatcgatcctacaggtgaaaaagtcatagcattacaagcagatatgacatcacctgagcaagttaaaagcatgtttgaaacaatattagcacaaacaggcgcattacatggattagtgaataatgcaggtattacaggtccgcataatacatcgattgttgattataatattgatgattggaaagcggttatggataccgatattaacggcgtattttacggattgaaatatggtattccagccttactaagaagtggtggagggagtatcgttaatttatcttcgacaaatggtattgtcggtattgccggaatttctgcttatactgcagccaaacatgctgtgttagggatcacccgttcagctgccttggaatttgcacagcaaggtatacgtgtgaatgcaatagggcctgggtatgtagacacaccgcgaatgcaacagttaccggatgaagtccgtcaatggatggcatcaacacatcccatgaagcgaatggcaacgcgaaaagaagtagctaatatggtggcctttttactttcagatgagagtagtttttcaacaggcgctttttatgcggtagatgggggatatactgcgcagtag

SEQ ID NO: 314442 - DNA, 762 bp, Proteus mirabilis; identical to SEQ ID NO: 301777

SEQ ID NO: 314443 - DNA, 897 bp, Proteus mirabilis
atgtctcatgcacaaagcggtattttagtcgcacatagtaaattcggtctatttattgaagcaatggtggtgggggaaattgatcaactacgtcaaggctgccaacaatttatgcaatcccttagcgaattacaaaaacagtatcctgatgcttcattaggtgccgtagtagcttttggttcagatctttggaaaaaattatcagataacaatagtgcgccagagttaaagccatttcgtccattaggtaaagggttagctcctgcgactcagcgcgatatgcttatccatatccaatccatgcgtcatgatgtgaatttctcattagcgcaagctgcaatagctgcttttggtaacgtgctccaaatagaagaagagatccacggtttccgctggattgaagagcgtgatcttagtggttttattgacggctcagaaaatcctgttggtgacgagcgctatggtgttgctttaattaatgaaggtattgatgctggtggtagctatgttttagttcaacgctatgagcataacctaaaaaaatgggcgcgttttagtgaatcagatcaagaaaaaatgattggtcgtactaaaaaagagagcattgagttggatgaatcagaacgcaatattacctctcatgtatcccgtgttgctattgaagaaaatggtgaagagttagcgattttgcgtcatagcttaccttatggaactgctagtggtaaacatggcctctatttcttagcttactgtggccgtttatataatattgagcagcaattactcagtatgtttggtgaagttgatggtaaatacgatgatttactgcgtatgagtaaacctgtgacaggtagctactatttcgctccttcttatgaagtattagccgctctgtaa

SEQ ID NO: 314444 - DNA, 279 bp, Proteus mirabilis
atggcatctcataaagtgaccctgcaccagcagggtctatcaaccgcattagaatttagctctgaaacgcatccttccttgttggatacgttagagcgcagcaaaattcaaatcgaatatcaatgccgagaaggttattgtggctcttgccgattacgcttagtaaaaggcaaagtatgttatcgcaatgagccattggcattcattcaagctgatgaaattttaccttgtagctgtcaccctgtgagtgatatcgaaatcgagatctgcacaaagtaa

SEQ ID NO: 314445 - DNA, 330 bp, Proteus mirabilis
  misc_feature (310)..(319): n is a, c, g, or t
ttgcaagaaaatggcgaacgagattttacttttttagttgcggactctgctgatcaatttcttaccaataaatcactgcctgtatttgaaaaagacattttacatttttgttcacttgctttagttaacccaatttgtcgctcgacgctagatagtgctattagtaaagtaaaaaatagcgactctttactgagtttcgatattaatttacgcccccaaatgtggcgtgatcatgaagaaatgcgtgcgatcatcgatgaatatgctcataaagcagatattttgaaattatctgaagatgaactgactnnnnnnnnnngacttggatga

SEQ ID NO: 314446 - DNA, 378 bp, Proteus mirabilis
atgactcaggaaattacgttagaaaatgcattaaaaaaattagctgattatcctgctcgtttaaaagtgatcacccaaggctctaaaggatgtttagtgttgacgcctacaacacaagttgccttgagtgcctttaccgtcaattgtgttgataccacaggggcaggtgatgcctttatgtcaggattattagccgcagttgcagaatatggttttgctgatgatgaacaatatttattaaaaattattacgcaagccgcggcctgtggcgcattagcaaccactaaaaagggcgctattgctgcagcaccgagccgaaaagtattgcgtgaatttgtcagtaaacaaccgccgttacatgtacgagatattttttaa

SEQ ID NO: 314447 - DNA, 252 bp, Proteus mirabilis
atgcctattatggtgcctattctcgatattcttgatcttacacgtcaaaccggtgtccttattttaaaactcggtgatggctttaccaatattattaccccaacatcaggtgtacttatggcggtactggcggtaggtaaagtgccgtggacgcgttgggttaaatttgtattccctattttaatgatttgggtcgtgataggtatggctgcaattggtattgctaccgcaataagttatggaccagtgtag

SEQ ID NO: 314448 - DNA, 180 bp, Proteus mirabilis
atgggacgcgaaaaaatacaacctgctgaattagtagagaattcacagctatccgatgatataaacgtcaatcttaatgccatggctgagcatcgccttgaaatcatgcagcagtttggtgaaggtctgccttacgaacgtgatcgtattgtccacgaaacgaagttttacatggcataa

SEQ ID NO: 314449 - DNA, 762 bp, Proteus mirabilis; identical to SEQ ID NO: 301777

SEQ ID NO: 314450 - DNA, 774 bp, Proteus mirabilis
atgtcagaccgtaattttgacgatattgctgataaattctctcgcaatatctatggcacaacaaaaggaaaaatccgccaagcggtgatttgggatgatttacaacaattattaactcaactccctgatcgtccgttgcgtattttagatgcgggggggggtgaaggttatttttccagacaactggcaaaattagggcaccagataattttatgtgatctatcacaagagatgcttaaccgcgcacaagaagcggctattgatgaaggtgttgtcaatcaaatgacgtttatttgttgtgcagcacaagagataaaccagcatctagatgatggtgttgacttaattctattccatgccgtattagagtggatcacagatcagaaaaacgccataaatgtacttaccgatatgctacttcctaatggtatcctatcgttaatgttttacaatgcgaatggcattgtcatgagaaatgctattttgggaaatttccatttggcaaatccggaaataccacgcagaagaaaacgctcattatccccacaaaatccgctacaacctgaggatgtttatcaatggttagcgtcattttcaatgacgattttaggaaaaacgggagtgcgtgtttttcatgactatttgcaaagtcgtcagttgcaaaataaagattttccagcgttgcttgccttagagcaacgctattgtcggcaagagccctatatcagtctggggcgttacattcatgtcatggcacaaaagtgtgtaaattaa

SEQ ID NO: 314451 - DNA, 1323 bp, Proteus mirabilis; identical to SEQ ID NO: 312946

SEQ ID NO: 314452 - DNA, 732 bp, Proteus mirabilis; identical to SEQ ID NO: 301781

SEQ ID NO: 314453 - DNA, 714 bp, Proteus mirabilis
atgcgtaaagtcacacttactcttagtgcaattgcgttggcgttaagtttaaatggcgcagcaatggcaaaagttcatatgccagaagttgttagcccaggggttactgttactgaacttgcacaccagcaaccaattaaatgggtttctgttgcagaaattgaaaaaagcttagaaggccaagcaccaatggcggtaggttttgatattgatgacactgttctgttctcaagcccaggcttttatcgtggtaaactggaatattctccaaacgatttcagttatctgaaaaacccagaattctgggaaaaaatgaacaacgaatgggataaattcagtatgcctaaacaagtcggtatcgatcttgttcagatgcacttaaaacgtggtgatactgtttatttcattaccggtcgtacacagactaaaacagagactgtgactaaatatgttcaagaaggtttaaatattcctgcagacaaaatgcaacctgttatttttgccggtgaccaacctggcgcaaataacaaagtaagctggatgcgcgatcacaaactgaaaatttactacggtgatgcagatgctgatatcgcagcagcagatgagctaaatatccgtgggatccgtatcttacgtgccgctaactcttcttaccagccgttacctaaagcgggacaatttggtgaagaagtggttatcaattcagagtactaa

SEQ ID NO: 314454 - DNA, 264 bp, Proteus mirabilis; identical to SEQ ID NO: 314356

SEQ ID NO: 314455 - DNA, 267 bp, Proteus mirabilis
  misc_feature (223)..(232): n is a, c, g, or t
atgattgcgttaatccaaagagtgacacaagcgaaagtcgatattgccggtgtgactgttggcgccattaatcacggcttactcgtgctattaggagtagaaaaagacgataaccaacagaaagcaaaaagattgtgtgaaaaagtgtgtggttatcgtattttcagtgatgaaaatgacaaaatgaatctgaatgtacaacaagcaggtggtagcctattannnnnnnnnnatttacactcgctgccgaaacccaaaaagggatga

SEQ ID NO: 314456 - DNA, 462 bp, Proteus mirabilis
gtggcgactggcttgagggtaggggctgttgtttgccctgaatcataccggcctgcactagaaagggcggtgagagcaaccacctggaataccccctctgtaatgacagcactggtatgtaattggatacaagatggcacagttgcccgttttgaaacactgaaacggcgggacgctcgccagcgacaggcggtattaagatccacactcggggatatgccctgtattacgcatcctgcctcttattttgcctggttccctttaccagatgatacaagagccgaccgagtcgccaagaaactgatggactgtaatatttccgtttcaacagcagaacctttctgtacttcactcgttgtcccacaagctcttagaattgctcttggatctgtcacaatagagagcttacaaaaagcgttgataaaagtccgagaagctgtggagtatgaacagtatcgttaa

SEQ ID NO: 314457 - DNA, 774 bp, Proteus mirabilis
atgagtaattttatactcactcattatcgtgattttgactctatccctgagcaactttatttcttagataatacaatcgtgtcactcgataaaaaccattcacgaatattatcagaaaaagtcggtgaaaattggcaacctgttgcctattcgaatctaatgactgctgatgaattaacctccgctgcagaggtgacaggaaaagcacgcggtgaaaattataaagcgatcattcaatcgcttagagattatgaattacaaagtacaaatacaaacaacacaccaatagatatatttcagcaactatccacattacgtatacaaattaatagttatctgcttaaacaccctgattcaaaacgtaacgaagcattgcaacaattacgcgaccaagttgatatacgttataaacatgcttctatcttattaagtaatagccagcaagttgattcaaataatacttttagttatttatatgagattttttcaaatgctaacttaaaaatcaacaaacatatttatcttgatgaaaacggcaactttgttacaaaagggaaaaataatttacaaaaccaagacaaacttatcagtggtaaaaatgcaatcacaagcattaaaagattggtcgaaaaagagtatggcagtgaaattaccaatcaggtatttaatcaatttaccaagcaattgaacaacaagtttcaccaatcagttctacactatatatctggaagcccagcaaacatagtcgcttggggcatgctgcgctacaaatag

SEQ ID NO: 314458 - DNA, 363 bp, Proteus mirabilis
  misc_feature (12)..(21): n is a, c, g, or t
ttgtttacgccnnnnnnnnnnacaggtcgagcgggtcgtaaagggactgccatttcattagttgaagcacacgattatccgctacttggtaaaattagccgttatatccaagagccgattaaatatcgtgttgtagcccaattacgtccagtgactaaagcccctagtcaaaaagcatcatttaagccttctaaaaaagtattagcaaaacgcaaagcgaaaaaagtagaagagaaaaaaaacgtaaaagagaaagtacgcgcacgcgatcgtaaaaatattggtaaacgccgtaaaaccgctactgataaaaccaccatcactgcggaaaaaactaatcatataaaaacagagcaacaataa

SEQ ID NO: 314459 - DNA, 252 bp, Proteus mirabilis
ttgcaaggtgaatgggaaaaacatggcgtttgtgcctttgatacgccagaagcattctttggtcagcaacaagcgttatttgacgcattagtgttaccagaaggccgcccttcaaatagtgaattgattaagttcttaaaagaaaataatccatcattgaaggataaagaaattcaaattaatcgagatgaattctatatttgttatagcaaagatttcgaagtgattgattgtccgaaacgtgaatattga

SEQ ID NO: 314460 - DNA, 345 bp, Proteus mirabilis
  misc_feature (155)..(164): n is a, c, g, or t
atgttaactattaatgcaacagtacgtaaagagcagggtaagggtgcgagccgccgcctgcgtgtggctaaccgttttccagctatcgtttatggcggaaatgaagagccaatcgctatcgatttagatcacaacgaagttatcaaccaagaacnnnnnnnnnntctgagttctacgctgatttcgttaacctcgttatcgatggtaaagcaactaaagttaaagttaaagcagtgcaacgtcacgagtataagccaaaaattactcatattgacttcctgcgcgcttaataagccaaccttcgagctttatttttcgggacgccgagcatgtaacgccacttaa

SEQ ID NO: 314461 - DNA, 504 bp, Proteus mirabilis
  misc_feature (479)..(488): n is a, c, g, or t
gtggaaattttagttacgggtggaatgggatatatcggtagtcatacatgcgtgcaaatgttagaagcaggcatgacgcctattattttggataacctcagtaatgcaaatgaagaggtacttaaccgaattgaagcattaacaggaaaacgcccactgttttatcagggggatattcgtgacgaaaaacgactggccacaatttttactcagcactctattcaatcagtgatccatttcgctggattaaaagcggtaggtgaatctgttgaaaagcccatcgaatactatgacaacaatgttaacggtactttggtattagttcgttgtatgcgtgatgcgggcgtaaaaagtattattttcagctcatcagccacggtttatggtgatcctcaaactgtgcctattactgaagagtcacctgttggtggcactaccaatccttatggcaccagtaaatatatggtcgagcgtatttnnnnnnnnnnagcgtattttgtctga

SEQ ID NO: 314462 - DNA, 597 bp, Proteus mirabilis
  misc_feature (391)..(400): n is a, c, g, or t
atgaaacagaaaaaacaaacaacattgatacatagtgggcgtcaagcaattaaaacatctggcccaattaaccctcctgttatgagagccagtactattgtttttgattcaataaaaagttggcgtgaaatacgcgatcgtcgtattactgaacgagtattaagctatggtgctcgtggtacagaaacagcgtttgcacttgaagcattagtaactgaattagaaggtggttatcgagcacagctctttcctacagggctagccgcaattgcatttactattatgggctacgcccgaagtggtgggcatgttttatttgctgattctgtctatgaacccgtacgtaaaatagcctctgcttttttagagcctaataatatcacttatagcnnnnnnnnnnttttaaaactgacggttcagatttcgagcaaaaaattcaagaaaacactcaacttattttcgttgaatcaccgggttcattactttatgaaatgctggatctaccagaaatttgccatatcgctcatgaaaaaaatattcctgttggggtggataatacttggggctcggcatggctttataaccctttggaattag

SEQ ID NO: 314463 - DNA, 291 bp, Proteus mirabilis
  misc_feature (259)..(268): n is a, c, g, or t
atgaaaacattaggcgaatttatcgtcgagaaacaacaagattttccccatgcaactggcgaattaacggcattgctgtcagccattaagcttggggctaaaattattcaccgtgatattaataaagctgggttagtcgatattcttggcactaacggtgtttctaatgttcaaggtgaagcccagatgaaactggatctttacgcgaatgagaaactaaaagcagcacttaaagctcgtggtgaagttgcggggatcnnnnnnnnnngaagacgatatcgttatctttga

SEQ ID NO: 314464 - DNA, 135 bp, Proteus mirabilis
atgttagatcaagagatgatccgtacttttattcaagtagcagattgccaaagctttactaaagcggcggagatgttacacaaaacatctgcggccatcagttgtttaatcgtacgacaagaaccgtcacattaa

SEQ ID NO: 314465 - DNA, 1008 bp, Proteus mirabilis
  misc_feature (899)..(908): n is a, c, g, or t
atgcgcgaaataaccaaacaagctcgcttatttgattttgtttttggcccactggtgttacccctccatgatgaaaagatccgtaaaggaaaactatttttatcaccagaattatggcatcaacagtgtcgcttagcaggatttcaacatattcgctggttacctgatgcattaccagaaaccaaagatatgtgtgaacatattattctcgccagtgtttcgacagaaaacgatcactttgatcaagagttacctagtgacaccaagatacaacaaagttcacactaccaatggcaattaacaccttgtgtggaacaagatcttatcaagccaacattaatatttaaccatcaacaaacattgccttctgaaatcacagctattttatccgctattggatgtctttctgaacagggcgaaaatcaattaatcgttgccaaccttgcagatcctttaattatcgccgagcagatccgccaaatattactgtcatcgtctgatgggtttgttgttatcacgcaacaagcctgggcattaactgccatagaaacggttaatccagcacaacgtagtattcgaagtttattaaaaactattcaaaaagaatatagctcaaggttaattgccattgttgatttaggtataaatgcctcatggtctgaattagttcctgcttttatacaaatagaacaaggtaataatgaaattattgttcgtaaccattgctgctacttaccacaattaaccccactgccctcatcttctacgatcatagcgcagaacatcatggtatccccgcgctggcatattattactggtggttttggaggcttaggtcgaattacagcaagttggttagtaaggcaaggtgctaaacgtatcgctattttggcaccacnnnnnnnnnngataacgctcaatgtcatgcagcactcactcagcttgaaaatgaaggtggcattgaggggcttatacacagtgcaggtattttggatgatgcacttatga

SEQ ID NO: 314466 - DNA, 141 bp, Proteus mirabilis
gtgttagagctggcagaaaaaattaaagcggatttaattgtcgttggctctcgtcgtcctagcatttcaactcatttattaggctctaatgcatcaggaattgtggcttacgccaaacaatctgtgttagttgtgcgttaa

SEQ ID NO: 314467 - DNA, 312 bp, Proteus mirabilis
ttgttattgctctattttgttcccgttgttggacaaactgtcgccccaattctttggtttatatttggcgcttggatgatggcaatccaatataacgactttccattcgataaccataaagtctctttcgccaatatgaaatcaacgctgaaaaaagacaaatggaacaatttacaatttggtatggtaattaatatcttcactatgatcccaatcttaaacctagtcattatgccggttgcaatttgtggtgccactgccatgtggtgtgatcgatatcgtcatcaacatgtacaagcaggccagtggtaa

SEQ ID NO: 314468 - DNA, 465 bp, Proteus mirabilis
ttgacagggctaattaactttgcaaataacattttatggggatatgtacttatttacttactccttggcgtgggtatttatttcactattcgaacaggatttattcaaatccgccattttggtcatatgttttctattttaaaaaatagtcataagtcagataaatcaggtatctcttcattccaagctttatgtaccagtttagctgcacgtgttggaacaggtaacttaaccggtgtagcaattgcgctgaccgcaggtggccctggggccattttttggatgtgggtagttgcaattataggtatggcgacttccttaatagaaagtacattagcacagttgtataaaactaaagatgatgaaggtaactatcgcggtggccctgcttattatatgacaaaaggcctcaatgggcgtattattcgccattttcctcatcattgccttcggacttgtttttaa

SEQ ID NO: 314469 - DNA, 891 bp, Proteus mirabilis
atgtttggatcttctaacgtgattttgagaaataagcgcttattcagttatcaattagcacgacttcacacttttgaagcaacgggacggcatttatcattcgctttagccgcagaggaattgtccttgacgcctagcgcgatcagccatcgtattaatacactagagaaagaattagggataaagctatttaatcgctttcatcggcgtattgaattaaccgaagaaggtgaacgtatttattgggcattgaaaaaaacacttgaagatattaatcaagagattttagatatctataatcaagaaatatctggcgtattaacggtgtattctcgcccttctattgcggaattaaacttacttactggcaatgacgatattaattttcgtggttatggtatcgatctcgctatctatttcgatgataaacacctgaaaaatctctattgtgaagatttaatctcagaatcaattattcctgtttgtagccctgaatatgctgctcgccatgaattagtaggtaatatccatcaccttgctaattgtactttgttacatgatagacaagcttggagtaataactctgattttgatgaatggcgcgcttggagtgaatatatgggattaggattatttccaaataaaagtaatatttgttttgatcgctctgatttagctgttattgctgccgttaatcattccggtgtcgcaatggggcgtaaacgcttaattcaaaaacaactcgcaaataatgaattaataatcccttttgataattgtgagtttttttgtgcacaacgctattatctggttacccgcgatgaaaagagtaacgctaaagtacaactttttattcaatggctgaaaaaacagatcttacaagggatgtga

SEQ ID NO: 314470 - DNA, 588 bp, Proteus mirabilis
  misc_feature (522)..(531): n is a, c, g, or t
atggggatcccgcctagccatattgatcatgtaaaacaatttaatcttggcactgtttttcgattaattgatgaacatggtcctatttctcgtatctcgttatctaaaaaagcaacacttgcgcctgccagtattactaaaattacgcgagaattagtcgaagcacaccttattcatgaaacagaatttcctgggttgggatttcggggacggccggctgttggtttaaagttagagagcaaagggtggcaatttttatgtattcgagtaaataatggtagcctactttttagtttaagagagcttgataatcaattagttgttgaagataccttcgactttcctaaacaaaatagtgatgcttttttgcatcatttccttgctgcaatagatacattttttcaacgttatcaatcaagagttgagcgccttactgcaattagtattaccatgaatgcaattgttgatccgattagtggcgttatttatagctctccttactatgctatccaagatatcccnnnnnnnnnntggctgataaaattcaggaaaaaacaggtgttgctgttttcttacaacacagtgtaa

SEQ ID NO: 314471 - DNA, 684 bp, Proteus mirabilis
atggcattagattattcagatataccgcagcatatcgctcgatcactagacaatgcggcattatgggcatatcgagtctgcaatgaggcattacaacaagcaaacttaatagataatcagtctattttagataataccgcgatgatcgtgggcgtctcttcagcaggaacggaagcctttctgccattatttgaacaacatattgatgatttttcgataaaaaaagccattttatccggtggattttcatcatgctgttcgagtgtatcaagtctacttggcttacgtggtggtcttgaattagtggcgacggcctgtaccgcaagccctaacgcgataggtatggggtatgattatatccaaaatggcaaaaatcctgttgtgctagcggtcggaacagaacccatttatcttcctacctttgcgggtttttatgcccttaatgtgatgaaaacaacaccaacttccccattttcaggtactcctggtatgtctattggtgaaggtgcaggagcgttagtattagaagattatcgacaatatatggtgaaattgtctcttatgcgacatcttgtgatgcttaccatgaaactagccctgatcctcgaggaaatggtgcagtgcaagttatgtataaagcactggataatgcgggtattactcctaatgatattgattatataa

SEQ ID NO: 314472 - DNA, 993 bp, Proteus mirabilis
atgaatacgccagagcatttagtacaagatggctataactatctccatattttgggtatttgtcttattcctgaagcaatttcaattatcttagcagcctgtttgcgggtttatggtaaatcgaaagcggcgatgtatgtgacgttaattgccaatattgtcactgttatcggcaatatgattgtactatatggtttctttgggcttccacaatacggtttagtgggtgttgcatggtcaacagttgtcggtcgtattattgccgttgtcttattatgtggtcttttattctatggattaagaattaaattcgatataagactattagtgatttggtctaaaaatatgttagccaaaattctacatattggtttacctgctgcaggtgaaaacctagtgtggattttacattatatgaccgcctctgcctttataggattaatgggagaagttcctcttgccgcacaaacactctatttccaactatcattattcttaatgttatttggcattgcgattagcattggtaatgaaatattagtcggtcatttagttggtgcaaaacgatttgatgaagcatttacacggggttttaaaagcctaaaagcaggtgtactatttactattggtgtggtgattatttattggtttatgcgtgatcctattttgtattctatcaccgaagatcaacgcattatcgaccaactgttacctttatttattttatcggtctttttagaaccggggcgtacatttaatattgttatggttaatgcgttacgtgcagccggagatgccaaatttccactcattacagccgtttgttttatgtggggagttgctattcctgttggctatttccttggcataaaaatggaaatgggcttaattgggatttggataggttttctttgtgatgagtggctacgaggcttaacgaatgcatggcgttggcgctctcgtaaatggcaagctaagcgcttagatatttga

SEQ ID NO: 314473 - DNA, 756 bp, Proteus mirabilis
  misc_feature (705)..(714): n is a, c, g, or t
atgtcatcagtggtgcgtaaagtaagaaaagcggtgatccctgttgcagggctaggaacaagaatgttgcctgccaccaaggctatcccaaaagagatgctacctgttgttgataaacctttaattcaatatgttgttaatgaatgtattgcagctggcatcaatgaaattgtgctagttacacactcttcaaaaaattctattgaaaaccattttgataccagttttgaattagaagctattttagaaaaacgagttaaacgtcagttgttagaagaagtacaaggtatttgtccaagtcacgttactattatgcaaactcgccaaggaatagcaaaagggttaggccatgccattttatgtgcaaaacctttggtgggtgatgagcctttcgctgttatcttgccggatgttattttagaccgatatagtgctgatctgactaaggtgaatttaaaagagatgctttctcattttgaacaatctggcgcaagtcaaattttagtagagcctgttcctgaagaggaagtatctaactacgggattgttgactgcatgggagaacatttacagcctggcgacagtaaacccattactcgtgtggtagaaaaaccgaagaaagaagaagcaccttcaaatttatctattgttggtcgttatgtgttgtctgaaaacatttggcctttattagccaaaacggcaccnnnnnnnnnnttagccaaacggcaccaggagcaggggatgaaattcaattaa

SEQ ID NO: 314474 - DNA, 162 bp, Proteus mirabilis
atgttaattgaaaaagagcctgtagaagcttatcacctacaagggaaaagccacgattgtggtaataaattaggttatatgaaagcttttgttgaatatggtttacagcacgaagagtttggcgaagagttcacgaaatggataaaatcactgcaagcttaa

SEQ ID NO: 314475 - DNA, 276 bp, Proteus mirabilis
atgcgggggtactctaatcgttcttttggtattatcgtcactcgccttgattcttatgcggaaaatcaagcagttagtgccatattaccgatcctttatcaaaacaacattgaccctattattttagaaagccaatttagccaagccaaagtagaagaaaacttaaaaatgctcgcccaccagaaaatcgatggcgtaatattatttgcattttcagggatcaatgcggctaacttagcatttgtcatgacgatgaacgagctgttaacgctttaa

SEQ ID NO: 314476 - DNA, 747 bp, Proteus mirabilis
  misc_feature (45)..(54): n is a, c, g, or t
atgatctcgatccccaatattacgcaagctctgttcctattgctnnnnnnnnnnattggtgagtgggcattaggacaatatgcgacggttaaagagttaaaagagattatcccccaaacccatttttggtcacaaaagctattattgttacgtaacttaccaagccctttccattacgcattttatgataaaaccggtgattgtattgttgtcgaagtctctgatggtaaattacatatttatgataatcctacctattgcatgaccaatggccctattttcccgtggcatttaactaatttaaacaactacactcatctttctaatatcaacgtttccagtagcacattaggtcgtattaaaatcaaccaacctgatagtggtattgcgttagcaacattacctagctcagatacttctgtagatagatttattcgtgcagtttattattcaacctattaccacaaagtttctgatcccgataaacagcttattgagcttgctcatatcatgaatcgcttcgatcgccctaaagatgcaaccattgatccactattaggtaatgatacgctaactaaactccatactagtgaattttctgtctggacggcgctaactgatttagaacgggggatctttttcttcagaggctacaacaacttaaactttcaaaagttcacacttgagtcatttaaaaatgaaagtagcgcggtttttattaaggtcaatttggaagaggcattgtaa

SEQ ID NO: 314477 - DNA, 291 bp, Proteus mirabilis
  misc_feature (274)..(283): n is a, c, g, or t
atggagttttcttctgatgagccaacgtctattttagcttattatccacaaggtcatacttttcagcaaaatgcccctgatggaactcccggattaaagtacagcgttaaatatccttttatggctattaccgctcctattaacttatcgggtaccaaagatgtacttgaaggtgtaaatagtcagggactctcttttagcttaaatatgctacctaactctaagttagatgatctcgatccccaatattacgcaagctctgttcctattgctnnnnnnnnnnattggtga

SEQ ID NO: 314478 - DNA, 264 bp, Proteus mirabilis
gtgcttatttttacttttatttatgaaggggttcctaactggagtaaaacagatggtgtggtcactattcatgttcccgagcaaccacctatcgaaacacgtttaacggatggtaataatggtcgagctatgtgtgccatcgcacgacttgttaatgaaaacggatcaatcaaagttgaacgtctcaatgaattttttaaaggccatcgcgatatggataatgcctacggatggggatttcgctggactgctggatctaagtga

SEQ ID NO: 314479 - DNA, 975 bp, Proteus mirabilis
  misc_feature (902)..(906): n is a, c, g, or t
gtgcttgacgctgagcttcttcttcagctaaacgcgcctgctctgcacgttcggcagctaatcgttctgcctctgctctttgcgcttcttggcgtgcttgttcagcttcttgctgcgcttgacgctgggcttcttcttcagctaaacgcgcctgctctgcacgttcggcagctaatcgttctgcctctgctctttgcgcttcttggcgtgcttgttcagcttcttgctgcgcttgacgttgggcttcttcttcagctaaacgcgcctgctctgcacgttcggcagctaatcgttctgcctctgctctttgcgcttcttggcgtgcttgttcagcttcttgctgcgcttgacgctgggcttcttcttcagctaaacgcgcctgttctgcacgttcagcagctaatcgttctgcctctgctctttgcgcttcttggcgtgcttgttctgcttttagctgtgcttgacgttgagcttcttcttcagctaaacgtgcctgctctgcacgttcggcagctaatcgttctgcctctgctctttgcgcttcttggcgtgcttgttctgcttttagctgtgcttgacgctgagcttcttcttcagctaaacgtgcctgctctgcacgttcggcagctaatcgttctgcctctgctctttgcgcttcttggcgtgcttgttctgcttttagctgtgcttgacgttgagcttcttcttcagctaaacgtgcctgttctgcacgttcagcagctaatcgttctgcctctgctctttgcgcttcttggcgtgcttgttctgcttttagctgtgcttgacgttgagcttcttcttcagctaaacgtgcctgctctgcacgttcggcagctaatcgttctgcctctgctctttgcgcttcttggcgtgcttgttcnnnnngcagctaatcgttctgcctctgctctttgcgcttcttggcgtgcttgttcagcttcttgctgcgcttga

SEQ ID NO: 314480 - DNA, 1929 bp, Proteus mirabilis
atgaaaaattatttgtttttaaagtacgttatcattcgtttgatggtagcgtgcctgctcagcagtttaattgttgcattgcccgtgctagcgactccgtcaaatcagtcagatttagccgataatgatttcagttatgtgcattttcgtgcggattataaagtgaacgataatgcaactagcacgaaaatcgaaaactacgaaatcctattaaaaactaagtctgcggtcgatcaattcagccaaatccgtctcggttatagcgagaaaatggaaacactgaaaatacttgccgcttatacactcactcctgatggtcaacgccatgatgtacctgcagaaaatatttatatccaagaaagttattctagcgccaatgctccactttacgctgatcgtaaagtgcgagtcattgtttttcctcaattgacacccggatcgcgtgtcgtatatcaaatacaaaaaacgcaacatataccctattttcctggttattttgatttatgggaaacattcagcgtttttgatcaatatgacaaagctgaagtgaatctacaggcacctgcaaagttgccgttgaaaatttatactcgtggcgtagaaggtcaagataaaccgcaaataaaaaatggactggcacattggcaatggcgttattcacgtagcaaaccgatgaaagcacaaacttggtctgctcaaaactggacttttagtcccaccattatggcaagtacctaccacgattggtcgcaattggctaaagcctaccaatttaagtctaatatagcagctaaggtaacaccagagatcaaaaagctagcaaatgacatcactatggggataagcgatagacgcaaacaggcagaagccctttatcaatgggcagcaaaaaatattcgctatgtggcagtatatctgggaaatggcggactagagccaaatctagcacaagatattcttaataatcactatggtgactgtaaagatcacgtggtgctccttgaggcactactagcagccaagggcattgaaagctcaccagtacttattggtatagataaaggacctatattgcctgatgttccattaattggtcaatttaatcatgttatcacttacttaccggaattcaatttatatatagatcccacagttccctttgcacggttcgggcaactaccagaaggtgcttcccctggttaccctatattattaacccgctatgcaaaattgacacgtattccaagtagagacgaacaatccataaaaagtgaattgagtgtcaattttgagcttgatatattaggtaatatgaaaggtaaaacggtaagtaaactaagcgaaatagaagaaatcggccttagatattatttttcgcagttcaacttacaaaatcgagagcgaatcgagtcacatattatgtctgattccgatatagatggtagtggtcagttagtcatggatgttaaccctgaggatctcaaaaaacgatttggttttagttttatttttaaggcagacgactatattgattttagtaatatgggagcgattacaatccccaaacctcctggaggtaagtcattccgagtgttgcatactaaaacccttgcccccactaatcagacaccattttattgcacgaaacaaatccatgaagaaacttaccacttacagctaccaaataacatctccatcgtctctgttcccaaagatcaacagtttcgcaatgtcgcaggagactaccaagtcaaatggcaacgtaatgggcaaaaggtaaccgtcaaccatcgtcttcacctcaatgccattcacggagaggaagcgctatgtcaaccccaagattatcttgcattccgtgaattattccaacaggtacgccgaggttttcgtggacaagtagtatatagcgagcctatcaataattaa

SEQ ID NO: 314481 - DNA, 1242 bp, Proteus mirabilis
atgccattacatccgattacaagtgatactacatcatctacatatacagcaccaatagatatagatatgatacaacaagagcggaataaattatgtcaggctagaaaccaactgtcggctaaaatttcaaatataaaaaatacggtaacccgattaaatgcagagcggttggaatctgaaaaaaattttattgcagaacggatctctttttgtaatttacggatgattgcacaattgcacggggcaaatacacctattcgtctgaaaaacgatcattttaaatatggtgaggcaagtaattttctaaaacagaaaatttgtcatcgtcgttatcaagctgagcgtgaggctgcagctcaaaaattcaatgtagaaggagatgtcatagttgcaggaatggcaataaaaaaacaacaggaagaggttattaagatcttcgatcgtatggttgcactagaaggagtggttgatcaaaaggctaaggctattaaccagcttaatgtgaagaaatacaatatagagaaaaaaatagataccctcactgaaattctaactgatgcaagaaaggcggaagagaagcgacaaaagatttatcaaaatttttctatgctttaccaaagcaatgcaggatgtaaagctattaatcttgaagctcgtcatctatttggtcactctcccatagctgggaaaattaatggaagtgaaatcgttgaagaataccgtcgagttcatggcgataatatttttagtcggggcaataattatcttaaatcgatcataaagtttaattgtagcaatttaagcgaacttgtgagaacgagtgctaaagagtggtacaccccaagggaaaaaaatatcacaacatatcgtggtcaaggaatgactcaaaacgggctacagaagttagtctcacaattccgtaccgataagcataacggaactgagacagtctatcgacttggacaattcttctccacaacgacagatagacaagttgccagagattttgcaaaccgcagtcaagatgaagccaaagtcatgtttaaagtgaaaggtaacagtagcaatggattagccatcccaggaggattgtcatttgataatgatgaaggtgaatatctgtattctccactggcgtgttttaaagttacagctataacccgatcaccatcgaataatacttatactgttagcttagaagaaacctcaaaggctaacaaagttagacttttaccttattaa

SEQ ID NO: 314482 - DNA, 432 bp, Proteus mirabilis
atgaaaatcttgacgaacccacaaccactaatacagaaaataactaacgaacaaccatgctcgttcatacgaaaagctcaaggtgataaaaaggtcgattatacaaaattttatgaatatattctgaaagaacgcccccaatcgactaaagagtttcttgtgctattaaaagagtataatttcaatcatgaaggtaataccactcgcctgaacacatgccgtcaagccgcactacttaatttgattacacaaatgaaaaaagatagcgagctaaatgaatacctcacgacggtagttaaaccagcagcaattgcttatatcggtactaataatatttaccaaacttttttgcttgaatcttttggcctacttgataatagaccagaagatgaagttccagaggatactcgttttgaccaatttatttattaa

SEQ ID NO: 314483 - DNA, 648 bp, Proteus mirabilis
atggaggcattatatgcgcaaaacttggttgaagttgctcaaaaagaagcacgaaaaattattaaagaagcccaaaaacagagtgaatatgaaaaacaatctggctatgcccatggttactacaatgggttagcggcagcgctaaacgctatcgtctcctttatcaatgattatcagcaggtttgccaaagcgtttgggatgatgaactggttaaattgcaagacaggctctattcatttatcactacaccagatgtttgtgaaggcctgttaaaacagatgttatctcaatgcccagaaaaatccatcttacagttaaccattccaccttccctcgtttcgctagagaaacagataagtgccgaacatcatcaggagattgaattaattaccactcaaaacgcattactttcggtacgtttcaaaaatcaggtgatattttttgaccctttgcgatatagccatgaattaactgatttacttaaacacggccgctatatgcaatacaaaaatcaacagctagagacattagatagtgaaatacgtaaagcgctctatctagtcattgacaatataaccgttccttcacaggccaataaccatgaaaatcttgacgaacccacaaccactaatacagaaaataactaa

SEQ ID NO: 314484 - DNA, 561 bp, Proteus mirabilis
atggataatatgcgacttcaaacctataaagtgatgtatgagccagcaacatatttgcatattagtcgctctttcggtagctatgagcaacactcaacagccatccgtcgtatttataatcaatttattatcgaacgtttccagctaccgatatcaatcgactttccggttgcagaaaatacattagcgaatgtcatcattcgccactgggatatattgccaaaagccacttggtatatcggttgttatttttattctcaagcgttggtattaacaggtcgtttagatgcgctcccctcagggctaaaagcttttctaacactttcagcattatacccaaataccactccctgctctctcacattgctagatgatgcagggctaactcgcgttggtatcgccagtatagatcgcatattaacactttatgctcccgctttagcgccacgttttcgtctactttttccagaagacgcgagcataaagacagatattccaatatttgatctttcccctagtctgttaaaaatggtatttaactatgcgacgctccctacctga

SEQ ID NO: 314485 - DNA, 753 bp, Proteus mirabilis
atgctaaaccggacgtttgataaattcaaaggcctgcttatttctcttttcttggtcactctattagcaggctgtcaggatgaagttctacttagtgaccttgatcagcgtcaggcaaatgaaacgttatccgtattacaaaaacaaaatattaacgccattaaagagtctcaaggtaaaggactttttcgggttaaggttgctaaaaatgatcaggatatcgccgttcaaatccttcaggaatacaatttaccgagtccaaagcggtttgcagtttctgatgcctttcccgccgatgcgttggttgcctcaccacaagcagaaaaagctagactgttatctgcgatagagcaacgcttagaacaatcactaatctctctagtttctgtggttaatgctaaggttcatataagctatcccgttaataatactctgcgccaaaaagtccccagcagagcatctgcgttaatcatctatgaaggagatattgatgcagatgaactgagcaccgatattaaaatgtttatcaagaatgcctttaacgatctagatagtcgtaacattactgttttattgtttaaaaaacaggaaatcgtgcgttcacaaccatctgatacttcttcgctcgttcagctttctaattattactggctagctttactgcccataatattcattgtgatatttttagcttatcaacgcaggaaaaaaaatatactccatgatttaaaaacaaataaggcgacggagtga

SEQ ID NO: 314486 - DNA, 276 bp, Proteus mirabilis
atgtcattattagctattactccacttacctcaaccacaacgacccagcaatcggcaaccactgtgggcgaggcaatacaacgtacctttacccaactgtactcgcatagtaaccaaagttatcagcaagttgccaccatggccacgggaaactcaacgcaagatttaattggcatccaagaaatcaccggagactatgcaattaccatgaatctagccagcaccttggcgcgcaaggcgctaactgcggttgaaacagtgatcaaggcacaataa

SEQ ID NO: 314487 - DNA, 237 bp, Proteus mirabilis
atgcctgctgacggtagtatcaataagatccatgctacttttaaggataaagctcaagaacatggcacagctctaaatgatgctttaacaaaacttaaagacgatacatctgatgccgccgcattagccgattatcaggctaagctctcagagtataatattactcgcagtgcgcagtcaggtgctattaaggcctttaaagatatcgcccaaacgattatcggtaatatgcgttaa

SEQ ID NO: 314488 - DNA, 1254 bp, Proteus mirabilis
atgacaaaacaatttagccatacgaataatgaaactgacattagaaaagaagatgaggaaaaaggatccgcacaacaaagtggattatactcattacttattatggtgggtccactttccggtcaagagctgttattaacgccacgtcgttatacgttattctttggcttaagtcacgatgaccaaagtgccatagactcgcctcataatgaattagtaactataccattatatataccagtacagtcagacggggttcctctcgttatagatcttgatttaacagtgataaaggataataacttttcctattgtgttcgcactaatagcaataatttgttatcgatggaatctgcaaaaattaacagcattatttcctacaatgcactgacattttttgccatcaaacatagcactgagctatggtcagagaaaattactcgcctttgttcaggacgaggaattacacaacaagtaagtaagaagccaaacataaaaaaagcgttattcgctattatttttttgtttatcgctattctttctgcttatggatatctagtctctagcgataacagtgataaagctgttgatggtattaaatctatagagagcgaaaaacaacaagaacaagaacaagaacaagaacaagaacaagaactgaatattactctacctactcaaaacgattcatgtgccttagcaataaataaaatttggcaaaccctgcataaggatgaagaaggacatattagtcatagtgaagcagagaaaattatcaatgctgctaagtcacaaggacttatacacctattcgccaatatcgtttcacaacaatcattagtggttaattatgtttatcgtgatgctagcaatattcaagcattagaaaaaacaattagcagcatactcccatatcaatgccaagcaacgttcaatggttattcgcatagaaaactaattaacgatatcagcaaaagattacctgaggatattgaaggaattagctttcgtcttacttacagcgcaatggttattaatattgcagaaggcacagacagaagcggttttaaagatctcaacaaatatataaaacagaatacatcacgttggggaaataattttatcaaaattatcgaaaccagtaccaatcctatgtttattgataaaacatattttaaaacaaaagagaatggaggatatatatttctaactgactcacatcgctattttcttaaagaaaataaattttattaa

SEQ ID NO: 314489 - DNA, 789 bp, Proteus mirabilis
atgaagatgtctgtgtacatcaatcaatatgcgcctaaggatagattattaagtagtaaaaaaaggccaacagaaagtaataaaacgatatttcttgctattttaaagggagatgagggacagctttaccttaactttaataaaggaaaggaaagtattgtttcgaataaaagtttaattgggtatggatacgaatttgaacaacgtgttatttcgggagaatggatctttgatgaaaagctatttttttcctgtgcacgtttattagcttgcatggatattgcccttaatttaaaaaaaagtggcggtaatatatcagtaccaaaaagaacaaaatcgttaaaatatcatcagctaataggtgagaaattacccttctcattagaacattttcttattaatgaggcgctaaaagaacacagtgaaatttcctttttactggatgaattaagacaatgtgaaagctattggttatctcaatatttacttatacatctagcagataaaagcaacgatgttgcagcactagaaaaacattatggtgtttcgacaacgcattttcgccgtttgtgcaataagtatttagggacatgttgtaagagtcaattacgtttttggcgggcaacctctgcggtactttctacgttaacggaacgtaaatctttaaccaatatcgctattgataatggtttttgttctccatctcatttttcaaacgaagttaaaagactttttggtttgagcccgcgagagtttagagggcttaggaaatatttttatgacatttaa

SEQ ID NO: 314490 - DNA, 1695 bp, Proteus mirabilis
atgacatttaatcggaataaatttgctggcattgtgctagcaagttgtatggtggttagtatttttatccccagtatcgctaatgagcgactactaggagacgccaatttctcagcgactgaacacaataataatgatgtgtttattgcagtcaatagcagagtaaagcagttttttgatgtattagccgacaaattaaataagccatttattcttagtgccgcagtacaaaaacagcgtattacaggtaattttgatgtctctgaaccagaaaaagcctttaatgattttgttcgtaaaatgtcgctaatttattttaatgacggaaatgctatttatatctatgacggcagtgagattactcaacagatgattaagttgaataatatctcctttcagcgtttacgcgaatatctacgttcggtaaatctttatgatgaacgctatcgtctgcgcccaggaaaagatggtcggacattttatgtgtcaggcccgccagtctatatccaactagtgcaggctgctgtggaatatcttgatcaaaacagtactacagcagcgatatctaacagtagccgattaggcaatgaatatgtgcgcatatttgaactgaaaaatgtgtttgttaatgatcgtagctatagtacccgtgggcagtcagtggtactacccggaattgccactgtattgcaacagatgttgggaaatgatgctaatgtcgctcaaagtggtgtaagtctgtctgatagcactttgaatactttgcacacctcctcctcaatagaagaatttgaaaagccgattgttactcgagtcaataatgaacgggttatattggttcccttgccaggctcaaatagtttattggtcagagggagcctatcaggtattcaggtgatcgatgatttgatcaagcagcttgataagtcaaaacggcagatagagttgtcgttatggatcatcgatattgctaaaaatgaagttgataaattaggtgtcgattggcaggcttcatatgacatgaaaaatggtggttttttatttaataccagtgagttaactgtagaaatgggcgcaggctttctcgctaaaatcaatgcacttagtactaatggaagtgcgagaatggtttctcgtccattattattaactcaggaaaatacaccagcaatttttgataacagtaccaccttttatgctcaattacgtggtgagcgtgttgctactttggaatcggcaacatatggaaccatgataagtgtcttacctcgtttaacggccaatgcaaaagaaattgaaatggaagtcaatttagaagatggcgccggaaagaaatctgatagtggtggagcggaaaccattggctcattacccgtaattaatcgtacaactattactactgtagcgaggatcccgcacggtggtagcttgcttattggtggttatacacgagaagacagtgatgacagcgaaagcaagatacctttattaggggatattcccttaattggtggactttttcgctataacgcaaacagtaataaaaaagtagtccgcattttcatgttgcaaccgcgggtggtcaatagcagtactgaacgcacgttgcaatcttcatttggtagtgatccattttcgccggtggatgaagaaacaagaaacgccattgataatttgaaaaaatatatcaggtaa

SEQ ID NO: 314491 - DNA, 1068 bp, Proteus mirabilis
atgattagcgtacatggttcattagttacccctaagcagttagaacagcaacgcactaatgtttcagcggaagtagaacctgatttagtgagtctgccgaatattcttagtcaggtacatgatgttgctgatgatatggcgatgctgatgtctcagttcggtcgccgacgagatctggaaaagaaacgtgaggcatcaagtgaaaatatggatcgcgtccttgatcaggactccgatcgtaaattatcgcaaatattaaagctactggaaaagagaggcacaaccttaagcgaattgatggcgatgctgagaggattattcccagatgatagcgatcaaattttagttctacgtgaattattaagacgaaaaaaacttaatgcagctatggctgcagaggtcgaaggagagattgattcactactcaacggaaataaagccaagcaaactcgagctggaattaatattgctttaaaagcaaaacgttttggtgagtctctgtctttagcgccattaatgttgcgagacttatatcgcgattttattagtatggatgttccccctatttatttatatgaagattggattactcaatttggggagtcaaaaagggatttaattcttaattttatcttacattcaatggtgtgtgatatgcaggcacttgtgccgagttgccaacatgccgaggaatttggtccacttctgtgcaagatcaatgatattcgagcgattttttctgctgataagacgtatttaaatggtctgagcgaattaaagcttgggttagaaagagaaaaccatcgtgagagtatgctgaaattgtttatttttggattaaccgatgcagaaaaaatgagggaatactttatttctctattacagggatcccttgagagactgttactttcacagaaagcgatgcttgtacaacgactgttagttttttttaactctatttcagaaacattatttcttatgaaagatactcgtgacggagttcatagcgtattcatcgagctattgactcagcttcatcaaaaagagttgcagttgcgtcgcctttaa

SEQ ID NO: 314492 - DNA, 414 bp, Proteus mirabilis
atgtcagttgatattgcttttttcgtgaccgaggctttgaaaaaaatgggtagagaagatttgatggtaggtggtcataggctggataaccattcaactattactattagcttatcgaacatgcctaatatcaatatcgcctacattgatgattatccagtggtttggacaacctttggtgtaattgaaaataatgtattaagtcagttaagtgaaccactactgatggcatctttaactagaaatagcgacgtatttcatttggggcagcctgcattgtgccagacggataatggtttggacttaagggcaacatttactgaaatagggctacatgatattgatagttttatccgtgcattagaatatttttatgactgtatgtacaacatttatgggctactaaacggataa

SEQ ID NO: 314493 - DNA, 1296 bp, Proteus mirabilis
atggattatcaaatgcatacgccgtttaaatgggccgctcatcctactaggatccaaagcggtatcattgaagctccgctaaaaaatgttgccatcggagaaatatgtcttattcgcacaagtgttggtcagaaaaaaacaattgggcgagcacaggttatcggcttttatcatgacaatgccatacttagcttgatggggagcgacaggggcttttcattgaatgtgatcatagagcctacggggatgccattctccgtaaaattaggtgaaggaatattaggcagtatgatcgatgcacatggtcagactttaacccgattttctcccgtcgtttcatcttcttggcactcttatcttgttcaacgcatggctccggagttttctcggcgtcgaggcatcaataccatttttgcctcaggtgttcgagcgatcgatagtgtattaacctgtggtaaaggtcagcgaatggggatttttgctacggcgggttgcggtaaaacagtattgatgaacatgattattaactccgctgaggcggatgtttttgttgtcgcactagtaggagaacggggtagagaagttacagaattcgttgaagaacttaaagattcgcaacgtagtttgaaaaccgtggttgtatgttctacctctgatcaacctgcggtcgatcgttgtaatgcggcattggtggcaactaccgtggctgagtatttccgcgatcgtggccaacatgttgtgctttttcttgattccattacccgttatagcagggcgttgcgtgatgttgcgcttgccgcgggtgagttacctgcaaggcgcggataccctgcatcggtatttgagcaactacccattattttagaacgcccaggaaacacatgtgatggtgcaattacggcattttataccgtattgctagagaacgaagacgaatcagacgcgataggagatgaagttcgttccattctggatggccatatttatttaacacgaaagctagcggcgaaagggcattatcctgctattgatgtgctacgcagcacaagtcgtcttttccaacaaattactgatgaaaagcatcaaacagcggctcgacaatttcgcgagctactcgctcggcaggatgaattaaagttcctactggaaatgggggaatatcgccgtggtgagaatacacagaacgatattgccattgataagcagccggcaatggaagcctttttgcgccagtcttggcaacaaaactcatcttttgaacaatcaattcaggggctatatgagctcgttggctaa

SEQ ID NO: 314494 - DNA, 510 bp, Proteus mirabilis
atgagctcgttggctaatctgcggggttatttgcgttttttaaataaaaagcaggaatgtttatggcttagatttaacgcacaggagcaggagtggcaacaagctcagcgacagtatgaacagaagaaaacaacactggaagcgttacgacttcagacaactgattttgaacaaagtggtacgttatcttgcgtccaagtatttgaaaatcgccgtaaacaagcggtcgtgttggcaaaagttcatcagctacaagcagaattacagcttgatgaggagaaaatattacagttacacgaacaaaaacggcaggcaaagataatttggcttgatatacaaaaaaggttgaataatttttcgcgattttttaatcgtgagaatgctaaacacgatcgtctccagatgcaatgggatgaagatgacgtacaagaggtagctatttatggatcatataacggtaacaaacagagcgatcccaatcagcgtagacgagtcgtctgtaacaaataa

SEQ ID NO: 314495 - DNA, 1764 bp, Proteus mirabilis
gtggataaagaacaacgtcaaaaactggaggagttttggcaactacatcgaaataaggaaaaagagatctcatcggatctttttcctgatattgatgctcaccatggcacgcctggtgatgtggaagagtttgttacactcgaagtgaagggcattgtaaaacaagatgagtataaggtaaccattgaagaacccgttttattatttaatccgatgcagttaaccgataaagccgacgttaaaaagccaatagtagcctcgatgactagacagactgaaaccgaagaaagcaccaagaaacagcctatggtaggaagctcgatcttgggagttaacaaaaaagcgcctgttatgtcttttatgcaagaaaagctaaaacaacctaatggtgccgagctaaaaccacgcgccatgccctcaatgagccaatcggcgcaggtgcaagcaagccgtccgacgataacggcatcaacggcatcaatgacatcaacacagcgcttagatccagccagtttaaaggataaaactgaaggtaaagaggcaccacggcaaggagacaacaaaaaggtgtcggtttcagcagggagtcaaggggctagcgtttcagtgtcaaaggcagagtctgacaccacaaaatcttcttttgcaccagaaaaacaactggctagtgagccggagctaaaaccacgcgccatgccctcaatgagccaatcggcgcaggtgcagacaagccgtccgacgataacggcatcaatgacatcaacacagcgcttagatccagccagtttaaaggataaaactgaaggtaaagaggcatcacggcaaggaaacaacaaaaaggtgtcggttgcagcagggagtcaaggggctagcgtttcagtgtcaaaggcagagtctgacaccaccaaatcttcttttgcaccagaaaaacaactggctagtgagccggagctaaaaccacgcgccatgccctcaatgagccaatcggcgcaggtgcaggcaagccgtccgacgataacggcatcaatgacatcaacacagcgcttagatccagccagttcaaaggataaaactgaaggtaaagaagcaccacggcaaggagacaacaaaaaggtgtcggttgcagcagggaataaaggggctagcgtttcagtgtcaaaggcagagtctgacaccacaaaatcttcttttgcaccagaaaaacaactggccaatcagacggggctgaagtcacgcacaatatcatcgacaagtaaaccgactgaggcacaaattagccatcagcctatagttttatcagtacagagctttgcctcaacagcgctaaagaatgaagtagagagtaataaagatgcatcgttacaagcagaagctaaggggagtaactttttcgtccagttaggaaattctgacagcacttcattgcgtccagctaacgcagatgatcattcgaaaacaagacagccgacttatcattctacttacacggcatcacaaggagagggtgcaacaaaacagggcgctcagcttacttatccctttacccgttggggaaaagagcatcaggttagactttcgtttagctcttcacaatctttagtattaattccttccagtgaacgagtctatcactctgttcgcaatggtggcttgtctgtgaaagaccatttaatcgtcatagaacctgaaacttttggggaaaagccggcattaataacaaattatgaacagaatgatgaagatagccaagaacagacattatga

SEQ ID NO: 314496 - DNA, 927 bp, Proteus mirabilis
atgagacaacagttaaagttaagaaagcttgaggataagcggttttggtcaacgcaaacaatgatagtgctgtcttctcagttgccctgcaaggagactaatcaaaatgaacgctattttcaagtattactcactcagggaaatgtccaaattgaggcgtttttatcttgtgaagaggcattaactgttatttggcctcagagtgcacacttcccttgggcaataatcccccaaaattacttgatggacgtattaattcaatatgttttacccgtaacaattgatggttttgagggggaattttctgttacgccacaaggcattgtacaaaaaatagcaaggacagcactttgggttaactcttctcttggcgccctttttattactgatgccagtggactgtctctagcttcccctgagcgttgtgctgcggttcccataatagtcgactttgttcttggtatcactcgcttatccatcagtctacttaattcaatagctgtgggagatattttattaatcgaacggatggtcaatttattgactgctggcgataccgtattacttaaatttgctgaatattcgagagagaacgtgatgatggaaaatatatcagtcagtgatgaactttttgtagaagaaagttgcgtagaggaaatgtcatccactaaacctgcgttcgatgtgaaaaaactgaacgtggacgtacgttttatcttgcataaacgaatgatgagtatcgaagagttatcggcattacaggcgggtagtttggtttcacttcctgaaaataccgagcttaatgtgatattagaagttaatggttacgtttttgcacgaggcgagttggttcaagtaggcaataggcttggagtagaaattcagccagagcctaataagtcaattgttgaggttgagcatgattga

SEQ ID NO: 314497 - DNA, 258 bp, Proteus mirabilis
atggacataacctatgtcgctaataaagccctctatttggtgattattctgtctattgtccctgttgcggtagcgaccttagtcggattaattattggtctattccagacggtcacacaggtgcaggagcagacattaccatttgggcttaagcttattgcggtatttgtttgcttgttgatccaggcaggttggcttggtgaaaaaatgcttaattatagtaaagaaattttaacgctcgcattggctgggagctaa

SEQ ID NO: 314498 - DNA, 777 bp, Proteus mirabilis
atgttgctattaatgtcaacatactcgttattctttcaggagttatttcgtctgctgatcctgttcgcgagacttgcacctatttttttcattctaccgtttttaaatgatcgcgtattaaacggattattaataaaaaacgtagtgatctttttgcttgcgttagggctatatccagctattccatggtcagactttcctgaagaaatcaacgtgatttggctcattagtggtgaggttatcttaggtgtaataatgggactgttgctaggactacctttttgggttgcgtcagcgttaggtgaatttattgataaccaacgcggtgccaatatcggtgatatggttgatcccgcctcaggctctgaatcctctgaactatcttcgtttatgggacttttttttattgcctattttcttgaacaagggggaatgctggaacttattcacgcctttctggaaggttatcgccagatcccgcctggctattttagcggtgaaatagagataatgacgctggcatcttggcttaatcacatggtagtgatatccattgttttagctgcaccggtattaatcttgatgtttatctctgaaatcgctcttggtgtgtattctttgtactgtccacaacttaatgcgttttcactttctctgacgataaaaagtttattggcatttagcgccttactgattattttcgccccagcacttcctgaagagcttcatggtttattcgggtttgacatgttaaagactgtcattccagagaggtaa

SEQ ID NO: 314499 - DNA, 1050 bp, Proteus mirabilis
gtggcagaaaaaacagaaaaacctaccccaaaaaagttgcgtgattcggcaaaaaaaggtcaatcgtttaaaagcaaagatattatttccacttgtgtttatctaactggtgtcactattttagggttttttaccgatttactcgattttatgcgtttttatcagcatcttttgcaaaatccattagagcttgatattaccgcctttttacacgttttagcccaactattttttatgttgcttttgcctctttgtctggggggggcggtggcggccattattccttcattaattcagtcaaaatttattctggcaaccgaagcaataaaattagattttacaaaattagatcccattgctggatttaaaaaactgtttggtaaaaagacactgaaagatatagctaaaactttactttatttaattatttttatcagcagttgttatctatttattcgattatataccagagatattttccttgtgtaccgtgctgatttatggattgtgattagggagtggtctggtttaacattaagatttatttacctttttttactattatcactacttctactccttatcgataccgtcgccgaatttctgcttcatttaaaagacatgaaaatggagaagcatgaggttaagcaggaatataaagacagtgaaggaaatccacaaattaaatctgctcgccgacagacccatttcgagatcctcagcgaagaaacacgagctgcggttaaagaatcatcagtagtattagttaaccccacgcatattgctatcgccatctattttgatccagaccaagaaatattgccactggtcgctgtgcgagccgctaatgctcaagcactggcagtaaaagcttatgcgtgtgaaatagggatacctgttgttactgatgttcgtttagctcgtcgtatttatcaaaattatcgtttgtatgaatgtgttgcacgacaggagctaatggatgttatggatgtacttatctggcttaagcaggtggaaatggctggaatagaacgaacggaggaggaatag

SEQ ID NO: 314500 - DNA, 555 bp, Proteus mirabilis
atgagcactaagccaacgatagataatgacgaagcaaacgttgaaaaatacgtacaagagtacaccgaactagtgatggaagcgctagaggaaggggcaactctaaaagatattgaaggtatctccgatgagataatggaaggaatatatacctatgcttatgacttctactctcaaggaaaactggatgaagccgaaacttttttccgctttctttgcttatacgatttctacaatcccgattacatcatgggattggccgcggtaaaacagctacaaaaagaatatgtttctgccatcgatctctatgctttggcttatatctatgccaatgaagattatctgccggtcttttatgcggggcagtgtaatttagccttaaatgagcaggaaaaagcaatatgttgctttcaactgattattgaaaaatcaaaagagagcgaactggtaaaaaaagcgacaggttatttagcttcattgcaaaaattatcagacaacgacaagagtaaaaatatggggtctgataaaggcagagaaggtgataacaatgaatag

SEQ ID NO: 314501 - DNA, 2142 bp, Proteus mirabilis
atggctgatataaataatctaaatttgaaaactcataataatccgctattcactgacaatatagggtctagtttcgggggggtaggtaagaccttacatcaggtgaaccagaatgttctaggaattttaacggaactagcggaaaacaccattgaagaagatgagaaaaagcagaaaagaaagcgtagagctgacagcgacctattacccaagctacgggcaccaagtaatagtgtaggggagaaaaaagctattactacgccgagtgatggtaatttgcgcatggttgcagcctcgccgtcagcaagtagcaacaccaacacgcaggcgcaattgttgctattgatggcaaaatttgagctgttagtaggtaaaaataatatcagaagtctgcaagataatttacagcaatggaaagtacagtcgcaactagagacgcaaattaaaaaggcagaaaaggtttcagagctttataacgaagttattaaacagcttgaggggtataaagaaacatttatcaatgcttggtggaaagtggcggataatctagcggatagaaccaagactacatcccgagagctaagtcgaatctttgttgattttggtttgggcgaggagttttggggaaagattgcgggcaaaaaaagtgggcgcgttaaaaataaggaagaattacgagcgcattttgagcagcagtttaactggtttaacactgattttaataccaacgatatgtcgttaaaaaatctggaggcgatgaagaaaaagatcagtgactttaaacaaggtatttttaaatataccatccagttgaagttcggtcctagtgatagtggattaaaggtgtggcagggtaatggtgtcgatgttgctgattggtttgcaccacaaacagcagattggtttaagtctatagactcctctttagttggtaaccgtaaaccattggtgggaggtgatagtgttcgtgcagcacaggaggcttatgaaaatatatattggaatacctatgaactaacggcaaaactaagaaaaatcaattctaatacagaaatagataataccctttcagaggcaaatagtctgtttagctccctgcgagtagatatttttaagtttaccgttgatatggagtctcgagggctggagggcgcggcgaagcttgcttatctgatggccaaaatgcgcgaactgctgggtaatactatgctggaaggaatgaacagtcaacgtgaaatattccaagaaatgcaacgtgtagcccaggaaaatgcagaaaagcgtgctgaagaggtagatgacaagttacgtaaggcagaagaagcgcgtaaatgggctgccattggtggcaagattttaggctggctcgcggcggtcgctggtgttgttggtgctatttttacaggtggtgcaagcttagctttagctgcggtaggaatagcgctactggcggcagatgaaattgttcaggcaacgggggggcagtcatttatggataaaataatgcaacccataatggatcaagtgatgaagttggtcgaatttgtcgctgatattgcaagcaaactattaaaagagctgggggcgggagaggcatcagagatgattggaaatgttatcgctgccgtggctgttgcactggcaatgattgccgctgctgtggtcggtgccaaactagcaggtgttgctggtaacctgatgggcaaagtgattggtgaaggtgtaaaacgctcgattaacgatactattaaacggatcactcagaaagtcattaataagtccattatgcaggcacttaataaaatgtttgcgcagacaaccaagaaaacaaccaccaataccttagtaaaagttgggacgcaggctacagagttaaccataaaggctggaagcagtacgatgagcgctggtcttaatattcatgccagtaagttagaaagtgacctgactaaacgaatgggtgacctcaaagtgatcaatcagcttatggaattgattgaacagttgattaatcaggttatggacgcgtttattagccaatctaaaatgctggcggaactggtacgaaaaattggtgaagtagggcagcgtagcttaactactgggaaaacgataaccaataatattcaacgtatggcttaa

SEQ ID NO: 314502 - DNA, 1095 bp, Proteus mirabilis
atgaccactccaatcacaacgaactacacagcattaacacctataagaaatggtagtactgaatcggcggttaaaggggaattacctcagcagatattagaacgccagtctacaaatcgacaggttggtacacttgttgctgaaaatgatctgcaaaaaacacaacaagtatcagaaaaaatggtgttgcgtccaccgctcatggccacagataaagttatccaaccaaaggaattactagatagctcattgtttgagattgatagtagcaaatatagcggtctgaaactgatctctagtagagatcaggatgttttactgctattgatggagtttgaagagaccatgcgaactttagccaaagggaatcgtaaactgggtgacaaattggctgagacaatgatgaattcagctaatattggtaaatcgagtaaatataaagaagcccaaagtatgctccaagctgctgcggtaagtgctagcttagggataactatgacagcagcaggtacagcaattagtttaaaagggatgaaacagaaagttgataataccaccacaaacatgaagaccactcaggaaatttcggcggatttacgagctaaaaaaggcgaactctcgatgctgaaaatggaaattaaacatagtgatcatatgcccgccaaggcaccgataaaaaatctaaaaaatgaatctatgaaccctgacagtcgtcctcagcagatgcaacgtcttcaggaattaaacacggaagttaatgagttaacgggtagagccaatattttcaaagtgaaatcggatgccggagaactcaaagcagagaagaaaatgacctatggtagaaccactatggatattggttcacctattagcaatatttctagccaagggattgcagttgagcagttaaaagagcagggtaaccagaagattttcgatgctgatcagcaattggcttccagtgctcgcgatacccagcgtcgtgaagaagaagcggttaacagtgtaaaagagaagatgaaacaagtccttcaacaaatgcttgaggggcgtcgcactacggttagcgcaatgagcggtaatttacgtgcctaa

SEQ ID NO: 314503 - DNA, 1140 bp, Proteus mirabilis
atgctggatacaaacgtttctaatcttaaaaatcaaacgagtggaatgccacgtttttcaccggagcaaaaccagttacaaactgccccattgcagaatattaaaacaggacaattgacatcattgtcctctgcgcaagtgctgactgaactgaatggtacaggcgagaataacgagcaagtcaaactactgacaaagcgaagcactgcctaccgtgaaaaaattgacagttgtattagtcaactgacagatgaaagtcggtcagcgagagctttttatgagttagagcaattattagatgagaagggtaaacaccccttatcacgtagctatgcagatgcacgtaacgctctagcgacaccttcccctgagacattacggctattaaatgcgtcgggaaaagatagttttggttctcttggggatctatttaatgatatcagtcatacattgactgatgctaaaaagaattatctcgatttttatcgcgaaagttttcaaaagtatatggaatttttccgagaaatcagcgcctattttacccggttaggcgaatatgttaaggagagtgatgacacaaataaagttcagttactttacaagaatatggttaaagagttagaaaaactccatgataaatatgagaaagaaactgataatatactttatgagcaagagatgcggtttaccagagatggtaataaatatcggctggtaggggataacacaggaaaggaatacagtgaaagtgaggcgctagcgatgatgaaggtgtttcgtaataagtttgataatatcgccgttggtacaacggtagatatttctagaaatattgaccgagacgcgttaaccccaggattaaccattaaacttaagcttgatatcactcctgttttctctgcgctaaaagtagtatatcgactcattaatgggtttcctgatacgctcggcatttcgcaggtacgttttaacaccatcaatacagcattcgattccgcaaaaaaagatctgcaagcgacgctagatgaattgtcacagaagtatagtaccgctaatagtaactatgacaactttgtaaaaattctcagtaatacgatgaatgctatgctggatactgcaaaaggttttttacgtttttaa

SEQ ID NO: 314504 - DNA, 2820 bp, Proteus mirabilis
atgcctatactgcctacactcatgagaacaaatagctcacctgcggatatttgttcaactatacctaagcaattatatgatagcccagcctcaaacactttcaataccactataaatggagcacacaatgtcacttcagaattagctccagtgcgggatgtgtctttatctcagggggctaggaatcaagttgatccattaagtctagaccgaacattaaatcaaaaagcgcaggcgtttgctgtcgatacactgaatacctatgccactaatctaaaagagaagtattctgctacggcgtatcaggaagcattaaatcgtgcaatgcaacgcagtgggaatttcgggttaggagaaacttatacccgcttgcagaccttcgcttatctagcttttaccatggcaaaaacggaagtgcaacgccaagatgcgcaacacaatatgatccgattagctaagcatattatcaattcagaaaaaagtgaagaaaacggttcgggatttactcgtttttttactggacagaatagtaaaacagtacaagatgattatgctgctgcttatcatattggtcactcaacgtctaactcttatcttgaatcgcgcgataagataggagccaatatcattgcgtcgctgataggacgtatggggagcaagttagatgactttgtgaaagattataatacagaacttgttgaacctgagctgttagctaaagcgtttcgtaaatatggtcaggagatggatctaaagacggtaacaacgtgtttatatcctgatcggctacttagtcttcagcgggaaattgaagataaaatttgtcgtattcgcaccatgcataatgagtcgattcagtctcagacttataaactgcgagatttattagcttctcttaatcgaaaagagatgcttttaatggagtacgctgatacacctgtaaatgataataagcgaggtagtttaactgatgcagaagttggtgctgtaccagacgagggaggggtaacaacaccgtctgcaagaggggtagcgagggagccacgtccaatagatgaggctaaatctatcattcacactcataatcacacgcatacccatactcatactcacacgcatacccactatggtgaagagggaaaagaaacacctatttcaattattaatgataattccgctaataaaattggcaatgtcgaatatcaaaaagaaacaaatagtcctgatggtattcataatgcttctgatcttcgagagttgctagtcgatcttaatagaagggagttaagccaagttatagacggaattagtcgtcgtttgtctgaagagcatggggggcgtgagagtgagaatgcacaacgaacggctgataaagtgcgtgcgactagtctccaagaatctttgcaagccagaagtgctattgaaagagcctcacttgcggatgatgggcatcatacggagctaagccatataacggcagcaactactcacgcaactatatctgctcagaaaactgaaaatgatagagaaagtagcgtatcccaagccattaaacagcgggttgctgagttatttaccccacagggtgaaaggttattaaaagagagtgtgacgccgtttaaagtggggcatactgatgccactgatcgtaaagatcagcttaatgagtttattgccaggttgattgttccgcgtgatgttcttatcaaagggatagaagcagagcgtacggcgatagctcaagggggtgtgaatggtggttcatccatcgcggtattgacagaaactatagccaataatagagaacatccttttgctattgcgttggcaaatacctttgagcaatttggctggtttaatgatattacattcgatgcgaagccagaggttttagaattacagtctttgctacatgaaataagaaatgggtatcgccagtcggtagcgattaatcctatcggacacgaagttgtttctacttcggaacagagcgttaaagttgaagacgaaaattcgaacatttcggctctagctgggctattgaagactgcgcaggggaataacaggtttacggaagataaattacaacaaagtggtgaaagtcaccgatactcggatgtgattaatcctagtagacacgaaactgcctctactctaacacagggaattgaagctgaaaataccgtggattctggcataggtgagcagtttatacagttggacgatacggtactgacggaagataaattacaacaaagtgttgaaagtggccgacaatcggaagctgttaactttcgcggacacgaagttaccaccactcaagcttcgggcattggaactgaaaatagcgtagattcaattattgaacagcgtattggtgagctatttacgccagagggtgagcgcttgttaaaagagactttagcatcgttcagtatacagccactgtttggtggtcctggtcatctagaagagcaacttgtcgagtttatttctcaacttactatcccacgaaatatgattatcaagggaatagaagcgggacgtaaagcattattggaaggtaaaacagatgtacccatagcgatgctgtcagatgctattgcggctaatagggaacatccttttactattaaactggcggatattgtttcgaaatcaacatggcttaatgtggctactaccacaactcaaccagaacttgcaaacttactgtcgctactcgatgaaataaataatcataaccctcggtgggagcctctaacacctgataactatactgtactaactgttgatggattacatagatcactcaattaa

SEQ ID NO: 314505 - DNA, 1251 bp, Proteus mirabilis
gtgccaatgtcttttaaaaaaagagaagcaatagaggctatttctgatttggtacacagagatagcagtaaaaaaataaaaaaatttaaaatttatacaatattaccaaagggaaatataggtgattgtcatcatagtgaaggtatcgtgcaggctgttttatataaattaataaatgattatcaatttgactataaagatattcagtgtatttcttatgaagctagttgttgtcgtgaactggcaaataagaagaaattggtaacagaactctgcagatggcaacaggagaacgtaaatgataaaggggggatcactcttattctagcggtaggacctaatgactattttgcagagatattgggacaggtcatagataaacctaatgcattatccgtttacagtacacatcagttatcttcacgaattacgtcgttggtaaagttaccgcatattatagctgtgcctaggtgtagtattagtgaacaacaaatagaggcattaaaagataagacaacgcttattttagttaatgatattgctcatcccttagataatagagcgttatatgaaggtagaaaaagttatttagctgcgggctatcggccgataggaaaaatagataaaaatacgattggtattattctaggtggtgatgcacctgatatcgatggtacaattttgcgttttacgccagagcaggcgcagtttttagccaagaatattctacagtttgagagagaacaacgtccatgtggggaaaaactacgctttatcgtgataaatggccctagaacaggaaaatataatattgatgggcaaccttataatcctttgccacacaatagtggcaagttagatagagtaacagaggcatttatacagacattgataaaccatcatatggatgttgactgctataattttcagttttctcaacaacctagtgcttatattcctcttcttgcctcttttaaagaaacgaataacagggggaatttgcatgtgccaggagactcactctcaatgataagtgagacaactacacatttgtcaaatgttattattgatgagctcccttcaatgaatgagtgccattatcgattttgccaagatttttttcgtactggtaaggcgagtttcttaaactggcgaggggaaattaattactctcatcctgatacggtaaagcaacctgcagcatcacaagtagtggctgaggcaatattactaaaaatattcggtagctaa

SEQ ID NO: 314506 - DNA, 339 bp, Proteus mirabilis
atgagaacatacgcagaacttttcaatgaaggattacaacagtttataaatgagaaccagagcttatatcggaaaatatgcaatgaagcgtctattcatagctctaatatagtaacatctcaagaacaaataattgatgacaagataagaaaagcctttattgatcacttacatttaagatacggaaacaatatagatatttacaccacggtagtcacgttaatggctagtgatgaatttgaaagagtcaaaatattaacagagcactacactgagattgctgatactttaggcattggccttaatgattttttagttttaaataatatatccatctaa

SEQ ID NO: 314507 - DNA, 315 bp, Proteus mirabilis
atgccaataaaacaacgtccaccagtcacggcaaaacgagtgaagaaaaagtctaaatcagggatcacatctatcgtttccggtgttgtaatcaaagcaccagaacgaggtaaaacagttaagggtaaagtctatgcaacaatgaccatcgaagctgacagcgaatgccgcagcgcttacccactacgtttagttgcttttgatattgatgctatagaactgatgatgtgcaagcatggagataaggttacggctaaaggctcttatggctggtttaatggttatcaattgtctaatactaaattgataggatag

SEQ ID NO: 314508 - DNA, 831 bp, Proteus mirabilis
atggttatagacagtggttttaattgtaattcagtgatgtggattaaaagtttacccccagaagatgaaggaataacaaatcgaataatagaggatttgaagcctttattagaaataaacaatatatgttttaagtgcagggatgttaacagtgtaaatgatttagttgatgctctttgcgaactagtaaacactgttcgcgagtatgagttttatccattactacatttggatatgcatggagatgagaaaaaaggaatttatatagaaaagtcaaaggagtatatgccatggagtgttctttgtgacaaacttagggaattgaacaatgttacaaataataatctatgcattattttaacggcgtgttttagtcttaacgttattaagagcattaacacaaatgagctaactcctttttttgttttgattgcacctgaaaaaactgtagatggtggtttcttagctactaacatactagaattttatcgaaagctattcagttcagggagtattgacatagcatataatcaatttttaaaagataaattccactattaccactgtgaaaaaactttatttgtgatattggctcgctacatattgaaaggctgtaaaggaaaatcagcaagagagcgtagagagcgtctgctaacggaacttatggaaagtgggcttcctaacacgaagtctaatctaaaatctgcgagacaaaccatcaaaaaaggattgattccagaacaatcattagtagaaagatatgcaaagaaatttttaggtgaaagaaaggttagttttaatatagaggatatacttaaattaattggataa

SEQ ID NO: 314509 - DNA, 672 bp, Proteus mirabilis
atggaagaaaaaagcagactggataaggtattaggttggttaatgtgggttatgtttgtacttggtggaattgccttacttggttattcccacgatgtgggagctattactttttttgttttaggtggctggtttcggatattgcaagaaagaggtctgttagtccgtattacaactcacaaaatttttatctggtttttaggaatattattttcctgtagctattttattgcagaaaagtatttaaattctcaatttcaaattgaaagggagtatttgagtaactcgccatggataggagctattttttttagttttttattaatatttctgacattagaaatcgttgtaatagtattttttcttttatctttaattaatagtaagttagaaatcaaatttaaagaagaaaagaaacaggacgttggaagtattttattcacgttagtttgtgctttatttggagtaattcctttaataataggcatgtcagtaatacagaataaggtgtttatggtgagtttaaggattgattcttatacagtctcagactgcggtttagtacagcctagcgtgtcttatttaaggaaaaatgacagacagtgctataaatttgaaccttggtttggattcagtcagcctgtagtaattgaaagtaaaaaaggcagttag

SEQ ID NO: 314510 - DNA, 342 bp, Proteus mirabilis
atgactaatcaagcgactactgagaataaaactaacgctatcgataacttccgtaattcacttgctgtcaatgatgtatttggtagaacgacagaagagcttcgccacattagcacgactcaacgagaggcagtggatgcgttattaggtggcttatcagcgactgctaatttggcattttttgccactgagcacaaagattatgaagaaaacggtgatgcaaataacgacttacaaaaactgagttattgcatgatgtttacctctgaaatcttatattcatttctaaaaaattctgagatggctgagttagtgttacgtcaacgaggtgaatcattatga

SEQ ID NO: 314511 - DNA, 210 bp, Proteus mirabilis
atgcttaatttgaccgagattaatcgaaatgcagaaaaagcttttcagatagaaattattgcttcattgatgattaaagaacctgattttaacctcgaaataagcgaaatcttagctattttggcattaattaaaaggctagcaggtgaaattggagaaacattatttaatcgctgtaatgagaatgtgggtgaggtgaataatgactaa

SEQ ID NO: 314512 - DNA, 195 bp, Proteus mirabilis
atgcttaaaacattctatgttacaggctatgcaacaagtaagagcgacttagccattggcttcaatctcaatattcgggcagttgatgttaaacaggctcacgcagtgttattgaatgcttttgctgaaataggttgttctgtcactcgtattacaaaaatcaatgaaactaataaagaggctaaccatgcttaa

SEQ ID NO: 314513 - DNA, 630 bp, Proteus mirabilis
atgaacgcctaccaagcaaataatttcttaccgagggatggtgggcttactgagttttcggactctataaaaaagggtggctattcagctactcaatttaatcagttctttgatttaacgcctaagcgttccaactcatttcggcaagcgactttaacccatgagctaaaaggctcattacctattacagaatcgatttgttcaagtaaatcatcatcgaagcggattgttcttcttgtgctatttgaacggtcgtatggttttttatctttttcatcttgcattggttcgaaccactatgatagtttattgatatatggtgcgaaccagtataaaggtaagtgctataaaaaaacaatgccccgcagtggtggaacactaacggggcatctaaccaccagcgatacacaaactatcgaggtagctatgcgagatcatatcacacccttaactgggcggaatagtcacacccaaaatatcgtctttatatggcgttttgccgagtgtcagcaaaataaagccacctatcacttagttattgcacacaccgaaaatgaagcccgttcaatgcttcctaacctttcattggtattcactgctcgtattcgtgtgggagtgaatcatgcttaa

SEQ ID NO: 314514 - DNA, 276 bp, Proteus mirabilis
atgaaaaataaaatggccgtaataggtcagggcttctctaaccctaaaatcaggaaaggaagtattctaaatgttatttctaactttatttatcctattgatataaaaataaaatatggctcttttgaaaatgactatttaagtttaaaaggactatcacagtatttctgcaaattcacgcaaaataatgttttttatattcatgtacggttttgcgagtgtttgcatacaaatttagtcaagctatctcatgttgtcgcgacagctcttaattaa

SEQ ID NO: 314515 - DNA, 684 bp, Proteus mirabilis
gtgattaaattaccaaaacatattaaagcattaagaattgtttcattagatcaagtagcattagctatggctggattgattgatgacgttgaaagcgttgagcaagccgttaatggtaattatgttaatcattctgttgcttccacttatagagaagttatcattcaagcaataaagctaaaagaaataaatccactcgaagtgtttattgaaaaagtaaatcattcaggtgcggattatgataactatgagcatatttccaatggcacaccaatgctaattaataacgataaaattaaaatgttcactccaataagtgatgctactttctatgctaaagatatttggtcttgggttgaaaatgaattaaatgatgaagctaattatccctccgaatccaataatgaattagttaaaaatgaaatattatcaggtaacagtgagattaatacttggggggaatttgaaagaaaagctacttcgttaatgtttatagctggacttgctattgctttggaaaaaacaggtaaaccatataaacatggttcaaaaataaataaaagccgggttgctgaggctgctattaatgcaataaatgattatgggaatggaacgacgattagcaatagaacacttagagatttaattgatgaggcgttagatatgtacgctcaaaaattgtag

SEQ ID NO: 314516 - DNA, 1233 bp, Proteus mirabilis
atgctgatgagtcacaacaacactgaaacgcaaattggcaatatcgatcttgttaagcaacttaacagtgcgattgtatatcggcttattgatcaacacgggccgatttctcgtattcaaattgccgagcagagccaactcgcccctgccagtgtcactaaaattactcgtcagcttcttgaacgtggattaattaaagaagttgatcaacaggcttcaaccggaggtcgtcgcgcaatatccattgttgtggaacatcgccgttttaataccgtcagcgtccgactaggtcgcaatgatgccacggttgccctttatgatctcagtggtaaagccttagtagagcaacactatcctttagaacaaagcacccaacaagaagttgaaacgatgcttattaatgctattgatgattttattaaacaaaatcaacgtcgtattaatgagcttatttcaatttcagttatcttgcccgggttagttgatcctaataaaggcattatccactacatgcctcatatgaaagtagataactgggcattagttgataacttagaaaaatactttgatctgccttgctatgcgggccatgatattcgtagtctcgccttagcagaaaactattttggtgccaccagagattgtgaagattctatcttggttcgtattcatcgtggcgcaggggctggtgttattatcaacaacaaaattttgctcaaccagcgtggtaatcttggtgaaattggtcatatccaaatagatccattaggagagcgttgccactgtggtaactttggttgtttagagaccattgcgtccaatagcgcaatagaagctaaagtccgctaccaacttgaacaaggctatcccagccagcatttatctgcaacacaatgccaaattcaagatatatgccatgcagcggtaaaaaacgatcccctcgctgttgaaaccattaaacaagtgggtcttcatctaggtaaagccatcgccattgcaattaacctatttaacccacaaaaagtggttctggcaggagaagtgaccgaagcggctgaaatattactaccgtcgatccaaagttgtattaatacccaagtattaaaagagtttagagaagcgcttcctgttgttatctccgaacttgatcatcgctcagccattggtgcatttgcacttactaagcgagcaatgcttaatggagagttactacaatatttattcgacaaataa

SEQ ID NO: 314517 - DNA, 1605 bp, Proteus mirabilis
atgcgtacactgacccaattaaagccaaatacattaactcgcttatatgctctgtttcttctgtttatggccatatccctttttctatatgcttatagctattttgatacttggctagaaagtaaaaaaaatgccattaataacacgactaataagtttgcttctcaagttgaagattaccgctatcacgctaaccaactattccagttatcaaacaaaattaatgatccaaccctctttctgcctttaaaaatcaatccggtcaaactacgctctgatgtttattggcttgaaggacgtgatcaaactgttgatgccattgtatttggtaaatcaaatgaacaaacctttcagttagcgggtcattttgcaagtgcgttagaaattatttggggggtacgtaataattatagctctctctattatcttaatggtaaaggcaatgaccttattcttattactacccactcaatactaaaaccagaattacgctataaagaaagctatttaacactaacggctgaaaacaaacgttctgagctattaatgcaatcaacggcattagatgaaaaagagagcctttctcccattaggaaaatgccgacagaaaacatttattactatacctatcgcaccatgtttaatgtgccagggcaactgaccagtgttattgcctttgatttacccataaataattttctacctgctgagctatcacctcaatatttaagattattacccacaggacagcagagtgtttatgataaaaacaatattgaggtatcaacggatgggacttcactcatcttctcacagcccattgcaggaataccctactctttatcttatgagtatccactaaaatcgattttcaatgagattgtgtataaaaatatctggttacttatcagcctactcatttttatctcgatttcagtgtttggccatatctatattcgtaataaatatgtattcccttatatttcgatgacgcgtaatcttcgcatcaaagaagagatgactaacgatatcatttctaatcttccgattggtctattggtgtataatttttcatcaaatcataagattattagtaatagccacgcagagaagctattgcctcatatcgatttatctaagatccgtcagatggcgattgaacataatggtttaatccaaacggccattgataacgaaatttatgagatccgcacgagtaacaacagcaatatcgataatactgctctattcatttttctgaataaagacaacgaagcattaatcaataagaaattgcagctagcacaacaagaatatgaaaaaaacacgattgcgcgccgcaagatcttatccaatatgtcgttggaactcatacgaccaattaaagatattaatgagatggtatatcaatttaaagatctccttcctaacgatactcatcaacaattactgagtctactattagaaaaaacgaattatatttctgagtggatagaaaacatcacgctaattaataagttagaaaatcaagaatggaaaatacatcaagatgaatttgaactttcaacactagttgaatctattctaataatggccccgcattaa

SEQ ID NO: 314518 - DNA, 198 bp, Proteus mirabilis
atgaatattgaaaaactgcctcttagtataatccaattacttgaaattggcagtgtcattagaacaagtcgcctagatgtttctcccctgagaaaacaaaatgttgatcagaaagtcaaaatcttatccgcgtcgagagtccattgtgctaagtccaccaatgtcccaagttcagcaccatccactaaaggtaattga

SEQ ID NO: 314519 - DNA, 156 bp, Proteus mirabilis
atgcatttagcgtgccaacttgtattttctgccaataaaaaattaattctcaaacagcataaaactaactcattgaattttttaggcaccttcacctgtatggcgtatttaaaagataaaagatcagagggcgtatttttatcaggctattgttaa

SEQ ID NO: 314520 - DNA, 1659 bp, Proteus mirabilis
atgaatgttagcggtgcatgtaatctgaatattagccacacttattatagcgagcaaaatgaaataccaaacgcatgtgctatacctgttactatttatgaagcaacaagcgttctcaaaaatatagcggataatattactagacaaggtcccatcaatattcctaatccaaatgaacaacagcaacgttggaatactcgctatatagcctctcaaaacattgcctctactatggaattaatgttggcgtgcaaacccgatttatgcgttgtatattatacgactacatcaaaacccgtagggctaatggttttaaataaagatggtgagttaagtggctatgaaatagctggcatcataacagattttactgaaagaggtattggaaaaaaattaacagaatatgcagtaaatatttcatataatgagagtggctatggtggatgtgtatatttaaaagtagaatcattagcctctagaaatatatttatgaacttgggtttcaaagatagtggtaatggttttttatttttaaatcctagcgaaagtgaacaatggatatttgaaaataatcggtggtcgctgaaatcaacacctcttcagcaccaatctattgctgaagataaagaaaaaatagaagaacgaaaacggcctttacttaaattagatttaaaaacctttcctgtagaatctaatgctatgttatatagtgatgatcctcaacagatacgacaagtgcttactcctcaatccgtcattaatgcgttagaaagagttttacctggctcatcacctcaaatagtcaaagaattagatgaacatttacgaagagtacaagactatatcattcaaaaacgacaacctgatgatgaaatcctaaaatatgattcatccatagctatcgctatagtgaatattgaaaattcaagaaaagataatttaaatttgacattatgtgactcaatagataatgcaatttctgttattgaatttgaaatagaaaaagcaccatctcataaaagattaatttttcgggatactgatattggacaacattatatattcgctgatgttaatataaagcctaatgcttcaatatctattatattatttgagtcagcagatcttgggagtatcagtagttatacattatacgcaacattttctcaaaaaatacaaaggttatcagcattttctagtatacagatgggtatctttgatgtaaatatccaacgaagccccgccgattgtttaattttttgcctttcatttgcattgaaatcttataaacatgcagaccaactggctaattatcacaatttacagcatgcaggtattcctgtaacaacatacgaatataatgtgaaaagggagttattttataaaataggtcttaatctctaccctcctactattcttcacgcagacttcataaaacatacacattcaaaacaagtaattcataaacgacttgagtccctatccgaaaatgattttttaattcgtaatatgcttactcaaaaattacacgctggagagaaacgtttaactgaagatggtactataacttatttaccctcaatagaatataaacgtcgaaatttaattacaagaacgcttgatactatggtgatgaagactgataacgatttaatctaa

SEQ ID NO: 314521 - DNA, 1995 bp, Proteus mirabilis
atgccaaatattaataatactaacttagcatcaatcaattacccaattaccattcttgaagcaaaaaatgataatggcaataaacaatttattattgatgaaaatacaaaatttgtatatcttatttcaaagatttcaaacaataaattgaagatacatcagataaatgtacctatacatgaactaaagacacaaaattttttcaacaaaattacactctgtaatgcttttgaaataataaagaatcctagtttaatcaacactatccttggtcaatataactttaatcctacattacctagtcgatttcgatctatcaccgatttaaatcaaatagaaaagagccaatacaagcaattatcagaagcggatcagacaacacaactccgtcaggcgcttctctcgcttgttgatgatgacctaaaaggcgattttaacacactgttaaacgagtgggaaacttatggtgtttctgccagtgagattgataagagaacctattccgattttaaacaattttatgacgaaaaaatggcaaggtatgcagttaaaaaagacgattacacaaaacttgatttttctgcccaaaatattaaatcacagattacagatcctcgttgtttggaagcaaaactgacaccattacaattatttaaagctgcataccaattaggtgatattcccgctatttccaactttcgctttatgtacaaccctgtgagtaaaaatgatggaaaatatcgggaatggatgtatcactttgacaacagtaattatgctgcagaatttaaactaattactacacgaaccgcagatactgaactagccaataatgaacaatgtctagcagcattcccttataatactaaacaaactattcgtttcacacaaaacgaagctgcaacaaagttcccaactatggatgatttgcaaagagaatttagctatataccgggagctagttatgtggttattcaaaatccagataacacaacaccgattgaaacgggtattcgtactgaaatgatagtgcatcaccgttctgcaagtggcaaaaatgaaacacagtcacgcgatgctgaattaatgactttccatggtattgaacgttgccaaccatttcttacaaaacaagaattggagcacgcttcacatctgacagcattacaacgttttgtattaggtggatttcgtgatgctgagccacatcagtttattgaagcgttgaaggaacaaaaagaaactcttaatacacaaataaggcaaagtttaatagataacgcaattaaacctctagaaaaaataaccgtggcaaaattcagtgaacaagggattgagatagtcaatgaggccttatttaataaacagcgagccacttacgataacctaccagaagttttggataaaatcccaaaactggatctttctacaacagatttatcagaaagagtactcactatcattccgctactaatgaactatgatcaaaatgcacaattgaatcctgattgttcagaaaatcaagctttttcagccagaacacagttacgagaacgcactaatgaacaattcatagaaccgttaaaacgcgatttaccacatatacaatttagtaatgatcctaataatctattgagcatggataaactgattaatattaaccatgacattcaagaattttatcaaatgggaactcattttcttagacagctcaacgcagatcctaaactaacaacattatttgaaagtcgggcggcgttagctaaagagtacacgagtcagtttccgttacgagctacccaccccgaaacccatcaggtactatcactattcacttattatatggtggatgatctgaaccaagccgtaacaagtttgaagaaactgggtgctaatgtcgataacactctattagataagattaaaaaacaacaattaccattattgcagcattttattactcaccgtttgttaaatgaacaacttaacgcttaa

SEQ ID NO: 314522 - DNA, 1287 bp, Proteus mirabilis
atgattaatcacaattatcgcgccataataagccaatttataccgctccagcaaatgggtaatgaacctcgaacagtgaatctaaccaaagaaagaatggcaggagaatttatcggaatagatgcagtgccaggtaatagcaatagtagtatagaaaaaatgactcatcctcttgctggatgttgtggaacagagaaaatatctccttatatgattgttttgcttagtgatcagaaagcgctcgattttgccgaaaaagtacttcaatcaccaagaaaacgcctgttagatagtctgggtattgatgagaataaagtaactcgccatatacaactaaatgctaaattggaaactcttacccgcttctattcacgtgacgcaggattgcaaccgaaaaagttcacattaaacggtcggccttttattgaacaagaaccgactaaaccttattttgtgggacagaaaataatcactccagattttactttatatcgaacggcacaagagcaacaaaaacaaaatttattattatgcaaaactcgtgatgatagcgagctatatttcaatcaaactccaattacggaattaaaagtatataatgatgatatttttgctaaagagtcgatgctgcgtagtaacgataattttctgaataagactcaatatgttaccgaaatgatcgaatatttgacctattatagccagcctggagatatattagttcaaaattcattagaaacgagtagtgatagaaatacacctcatttgcagtttatccctggtgatgtccctttgcccttgttttatcgtagctctcaggtattgaaatacggagaatgccaacaacttgactggtatttacctacattaactatgcttatagatagtcgacaatatgattggaaagtacgtgcaaagcagatacaaacagtgtgtcagaacttattagttcatcaacatattagcaccactccggtattcaaataccaaggggatggaatggtatccatctatttaattttcaaacaagatggtagagatctggcacctgagatattacaacaggctcccggttggttagagtcttgtggtatttttatcgctaatactcaaaaagcagctacattctccactctaggtgcagcgcaatattataactcatacggggtcactgataaggaaaaactactgacaagcctagaataccagtttgacaacttaatttctgacaactattggcaaggtaattacgatgagtttcttgccaaaaaaggtgtttcactttaa

SEQ ID NO: 314523 - DNA, 600 bp, Proteus mirabilis
atgtcattagaagaaaaaaatatcgataaaccaagaacaaagccagccgaagttcgtttagaagagttaatgaacgccgctgaaatattatttcttgataagggttttgatgccacaactgtcagcgaaatagttaaaaaagcggatgttgccaaagggacttactaccactatttttctgccaaaactgatattcttgatgcattaagaacgcggtatatggattggtatttaaataaaatagaacaggcaatgaatagcggtttacagcaagatcagcgagaacaactaaaacagtggtgtgaaatgagcgttgttgcctatgtagaaaaacagtcattgcatgatatgctctttcatcaagtttttcatcaaagtgctaatattcatgaagatagagcattacaacaattacaatcgttacttgttgcgggtaataaaagtaacgtttggtcagttaatcaacccgaattaatgagtatattgatctatcatggtatgcatgcagcagttgataacttagaccatagtaaagaatataccaagaacaccttgggtcagttactctatcaacgatttattcaattactaaacaactaa

SEQ ID NO: 314524 - DNA, 531 bp, Proteus mirabilis
atgaatgaagagaaattgctcgctcaggcagaaaagatctgccagaaacgaggtgttcgcctgacttcacaacgtctggcagtattgcgtctgatcatgcgacagcctaccgcaatcagcgcttatgatttattagatttattacgccaagtagagcctcaagctaaaccacccactgtataccgtggattggaatttctacttgaacaaggttttattcacaaaatagaatccaccaatagctatgtgctttgtcatcattttgatgatgccgagcatacttcggtgatgttaatttgtgatcgttgcttatcagtcacagaaaaaagtagccataaaattgaaggggcgatcaccttgcttgctaaagataatggctttcatttacgccatagtgtgattgagatccatgggctatgcgatcagtgccatgaagcccaagcctgtacacatccggaaggttgtcatcatgatcatagtatggatgataatcttaagcagaaaaaaaccggcgactataaggctcgttaa

SEQ ID NO: 314525 - DNA, 1353 bp, Proteus mirabilis
atgattggatccacgctattgtcacccacggcgcaagcaactttgctgctgacttgctatttttcgaaagtcagtagcgaaactgttaaaccgctaaccaatacagagtggggacgctttgccttatggttaaaagaaaagtccacaacaccagccgatttgctgattacggacccgaaagccttactgaaaggctggcacgatacgcgtatcagtactgagcgaattattgaattgttgagtcgtggccatagccttgcactggccatggaaaaatggcaacgtgcaggcctttgggtcgtgacccgctctgatccagaatatccaaaacgtttaaaacagcgactgaaaacggattgtcctccggtgttgtttggttgcggtaataaatccttattaaatgctggcggattagcggttattggctcgcgtaatgctaatgcatcagatctcgcctttacggagcaggtaggatcgaaagcagcagcagaaggtattgccattgtctctggcggtgcacggggagtcgatgaaacggcaatgctaggtgctatcaaacaaggtggaatggtgatcggtattatgtccgatagcctgctaaaaacagtgaccagtagcaaatggcgaaaaggattgatggatggtcatactgtgttgatatctccttttcaccctgaggctggattcaatacaggtaacgccatggctcgtaacaaatatatctattgcctagcggatagctcgctggtgatccactcaggtcaaaaaggtggcacactaaatggagcaaaagaaaatctgaaaaaagcatgggtgccgttgtgggttaaacaaacggctgataaagatgcagccaatgctgatttagttgtcaaaggtggacgttggctggaggctgatcttcaaacttttacgatttctgatttaatgagtaatgcaggtaaccatgatgagcaggtaaaggcgcagatgattgatctcttttccatgcctgcacagcccgaattgctttttgaacctgagtctaattatgagtcacaatctgagtctaaagaagatattatcgagtcagggcatgaaatagtcgttagcaacaataaggcaaagattgagacaattccagaacagatggccaaaaaccaagttacatcaatagtgcctgtcgatttttatcagctgtttatctccgaacttcaatacttagctgaagatccagttacccttgatgaactggttaaaagcacaaagcttcataagtctcaattaactgaatggctaaaatatgctgttgatgatggcatcgtgaagaagctcaatcgcccagtacgctatcaagtcaataataagaaatag

SEQ ID NO: 314526 - DNA, 2100 bp, Proteus mirabilis
atgaatcgagttcaagcccaacaattattgaaaacagctctggataatcccactgctgactttcgagatggtcagtgggaagccattgattccttggtgaatcatcggcagaagctgttagtggtacaacgtactggttggggtaaaagctcggtttattttattagcaccaaaatattccgtgatctcggtatggggcctaccattatcgtttcacctttattggctttgatgcgcaaccagatcgaatcagcacagcgtctaggtattgtcgccgagacgctaaactcaagcaatcaaaacgattggcagactgtgacccagcgactcctaaataatcaaatcgactgtttactgatttctcctgagcgcttggccaacgatagttttattgaaaccgtattacaaccgattgccaaccgtatcgctctaatggtaattgatgaagcgcattgtatttctgattggggtcatgactttcgtcccgattatcgccgcatcgtaaatattcttcgccaattacctaccaacatccccgtactgggaacgacagcaacagcgaatgaccgtgtagttgcagatattcaaacccaacttggaaatattcaaattcatcgggggtcattggttcgagaaagccttgcattgcaaactataatattacccgatcaggcatctcgtttggcttggttggcacaggtgatacctacactaccgggcactggtatcgtttacaccttaacaatacgggatgccgagcaggtagcagaatggttgagaactaatggcatagacgccaaagcgtaccacagtaacgttgaatttgttgattttgaaaacagcaatgtataccgacaatatctggaagagctgttgctcaataaccagctaaaggtattagtggcaaccacagctttaggaatgggttacgacaaaccagatttaagttttgtgattcactatcaagcaccaagctctattgttgcctattatcagcaggtgggtcgtgctgggcgtggcattgattatgctgtaggagtgttgatgtcgggtgtggaagatcagcatattcacgagtttttccgctactcagcctttccttcagaggctcatgttaatgagatcttgcaggttttagagcaaagcgatggtttgtcgattcgtaacattgaagagcaaaccaaccttcggcatggacagattgaaaaagtactaaagttgctgagcgtagaaaacccagcgccggtcattaaagacggtagtcgttgggttagaacccccgtgcgctaccaaatggatcatgcccgaattactcacttaactgatcaacgagtgcaagaatggcaagagattcaggcgtatctaaataatgcaggttgcaaaatgacttttctacgcaacgcgctagatgatcttgatcctacaccttgtggtaaatgttcgttttgtcagggcaagcctatcatcaatactccgatcgatcccactttagcgcataatgcaagtattttccttaagcacgcggaaatggcgctctcccctaaaaaacaagtagcggctaatgcctttctgacatacgattttcgtggcaatctccctttgcatcttcgcgcacaagaaggtcgtgttttatcccgctggggcgatgccggctggggtcgcacagttgctgataacaaatatgctggacgtttcagcgatgaattggttgaagctatggcggaaatgattcaccaacgttggcaacctaatcctgcaccacaatgggtatgttgtgtaccatcacttaatcaccctgaattagtaccagattttgcacgtcgcttggctacacgattagatttaccgtttgtggatgccgttagcaaagttaaagataatcagccacaaaaaggtcagcagaatcgtttccatcaatgtcgcaatctagatggtgtgtttgctgtaactcagctttataaaggacagccagttttgttagtggatgatataatagactccggctggacgctaacagtcatcgcggcactcttacagcaagcaggtagcgggatagtataccccgtagcactggcttcatcttcggtgaaagactcatga

SEQ ID NO: 314527 - DNA, 186 bp, Proteus mirabilis
atgagtcacttcgaagtaacaccgaaatacagttcaattcgtatatctgtacccactactcgtaaacaaatgaaagaagatgtgactgcgtatatgcgctattacaacctagaaaggcttcatactgccaacggtgatattcctcccattgagtatgaacaaaattccttaagaaaagtatcttaa

SEQ ID NO: 314528 - DNA, 231 bp, Proteus mirabilis
atgactgttagtatattgaagtttatgttgaaagcgatcacctctcctaaaaccatagtgaagggaactattgccaatttggagcaagaaagcaaaaaacaagaggttaatactaaagacaagttttttgtaaattctgatggttctatatcactcaatcctcatagtgaagcggtacaaaaagctttcgttgctaacatagagaaattaaggccaaacaaaaaggattaa

SEQ ID NO: 314529 - DNA, 624 bp, Proteus mirabilis
atgagctataagtatcatcgcatcgataaagaaaatgccgcagttcttttggtagaccatcaagcaggtttattatcactagtaagagatatagaacctgataaattcaataataatgtattagctctcgccaatgccgctaaatattttaagttgccgactattttaactacttcttttgaagatggtcccaatggtcccttaatgcctcagttggttgagatgtttcctgatgcaccttatattgctcgtccaggccaaattaatgcatgggataatgacgattttgtaaaagccgttaaagcaacaggtaaaaaacaactgattattgccggtgtggtaactgaagtgtgtgttgcatttcctgcattatcagcacttgaagagggttttgaagtttttgttgtcacggatgcttctggcacctttaactctattgctcgtgattcagcatgggacagaatgtctaaagcaggggcacaactcattaactggtttggtttagcttgtgaattacatcgtgattggcgtaatgatattgaagggttaggaacactatttgctaaccatataccagattatcgtaacttaatgaccagttataatactttaacaaaaaagtaa

SEQ ID NO: 314530 - DNA, 564 bp, Proteus mirabilis
ttggttgcgcacgcccacgcctttttcggtgcccaccatatggatataaccgctgtacataccgcccatttgtcccatgtcgatggcaaactcaggttgtgcagtttggctctccattggtgtggctttattgttagtatcgaccttatttttacccgcaacgactgctattttttcttttgcccacacgccggcgttgatttcaacggcgcgagcgagcagatcaacatactgcgtatcgtggcgactatcggcattcaagccactgccttcaacacgaataaccccacgttcaacttgatatcctgcaaggctaccgtcttggttaaattggggtttccctgtggtaagggtcatacgacctgcattgatagtgccgcagccattacaaataatgcccgatgggttagcgacaatcacttgtgccttaccgcccgcaacttccagaaatcctttaatttggcttgggttattgctgttgacttcattcagaataacgcgcgcaggggctttgtttgggtcaagattcgggttaccttggatcatccctgcggtttgtgttga

SEQ ID NO: 314531 - DNA, 1467 bp, Proteus mirabilis
atggggagtgagtgggtcattacttgtattgacgatattaagtcaccagaaaagtatagttgtgttggaggtccattcggctcgtctctttctcgcaaacattatgaagactcagggattcctgtaatcagaggtgttaatttatcaggggacacattttcagaaactgattttgtttttgtatctgaaattaaatcaaaagaactacagagaaatatggcttttcgtggggatcttattttcactcaacgagggacattaggtcaagtggctttgattcctgatgattctaaatatgaacgatacattgtatctcagagccaaatgaagcttactgtaaatcctcaaaaagctgactcatatttcatctattcatatttcagaacaaatgaagctaaaattcgaattgaaaatagtgcaattgttggtggggttcctcacattaatcttggtattttgaaagagtttaaattgcgactacctccactctcggagcaaaagcgaatttctgagttagccaagattattgataataaaatcactctcaaccgccaaatcaaccaaaccttagaacaaatggcgcaaacgctatttaaatcatggtttgttgattttgaccctgtggttgataacgcactagatgccggtttttttgagcaggatttaggcttttctgaagaattactgcatcgagttgaagttcgtaaagctgtgcgtgaaagtgataattttaaaccgttatcagaggatattcggcggttatttcctgatgcttttgaagaatgtgcagagtccgcattggggcttggggggtggattccagagggatgggaaattaattgtctagaaaacatatctaaatgtattaaaggtacatcctataaaagttcggagttatctgcttctgatacagctcttgttacccttaaatcttttcaacgtggtggaggttatcgattagatggccttaaatcttatgttggctcatacaaaaaagagcaagaggtatttgcgggggacttaataattgcttgcactgatgttacccaagcagcagatattatcggaaagcctgcaattgtaattagcgatccttgttacagtaagctagtagtttcattggatgttgcggttatacgaccaaaacatattagccttaaatattatctgtatggaatagcaaaaacattggagtttcaaaattatacatattctcactcgacaggaacaaccgttcttcatttgagtaaaaatgctgtaccaaatttcatggtttctttaccaaatgagctaattttgcaacgataccatgagatggtattaccactatttgactctattgaaaagaatacgtgcagtttgagggtgttaacaaaactccgcgacacactcctcccaaaacttatctccggcgagttgtctttgagtgatataaaaatagatatcccagaagaaaccttaatctaa

SEQ ID NO: 314532 - DNA, 201 bp, Proteus mirabilis
atgctcgatgaacctcatcgggcgttttatagtttaatgataaatggggtcgcctttcattataaatctgtattgattcttcaactaacctccgagcctgttctaaatttctcggctttattaacaagtattctattttttatatcccatttactcgctctgctaatgtattttgataacagtcatagctatacctcatag

SEQ ID NO: 314533 - DNA, 336 bp, Proteus mirabilis
  misc_feature (308)..(317): n is a, c, g, or t
atgactcgatatgaacagcttgcggcacagatacgccaacaaattgaagataatatttggcaatcaggcgatcgtttaccctcattacgggatacggttaaacaatcaggtttgagtttaatgaccgttttacaatcttatcaactgttagaaagtcaagggtggatcaccgctcgtccgcaatcaggttattatgttgcacatcgcaataccggttttgctcaagtaactgccagcaaagggctacatatgagtgaaaatgttgagataagcgcctctatattcaatgttcttcaagcctgtaaagnnnnnnnnnnctatattcaatgttcttaa

SEQ ID NO: 314534 - DNA, 180 bp, Proteus mirabilis
gtggcattttggatcgccggagaagataaaattatccgtgcactaagacgttatattcgtcgtgataaaggctatgagcgcggacagatttatgctatcccttattggcgttttggttttaatgaagaaggttatcatgctgagcgtcatcatgttatggataatgaagatgtaagctaa

SEQ ID NO: 314535 - DNA, 249 bp, Proteus mirabilis
atgaaagaaaatattcatccacaatatcgtactgtcattttccatgacactagcgtagatgcttattttaaagtgggatcaaccattcaaactgataaaactattgagtataaggggcagcactatccttatgtcactttagatgtctcttctcagtctcatccattttataccggtaaacagaaaacacattctcaagaaggtaatgtggcacgctttaataagcgttttggccgatttgttaattag

SEQ ID NO: 314536 - DNA, 213 bp, Proteus mirabilis
atggaagttaaaaccaataacagacttgatcctaaagatggtgagggagttcgctttggtattgttataacattaaaagaaatcaatgggataaacagaatcgacgaatttattaaaaactgtcatttaaatggctggctagttaacgaacttgatactaccgtcagagttgatattcatcaagctatgaatcaagacatagaatttacctga

SEQ ID NO: 314537 - DNA, 243 bp, Proteus mirabilis
atgcttatggcgttcaaaattaatggctcagcttggtctagtcgtcactcagagtgttgcttcaaagtcaccacaaaacgcaaacacagtgatgcggtagtcgataatttgttaaatcaaaatgttaatcctctcgcccctaacgaagtgtgggcgggtgatgtggcctatttaaaaacaggggagggctggatgtatttagtcatcgtgatggacttatactcacgctgtattgcgggttga

SEQ ID NO: 314538 - DNA, 396 bp, Proteus mirabilis
atgtatgatgatataaataatttaaaagataagttccaggaagagggatttacttttcaagatttttcttcccctgcggtacaaaagattacctgtgatgagaaaaatagtgttataaatcatattgataataataatttattatcagcgggtaatgaggagtcagccaatttatctaaagttaaaaataggcaaaaacaaacagctaatatagcgacttctctttcttattcacaagatttagcttcagaaataaaggggaaaaatagagttaataagaaaagtaagtgtttgctagataataagttatttgaaaaaaaagccactgataagtgccaagtaaatgaaaagctctcattgcaagagatattgtcatttattgcatctgctaattaa

SEQ ID NO: 314539 - DNA, 702 bp, Proteus mirabilis
atgaaaaaaaattttctctatttggccttactgaccatcgtatcatcatcaagttttgcggcgataccttcagctaagttacaaatcaatggagatatcacgccacctacatgcatcattagtggtggtaatcaggagatcctttttaattatgggaatatatcgccatcaattattcctgaaaatactaattatgcattaggttctcagtatgctgatataaaaatatcctgcgatgtagatacttttttaacatttacaatttcagatttgtttacgtcaaataaagccagtacatggaaagagggtatatttggattagtaaatgcaaaagataaccaacaagaagttggtggttacctaattaggttcagaaatgttgaaattgatggtaaagaaagtttccttggaagagttggaggctctaattggcaatctttcattatcgttaaagatgctataacaggttggacaagtgaagcacaagctgtcactaataaaaataatttaaaattagcttcaggaaaagtatttagcgcaactttagaaacaggaggagcaggaggaacaggaggaacagaaagtaacccagattatggatatattttgtctaaacaagaacttgctaaagaaaatatcgatatttctgaaggcttagattatattggtgaagctactatcacatttagtattggtgtttaa

SEQ ID NO: 314540 - DNA, 978 bp, Proteus mirabilis
ttgtcagtaatacgtcaaacagtaggatttttcctgcgattattatgcctgctgctggtaacaacagcaggtgtttttattttattaagtttttcgccgattgatccgattaaagcctatatcggtagtgatttgttaaacgttccgcctgagcagtatccgctgatagcggctcgttgggggatggatcagccactatggatgcgtttttggcactggtttagccagattatccaaggtgattttggttattccatgctctataacatgccggttattgatgttattcgccaacgggcagggccttcgtttatcctgcttttttctgcgtggatattttcaggtgtaataggggtgttaatgggattagtggcaggacgatatctcaatcgttggcctgataggatcatctcaaccctctcttatttgctggcctcattaccgactttttgggttggattgctgttgttatcgctgttttcggtaacgttacactgggcaccgatttgctgtgcatggccgatgggcagtagtgatgaaaccgccacattgggccaacgtttttcgcatcttattttaccgatgatagcgttaggattattaggtacaggtaatattgcactgcatactcgcgcaaaagttgctgaagtgatgggtagtgaatttattcattttgctaaagctcaaggtgataaaggttgggctatgatgctttttcatgttctacgtcatgccattactcccgcactttgcttacagtttgcatcaattggtgaattgcttggtggttcattactggcggagaaagtatttgcctatccaggattagggcaagcgacggtagatgcaggattacgtggtgatatccctctcttaatggggattgttgtatttagcactattttaattttctttggaaacagtatttctaaccacttgttacgacgaattaataaaggaattttgcgcgacttatga

SEQ ID NO: 314541 - DNA, 813 bp, Proteus mirabilis
atgatttacgatcccaataagcctttatttagattgttatttgtctcaatcgcattagtggggctgattgtttatggcttatctgtttctcatactgatattgtgatggattttttagctagaaaccaagcgccatcaactcagtactggtttggtactgataatttagggcgttcactgtggctacgctgtttccaaggtatgttaagtagcttaaatatcggtgtaaccagtgcgatagtcagtggtgcgattgcgttgatatttgctgggctctcctccattaatcgtcattgtgatttattggtcagaggggtggttgatgcattgttagcattacctcatttactgctgttgatcttgatctgttttactttaggtgggggacagcaaggggttatctgggctgtggcattaacacattggcctaagttagcactgattttacgtggtgaaattcaacgtattcgtgaagcagattatgtgatgctatctcgccgtatcggcaatacaccttttgagtgtgtgaaaaaacactatatcccaatgttattaccgcaatggattgtaggcacattgcttatgtttccacacgcagtattacacagtgctgcgttgagctttttaggttttgggcaggcagcgcatgagccttctctaggattgctattagcggatgccttacgttatttaagcaccggtgcttggtggatggtgttttttccgggattaattttaatgtgcttggtattgatatttgatcaatttgctaaagccatgcagcaactatggttaagaggggcaggatgttaa

SEQ ID NO: 314542 - DNA, 561 bp, Proteus mirabilis
atgaaattatctgatggtgaaaaattaatcattctaatgttgaatgatttacatcgctcaaataatgtaaaaagtgactttgatcctgattttttagatgaggccataagagataatcatttatggtcaataacatggaaatatccaggtattgagttcaatagccaaaatgataatacaccaccattagtaaaagaagtattggattatttagagatgtggagttttatcgaagcgagctataaacgcctatcaccagaagaaatagaacgtttaaaacaactagcacctgtatttggtaataaacccttatttgaaggatttgatggtaataacgaatctgaatacttagctacagccacttttatcattaataaattagatcgttttactgaattttctggtcgatacttaaacagccatagtccatcaattgatggttataaaagaatgctggtagtctataaacaagaaatggagaataataattatagtttattaaaagctgactcactggcaaaagttttaaatgaacggactcatccaagttatcgtaaataa

SEQ ID NO: 314543 - DNA, 252 bp, Proteus mirabilis
atgggaatgttttattttgaagcattagaggggcaatcaataggagaggattatcccattggatatgaaggcaaaaccaaaatgggtgattattttcgttttattgttcctaccgtttatgcaacaatagcagatattccagaagagttaaggaaatatattgtagtctctgatagtcttgattttactaaagatagattgcttgataataataaaattagtgattattttactcatatgtattcagaataa

SEQ ID NO: 314544 - DNA, 1068 bp, Proteus mirabilis
atgagccagaaaattctttttatcgatcgtgatggtactttgatcacagagccaccaaccgatcaccaagttgatagtctcaataagcttgcctttgaaaatggcgttattcccgcattactcaacttacaacaggcgggctataagcttattatgatcaccaatcaagatgggcttggtacagacagttttccacaagctgactttgaaccccctcatactctcatgatgcagattttttcttcacaaggcattgtttttgatgacgtattaatttgccctcataaacctgaagacaactgtccttgtcgtaaacctgaaacagggttagtcacccaatatctggttgaaagtgctcttgataaagccaatagctatgtaattggtgatagacaaaccgatctacaattggctgaaaatatggggatcaacggattacgttataatgccaatgaattaagctggtcagctatcagtgaattgttgacgaaaaaagatcgctactcccacgttgaacgtaaaaccaaagagacacaaattgccattgatatctggcttgatcgtgaaggtgaaagccaaattagcacaggcgttggtttttttgatcatatgctagatcaaattgccacccacggtggctttcgtatgaatatcaacgtacaaggggatttagtcattgacgatcaccacaccgttgaagataccggtcttgcactcggcgaagcactgcgaaaagcattaggtaataaacgcggcattgcacgttttggttttactttgcctatggatgagtgcctagcaagttgtgcactggatatttctggacgccctcaccttgaatataaagcagaatttaaatatcagcgcgttggtgatttaagcacagagatgattgagcactttttccgctctctctcttacactatgggctgcactctacacttaaaatcaaaaggcaaaaacgatcaccacaaagcagaaagtctgtttaaagtatttggtcgtaccttacgccaagctattcgtgttgaaggaaataccttacccagttcaaaaggtgtgctgtga

SEQ ID NO: 314545 - DNA, 318 bp, Proteus mirabilis
atgataaataaaaccctctcctctccatctaaattattagtattattcctctctattattatcactaatagtgcatatagtaattttgaaaaaaaatgtctttatcttagaaatgaggttatagaaatggatggaaaaatatgctttagtataaaaccagtaaagaagtgtatgagtgattgctctgttatcgagtatacccaaaaagtaattgattttgtatgttatacagatatgaattctaagcctaaaaaggccgcattaccagtaacctttccaataaattgcgagtataatgagttggttccaaaagaataa

SEQ ID NO: 314546 - DNA, 2133 bp, Proteus mirabilis
gtgaaagaacaaactggtatttttgccggcaaaggcggctttgatgtcaacgtcaaagaccacactcaacttgatggtgcggtgattgcctccacggcggataaagataaaaaccgccttgatacgggcacattaggctggaaagatatcgacaacaaagccgactttaccgccgagcacacaggcggctcgatgggaacgggtggcccaattggtagccaactccttactaatgccgcaggcgggttactctctaacgccaataacagtggccacgccgaaggcaccacacaatcggcgatcagtgacggtacattaattgtccgtgatagcgataaacaaaaacaagatattgatacccttagccgagatactgagcacgccaatgatggcagtattaacccgatattcgataaagagaaagagcaaaaccgcttaaaacaagcccagttaattggcgaaatcggtaatcagaccatggatatcatccgcaccgaaggggatattgcgggcctaaaagcgcaaaaagaccccgatgcgttagccattgccaaaaaacaactggaagcggcgggtaaaacacctaccgagcaagccattaaagaccaagcctacaacaatgccatggcacaatatggcacaggcagcgacttccaaaaagcggctcaagccgtcaccggtttgctacaagggctggcgggtgataacttagcaggtgcgctggcgaatgcctcgtcaccgtacttagcaacattgataaaacagcaagtaggcgaagataataaagccgcgaatgccatggcgcacgcagtattgggcgccgtggtcgctgagctaaataaccaatctgccgttgcaggtggattaggtgctggtagcggtgaactgtctgctcatgttatcttaaacactctcttcccaggcaagaaggtttcagacttaaccgagagtgagaagcaacaagtcagtgcactgagccagttggcttcaggattagcgggtggtcttactaccggtgatatggccggtgcgattactggctcgcaagctgggaagaatgcggttgagaataacttattatcaccagagaaagacgatcgccggtttaaagcgctcgaagcccaaaaggccggacaaaacctgctgaaggcttcacaggatattttttatctcacaaatgaagataaatataatgataagttaattgccggttataaagcaggaaaactggatgatgcaggtaaagcagagctggcacgttttcttaatgagtacggaacacaattacagctttacagaggaatgagtgaagcagaagcgtctcaggttattgattcaatattgaaacatgattcaatcggcccggttttaacaaaagaatataacgaagcataccgatatcttaattccgctggagttcagttgtctcaggccgtgataggaaccgatgcactgttagccggacccggcagaatcagccagttaatgcgtttatcattagctgccggtggttcttaccagacaggaaaggggatagctcaggtatctgatggtaaatttgctgaaggtggtacaaatatcgcactgggttcagccgctatattcggcggatatgttggcaataaagttgttggcaagccaagtggtggaattatttcacctgaatctaaagtaattcaagaaagtagctgggttttagacaaaaaaacgcacacatcgattcctaaagtggaagctgagttaatagataaagagtcaggtaaaatatttaaagatacaaatcaaggaaatcggtctgactattttcttggtgataaaagcagaccaactttaattaatgataggatagaggctaaaatagaaaaaaatcctagtaaatatttaccaaatggaaatatggcttctgctcatgctgaagttggtactattcaacaggcgttcgaggatggtatcactgttggtcgagatatgaatatgagggttacaaaagagcctgtatgtggatactgccgtggagacattgccactatggctgacaaagcaggtttaaaatctcttactgtttatgaggagagcactggaaaaacattatattggaatcctggaatgaaatcactcaaggagaaaaaataa

SEQ ID NO: 314547 - DNA, 174 bp, Proteus mirabilis
atggttggttctttacaaggaaaagtattaggcaatcttggtacaagtattgtagtttctggtgcagcggcgaaaacaattcagaaggttgcacagcttaaaaatgggtcagtcaaaataaatccaaatgagataaagagtccaacacgagactgtaatttaaattgtgtatga

SEQ ID NO: 314548 - DNA, 321 bp, Proteus mirabilis
atggctaaggcgcattctaggcaaaaccgtgccgtaaataaagcaacaaaaacagagcgtttttataccgtgggatacgtgccgcaaaataacaaggccaaggcaccgcctgcgatccatttgaaagggcaatggcttaaggccgccgggttcgataaaggttgcaccctgaccgtgaagattatggatggctgtctggtgctgatccctgacagtgacgacacccgcaccatccggcaacagtaccagcgccagcaagaccagctcagtgacattaagctgcggatgcgggagctgattggggattataaaagccgctaa

SEQ ID NO: 314549 - DNA, 324 bp, Proteus mirabilis
atgaaagaatactctaaacctgaattagagttattatttaactctgatgatactcaaatagtaacggatgccattttgtattcaacattcaatattgatgattacgaatggattcaagaacaatgtttgcagttacttagtaatagcaatgaagatatcgctggtttggcaattacatgtttgggacatatagcacgtatttattccaaaattaatgagtccaaagttattccagcattacaacaaaaagcaacagttccatgcttcgctggccgtgtagaagatgctatggatgatataaatatgtttgctatcaaagagtaa

SEQ ID NO: 314550 - DNA, 333 bp, Proteus mirabilis
atgatgtggatcgacccgctaggcttagcgaaacagatctatgaagatgctccttatcacggtaaaactgataatgcagtaaaaagtaaggctccagtgcatggtcagacggcgctagataactcagttcaagtgaaacctacgtcacctcgtcgggttggtgtagatgcgaaaaacaatgagattgttgtgatggataaaacgcgaacattatccaatggtgatgagttattccacggtcatgttagagactgggatgcgttacatactgaccaacaagccgcattgagaaaagccggaaaagttaacaagaaagggaagataacgtgctga

SEQ ID NO: 314551 - DNA, 762 bp, Proteus mirabilis
atgatttattttaaatggttttttatttttttaggtacctgtatttcagtgctttcaatgttaacaaccgcatatgctgcgccagttattggcataggtagtatgtatgatgtgctaacaccagatatgcagagtatgactaaaaggatatataatacaggggactcaacagcctttgttcgtgtggatatattaaaagtcaatccagatgggcggaaaggtactgatgaagtaccacagaaagagttgtctggcaccatacttgaacgtgatcgtcttattgtcactcctctgcgtcttattatccctcctactagtttccaaactgtgcgtattttgtggcctggaaagagagaaaaagaaaaatattatcgcgtcaggttcatacccgtaatgccacaaactggtgacaattttggtctagataaaaatgaaatcagtgaatatcgcaaaaagaatttttatgctggacttaatgtacttacaggttacggcaccattgtcatcgtacaacccgaaaaaccacaatttaatacggcaattattgatgaagctgatccttctggcattactgtagaaaataacggtaataccacattaatactagataatattcgccagtgtaggtcagatgacagcgattgcggagccatctcgcgtaagtttattctccctggtcaaagatatgtagtgaaaaaaaatggatataaaacaaatttcactcttattgagggaaacagtaaacagacaatgagctattag

SEQ ID NO: 314552 - DNA, 537 bp, Proteus mirabilis
atgaaacgtaatatatcttcactacgtaactctctggccgtaatgatgctttctagtgcagtgttagtgggaatgtttgggcacactgtagtcgccgaagagcgctatactattaatttgtcagccaatgtgccctcagataaattccatgttctccctgtcgatgttggctggattagtcaacctcaagaaatgcactacaaccatatcaccggtaaacttaatatattcgagaagctatttcagtttagaaatgattctggcgctattcaagcgagtttgacgggtaatttgactgcggaaggtaagccatatttatcaaatgggaaggatattattccactagtgataagcttcaataataaggagataagtaatagttccgatatggttgtgccggataccatggctaaagccggtgggcgtacgatgttaaagatatctcaggctggaaacgaaaaactggctgtgagtggttcgtttactggcaatgtagacataatcttcgagccagctcttggaagtggttccaaataa

SEQ ID NO: 314553 - DNA, 1893 bp, Proteus mirabilis
atgagagtaatatcttttttccttctcactctgacaacgttagttgcgcaagctacagatatgacgttggcgacaaatatgcgtggtttacctgaagattttcgtcactatttttataactctgaactcattgttcagatttatttaaatgatatacagctatttgatgccgttgttgttctaaaagagagcggtgaaattcgtttattacgagtggtcgatgaagcgcaaaatgtggatccagaaactagtgctctttggcgtggggtattgcaaaagggaattatgatgggacagtgtgtgaaagactgccccattggactaatggcagtacaataccagctcgataacgctgtagtgaagttgtttacgatgcactatgaaacttctcgggttagaaatacatatattactataccggcagatataccaaatggcatgattatgtataacgatgtatctgtaactaatacagaatccatgcgaagttgggggataaattcttcattgacgtcatcgtttattggctggagtcagaaagcctcattccagtcgtcaggaacagaaggcaagtatcattaccgtaattcaggtctttatgagctatatacccagaaagaacttcctggtagttttgttcgtttgggctattttacgcctgacagtgatacggggaatgttcaaacatctagttttggttatgaaaccgttgcaggctttatgtggggaacctctgatacccttctagtcagtggagatagtgtcagtctctggccagtctatgtaacggggcgtaaccagtcagtagcagaaatttggcgtgatggacgcttgattcatacccagcagctagaagctggagtgcaggcgctagatactcgtcagttacctaagggtatttatgatattaccattaggatcattgaaaacggtcagacagttgacacgcaacaggcacagatttacaagcctcaacgttggagtgacccaaacaagcgctggcgtataaatctttggagtggtcaacgtagaacgctgatgataggtgatggacgtatgagtgaagccccctctttttctgcaggtggtggtattgatgtacttgtacatcctaggattatccttggggttagtggctctgcaacggaaaaaaaacgccaggttagaacacagataaatatgactctttctcctgacgatacgctgtttgcccagtatatgcttggtaacacacaatatcaggcgaaccaaagtatcgactttcgttactaccgtaatatctccgccaatagctcagccagtctgttttggcgctctgttgggacggatgtctatggggctaaaactacatcacatcagcagggagatacttggggtagttctatgtcgctacgattacctcggtcaacatcgttcatcattaatgcacagtatataaatactacttggcgtaaaggatgggctggtgatgtgtcagccactacactggctactctattgggacacaacatgaatttcagggtcagtgcatataatcgccccagttttgataataagcctcgtgatcatggtgtttcacttggcgtgagtatttccctatctccagcaacgcgtcacactttttctgttgaaacaggtatgaatcagaatcaaggctattctagcctaaattatcagtggcaacctgagaaggacagcaatattcgttcactaggtggtgggatatcctacagttctcatcatacaattatcagtggcaatacctctgttgataccccatatatgagtggggatatctatctacagcacaatacccgaagaaatataaacaccgcaggtgcaaacctgagtcaggctctggttatgggggggggggaaagttgtagctactaa

SEQ ID NO: 314554 - DNA, 492 bp, Proteus mirabilis
gtggatactgatgataaagatacaaatatcatagttgcgggtgctatggccgagacgcgattgcgagcggggcgcaatattgttcctgcggaattatggaaaaagggacatattcagttctcagctaacaatggagagaatatacaagtgtttccctcctttgacaacgtacaagtgcaacgtggtagcgtgaaatatatcagagtaaaagcagtaaaaacctatacagttgtaggaatgctacaggacgaaagcggtaatatcttgaaaaatcgctatgttagtagcgatgtctccggtggtgtaataaatgttgaaggggtaatcacactagattcggggatcactaaccaaaaactgacagtgaaagcggaaaacggtcaaccagcaatggaatgtatgcttgccactagtaaggataaaaacaaagtcgtgcagtttgttggtattgtgaaatgccgtacagaggatccaggagaaaagaatgaataa

SEQ ID NO: 314555 - DNA, 1233 bp, Proteus mirabilis
atgaataatccagtattatatactctgacggctgggatattgcttacctgtagtgtaacgggtatagcagcgaacatagatatcacggcttcgtattcaacctcaacagatgcagagggcaaaaatatctttacaaataccacttcgacaataggtgatgtttgtgagcgattatttttcggatgtcgttcagattataacaaaggcagtattcctatgggaataacggcaactcggaatggtcggtgggcaccgcataatagcgatagaagagctatttattttaaaatgccggctgcttggcgagatattacagtaacgaatccgaaaactggtcagttcagtaagcttcgcttcagagtatcagacttcgcagccaccatgtattggagtagtttagtaatacttatggctcccctccctccttgcttatcagctgatggaacacataatgctaaaaatgtttcttttaaatgggcatggcccaacaatgatatagcatgcacaacgctggcatcgacaacattccttggaaaaccgcaatcaattgaaaaaacggcgatattctatgagttacagacaccggatcctctgaaaatggaaagtgggatctacacaggaatacttcctttaagggttgggcctggaggagaagtcgattttggcgatgcttttgatgtgtcagataacgagttaaatatccgttttactctaacggttactcatgaactaaaagtaacacctattatgcctgatgatcgggaagtgacgctacaaccttgtgctattggcagggtatgcacggaagatgaaggtcaagcgaactgggagcgctggatggtaactcgagctacacctgaattgactggacgaagtcattttgggttatctagcagtggaacctttatagtttatctagaatgtgggcaacagagtggatctgactgtgccctgcaaagtgacaaagtaccctcacaaatagttcccattcagaccttcttaacattacccgaaaatgttgtcgacaagacaacgggtatgacagtatcaaagcggcgtttattcgcagggcgtcacgtaaaggaaaatatttttgtgtcaaataattatagtcgtaatagacctggtagcatagattttttcgtgcgccggaaagatgttgatactatgttaaaaacacgcccagatacgtatcggggaacagtgactattattttcgatcctgacctttag

SEQ ID NO: 314556 - DNA, 246 bp, Proteus mirabilis
atgtttagtgatggcgttttatcgcatcgttacaatcctgaggctcatattaaacttgtttttgatacagaaagtatcggtactatttttaactcagggatgacacttagatttattgataaagataatcgagtcttctatttcctcttctcgcctaccttctattttaaatgtattaccacatatttctcctcaagttatgcaagctatagatttattaccgattatagaattaatggatggtga

SEQ ID NO: 314557 - DNA, 282 bp, Proteus mirabilis
atgatctctacattagatctgcatcgccaacttaatgatcaactgatcctgctcacgctgatcatactgcctgatccagacaaggccaacaacaccatcggtatcactaccagcctgagtagcagcaggtcaaaatccgagcagaaggtggtgcagagcacggcagtggacagtatgctgaatgccgggcaagatattcacattcgcgcacactcggtcagcccggagcaggggggcgatattgtaatacccagttcacaagcaatttttcggatgctttga

SEQ ID NO: 314558 - DNA, 309 bp, Proteus mirabilis
atgaatgatgaaagatataaatacattaagagattaaagctatctatacaatccgctttgtttggggaaatcactccgaatatgagatgtgtgctagttgatattgttaataaaaaaattgagttattcttttttattgatggggaagtcaccgaagatgacgaagaaaacatctcaattattgaaacagaagttatcgctgattttgaagatgattttgatattgaaactcatataaaaagaatcgattatccagcacctattgttcttgatcatggttatggtgtttatagaagaaaagaaaattaa

SEQ ID NO: 314559 - DNA, 300 bp, Proteus mirabilis
ttgagatgcagtaaagaaggtgtgtttgtcagcgccctgaatctggatggcagccgtaatgatactctaacggctatctataaaggcggtcagttatcgacgatctcggatataaaaatatcaaataataccggtggtaaccaaatcccagagcaaaataaggatgatgggaagttaattacaccaatcccaacaccaggtgaggttggtaaaaaccatattgggcatgatggtggcctgggtgatgttgaaatcaaaacagataccggcgggaatcaaatcctggataaggattggtga

SEQ ID NO: 314560 - DNA, 315 bp, Proteus mirabilis
atgaataataatgatgagttaataaagtttaaagaaattgaaaaagaaattattttaccatttctccaaaatgagttttattttttagattcggtagatattttatatcaaggaatagaccaatacgttgaaatttatgcttatttagtgaataaaaaatttgtaatagagttcgacctctcaactatagatcatagtataactaaaaatgaaattttgactgtacaagagtatgaaaaaagccttcaagggaaagggcgagctaaaaaagaagctcgtgattttttacgaaaattaatgcataaagaagtatag

SEQ ID NO: 314561 - DNA, 366 bp, Proteus mirabilis
atgcaagagttgttaactagtttaggtaataatttattaactgacatccagttagatggttttaaatatgatttagagtctctttctctaaccctaagcaaaccagatgaatcattcaccttatcatttgaatgggtgtattcattcagagttacaggagaaggagatctcttaaaaatgcaagaacattttgatgggcaaatgactacaggtctatataaagtagaaaactcatcatatttaaaatggttccatgaacagagtgcaaatatacacgatgatgtcattgaacattatttaatcgttactatagatgatgttatagaagtaattacatcagcagaaccatcagttcaaactatgtga

SEQ ID NO: 314562 - DNA, 1299 bp, Proteus mirabilis
atggatatcatccgcaccgaaggggatattgcaggctataaagcccaaaaagaccccgatgcgttagccattgccaaaaaacaactggaagcggcgggtaaaacacctaccgagcaagccattaaagaccaagcctacaacaatgccatggcacaatatggcacaggcagcgacttccaaaaagcggctcaagccgtcaccggtttgctacaagggctggcgggtgataacttagcaggtgcgctggcgaatgcctcgtcaccgtacttagcaacattgataaaacagcaagtaggcgaagataataaagccgcgaatgccatggcgcacgcagtattgggcgccgtggtcgctgagctaaataaccaatccgctgctgcgggtggattaggtgctggtggcggtgaactgtccgctcatgttatcttaaacaccctcttcccgggcaagaaggtttcagacttaaccgagagtgagaagcaacaagtcagtgcactgagccaattggcagcaggtcttgctggtggactgactaccggtgatatgcccggggcaattactggctcgcaagctgggaagaatgcagttgagaataatgcgctgactggcgtgatggtgaaaggtttagaaaaaggctatagcgcgtgtacaaaaaatgccagctgtttaaatgggttagctaagctaggagttaactttggtttgacacgagatcaaatcgaagaagcgatgaatgcaggaatggccgcaagaaaaggcgatactgctgccatggaaggactgtcccctctacaaattgcttacattgatgagcaaattatcagtggtaagggtatggctcgggagatgtttgggactcagacatggggtgatcgaatagctctatctgaaagtggggctaatgattcaggaagtaaaccttcatctgaacaaaatagcgtagtcggtggtactagcactggctctccgaatggaatagaaccaccgaatgatgacaaaaagaagaatgaatctaaaaataaagaaactactgttgatgacttaatcgaaacttcacaagaaggaagaaaaactacaggaagggctaagcaatatgaacggtctggaggaatggagtcagcgaatagagattttgatgctctttcacctacaaacgttcgtgagataccatcaggcagagtcggaaaattaccagatggtagtactgtaatagtaagaactaaaagttctgatggaaggccaactcttgaaattcagcatgtaaaaaataagcaaactaaatttagatatggagaataa

SEQ ID NO: 314563 - DNA, 636 bp, Proteus mirabilis
gtgagtgcttatggtgttcaaaaactaatggctcagctgggtctagtcgtcactcagcgcattgcttacaaagttaccacaaaacgcaaacacagtgatgccgtagccgataatttgctcaatcaaaattttaatcctcatgcgcctaacgaagtttgggcgggtgatgtgacctatttaaaaacaggggaaggctggatgtatttagccatcgtgatggacttatactcacgccgtattgtgggttggcacatcgataaacgaatgacggcagatttagtcagtaaagctttgatgaaagcgtataacttgcgccaacccgaaaaaggcttagtctttcatagtgataggggggcacagtatacgagtaagcgatatcgccgtttgctaacaagctatggtattcgagcaagcatgggcgatgttggagcctgttgggataacgctgtcgttgaacgattttttggtagtttaaaacacgattgggtactgaaaatcccacagccgacttggaaacagatgaaagaagatattaccgcgtatatgcgctattacaacctagaaaggcttcatactgccaacggtgatctgcctcccattgagtatgaacaaaattccttaagaaaagtgtcctga

SEQ ID NO: 314564 - DNA, 291 bp, Proteus mirabilis
ttgcattcaaaagatggagaatgtatagaaaggtgtttaaaggatggccgattatctgcatcatacaatccaacagaagacccagacacagatgcattcgttaaaaccgtttggaaaatcttcaaaaaaggcgctaaaaaggtttatgctattaacagggagacaggtgaagtgtatcgtgacaaacctgaaactcggtattttgcttggcctgatgctgcaaaaatttatgatggtacagatggtcgctacttaacagccaccgcatttaatttttacatcgcaaaataa

SEQ ID NO: 314565 - DNA, 249 bp, Proteus mirabilis
gtgacagctcgtaaaggtggctcttatactgatatgacctttactgatgccaaaggtcgcaccgtgtatattcaaacggtagacaaaggcaatgtcaatggaatgactcaacgtgaatgggataatgctgttcgcataacccaacaaaatcctaacgctgttgttattacagtcccgaaaggtaacactctacagctaggtgcattgaatactgataatatgattgccgggacagtaactcaacgataa

SEQ ID NO: 314566 - DNA, 330 bp, Proteus mirabilis
atgcaacccctatttacgacatcaaaacattcattacaaaatgagattaccgaactttgtggcggtgaaaatatttttgcaaatagtgcagttccttggccacaagtcagccgcgagcaagtgatcagtaaaaaacctgatttgattttatttagtggtaaaccaaaccaaattgccgcaatacaacaattttggcaacctcaactagatattcctattatcgctattgatgaagatagttttagccgaccagcaccacgtattatttatgcggctcaacagatttgtgaggctattaaagataataataagtacactcaattatattag

SEQ ID NO: 314567 - DNA, 705 bp, Proteus mirabilis
atgttcaagttttcatccatcttctttagcttatttttaactctcttttttgttcagcctgtattggctcagaaaggcggggttggcttaagccaaacaaggattgttatggaagagggtaaaagcacagctataaatattcaaaatagaagtagtaaaccatatctagttgcaaattatattactaagaaatataacgaaaatagaccaatggaaggtttgtttttaattacccctaatttatttaaagcacaaccaaatagttataatgcagtaaagattcaggttgtttctaataataattttcagaaagacagagagtctctctattactttcattcgcgcaatattcctgaatcaaaaaataatgaagatggtatgaatattggtttagaaaatgtaattaaacttttttatcgtccaaaaggtttatcaatgtcaccaagtatggctttttcaaaaccaaagtttacatttaatggttctcagttagtagttgagaataatacaccataccatattaacctcgcatcactaactataaataaagtagctataaaacttaataaagagaataacattctttatcctttttcaacatcgacattttcaacaattaagcaaaaaggcatggtgaatatggtgaaatggagtgtatttaatgatttgggaggcttagatgagttttctcagaaaattaattag

SEQ ID NO: 314568 - DNA, 582 bp, Proteus mirabilis
atgaatgcattaaaatctaaattaagcttaattactatggctttagttttgactggcgtatctagtcaattaatggcggctgaaaatgcgaaagtagactttactgcgcgtttagtgactgcaacttgtgacattagtgcaaatacagcgaaagtagatttaggtactcatgctgttggctcacttactactggtgatatttctactcctattgcagaaaaaggatttaacttagtgctaaataactgcactaaagtattcccaggaagcactggtgaagaaggtcaagctgtagaaactccagtaacaataattgctacaggtaacactttagctggtcacaatgatttattctcaagtgctacagctacacaggttggtgttaaattaacatcaaactatgaaggtatgcttgatactgtattaaaaccaaacgaatcagtggctgtactgaaggctaaacaaggtgagactgagttcgttgtgcctgtaactgctgggttaatgaccacagtaaaaggtgacacactgaaagcacaagatattaatgtacctgttacatttagtgttgcatacgactaa

SEQ ID NO: 314569 - DNA, 402 bp, Proteus mirabilis
atgagtgggtttgatatcatcattgaaaaaaacgtagttgaaaaagatttaaaaaatgctatggctaatgcttttggcgtcttaaagaaaaacatatttatatcagatgattatgttgatacaccattaagtgatgaaataaaaatatggtgtattactactcccatagaaggtgacttttcacttaattgtatggtctttataagagatgaaaatataacatgtacagccatgaaaatagtaaaagaattatgcaatcttttgagcaccaattgtttaatatcaaatgagaatgttgatccattcgagtggatattaattaacccgaatggaaatcacgttttagtaaatttgaattctgatgagctagaaaatgatcgttatattttatctgtaatatag

SEQ ID NO: 314570 - DNA, 1038 bp, Proteus mirabilis
atgataagaaaaacattgctagccagcttattaaccgtgattagtggtactgtttttgctttacctaatgtgacaatcctcgcaactgggggaaccatcgcagggggtggagactctgccacttcttcaagctacacagcaggaaaattaagcattgatacattgattaatgccgtacctgaggcaaaaaaagtggctaacttaacaggcgagcaagtggttaatattggttcgcaagatatgaacgaccaagtgtggttaaaactggcgaataaaattaatacggattgtgataaaacagacggctttgtgataacccatggtacagatacgatggaagagaccgcctattttcttgacttaaccacagcatgtaaaaaaccggtagtgatggtaggggcaatgcgcccagcaacagcattaggtgctgatggtccattaaacctctataatgccgtagtggtggcaagtgataaagcatctgaaaatcgtggtgtattagttaccatgaataattcggtgattagtggtaaagatgttgtcaaaatgaatacgacagaagtgcaagcattccagccgattaatgcgggtgctcaaggttatgttcatgatggtaaagtacactattacactgttgcaacaccgcgcgctgagaaagttgcctttgatgtcagcaaattaaccgaattaccaaaagtaggtattgtttataactatgctaatgcatctgatttaccggctaaagcgtttatagataaccactttaaaggtattgttagtgcaggtgtcggcaatggtaacttatattctgatatcttaaatactttagctgatggtgtaaaaaaaggtgttgttgtggttcgttcaagtcgtgttccggttggatttaccacacaaaatggtgaagtagatgatgcaaaatatggctttattgcttcagaacgtttaaatccacagaaagcaagagtgttattacagttatctttgacagaaacacaagatcccgccacgatccaagaaaactttgaaaaatattaa

SEQ ID NO: 314571 - DNA, 411 bp, Proteus mirabilis
atgtttttatctttaaatgccaatgcgaataagatgggaaaaaccgaagcctgcccacaactagataaaattgtagagattggcacgggagtttatcgagcttctggcaatgatggtgaatggcttggtattattcaaaatgtgttgcccgataacaataaaattgaaagttttaattcagcatctatacttcaagaaaatgatacctcaccaatgaaatttcaacattgcgcatataatcttcaaagaagctcacaattacaaatgcgttttatccataataagatcccatcttatacagttaatactatcggtaatgaatggaaaaaggattccgggccatttggtttgattgaaacaatttgtactagcccacaacctgaaaaatgtgagtttagcattttaaaataa

SEQ ID NO: 314572 - DNA, 459 bp, Proteus mirabilis
atgagaattagttcaatttatacacaatctgtaggaccattagctgatggtgttattaagttagaagatgattggtctaatgagattgaagctcaagttttatttaccggtaataatggttgtggtaaatcgactttattacggggcatagctattttatgggaagcattaggtatttggctaagtactgaacaaccgttagctacagcgagcaatacacgaaaatggttagaacgctggggagggatcgctattatttttgaagattttaatctttcttctgatgataagattaaaattggacttttttatggttcagatgatttttttacccaagtagtaacaaactatttagatgtaatgtggataggtgaaatttcaaataataaaaaagacgtattcaatcactttataatgaattggttccagaattatctattcctaatattgtctatttag

SEQ ID NO: 314573 - DNA, 708 bp, Proteus mirabilis
atgactaaatctcgctgggtgaataaccctgtttctgattttacttatagctatgaagaagaatataaagatacacttattgaagtggttaaactggaattaaaacgcgataaagaacctttaactacacgtcaaggaatgactatttcacttaatgggttatcgctcgccagcaatacgcgggtatataacatttcttatggtgattatccattaaagtttatctataaatatatgtctaaaatgattttcaaagcaagaatcacatctaataatgctattccttttcaaatccaaaatagaaaaataaatgaaggcgataatattttagtttatgatattcaaggagtttttatgtttatcattaagcctaatgtggtactacttaaagatgaaataaaagaactagaacaagctcaatttaaaaaagaatgctcaacaccagatggaaatttaagttggtgtattagtttttggatcaatgccaatgtttttgagcgaaaacaagatagatataccatcaccacagaaaaggtattacctaaacctatctcggttgccctttttaatttaaaaggaacaccgagaactaatgttggtaatttaattagcaatatagttggaacacctatattggctgcgggggatgtattactggcaccattaggcgttttagttggcgtagttgctcaaggggctggaaattag

SEQ ID NO: 314574 - DNA, 570 bp, Proteus mirabilis
atgaaaattttatcttcgtgtaacccttttttatttttctattctaaaatagaaagcatatccattgatgaattaaacaaaaaacttgagtctgaaattttaaaaaataaaaatattgaaatgaatgcctgccataaagcggctattcaaatagctgtcattgatcagagtatttcaaaggagacaaaaaaacaactcatagaatctctttgtgataattactctgaatcatataagaagttgatggatgtaggagaaaatactctgtatcaaagattagtaacagattcaatggaaagtggcttccttaactttgttaaagaggatggttcactatgccatactgcgtatataaagcaatataatggaaattatgaatactatcatacaaattacacaagcatcgataaggcatttattgataagtgtgggatggaagtaatgaatcaaataaaaggaacaagcattagtcattactctatgagaagggattcagttgctgctataaacgaatttatgttatcgaataaatggagagtatctttctgccctgcagactattttgcataa

SEQ ID NO: 314575 - DNA, 999 bp, Proteus mirabilis
atgaaagtggacgttagaggcgctaaccaagatcgagggacgacaggcattaacaatattaaagattattgtaacaaaaataataatgtggtagggaattttctatttccgatacctggggggcaggacggtgaatatggtctgagattgtataataaaaatgtaagtagtgaggaaaataaaacaaattatctagttgctgcgattaatggcacaataaaaattgaacattaccctaataactatggtcggcctttttacgctaatattaatttaaatcgaggaaaagccggcccaattacaggtgaattgagcaatactcttactaccaatggtccattatgttggtatggggcttatacgcggtaccataattcaatattacgtataaactcttattccatttatgctgttggcaatgttaaaccaggtatttatgattttgttgcccctatatattggtcgatagcacagcctaagacagataatattggatattctgtaaatactgttcctttttcatttgatgatggccctattcatgtgttgaaaaagtgtaatgtgacaccaattaattcaactaatatacagtttacatctcaattagctaagcaatatagttcaccgaaattacttgataaatatctggctggtattatggtgtcttgccctaacaatggaagtctctatgtttcattaaaaccttttggcgaattagttgatttaagcaagacaggcatgaagatgaagccagataatccattaaatactaacgaagtagcgccttacatttccgtttctgatggtgagaaatcggcaactgatgctatttgtaataaaaatgattcgaatgcttttgaattttataatggaaaacagttaggttcttataaagatagttctttaatgaaatcattatcatttaatctttgtgctcaaggtaatgtccctgccaataattataaagggagtatagatgtttctattctggttgaataa

SEQ ID NO: 314576 - DNA, 360 bp, Proteus mirabilis
atgtctaatcaaaagcaacttgggacaaaaacaggaattggtgctactgcggggataggtggattcctttctgttttagtcagcattcttgttccaaaagatcatattcagttagctcttacaacagtgcctataattactccttttatatcgagctatttaataaatttatcagcttttatgttagatgaccctgagtcagtagctatgagggctcgtttgaaaaaagatttaaaaaatataaaagaaacattggatgatgattattgttctgaggaagcaaaagagcaggcacgaaaagattatgatgctacacggttagctcttggtaatgtaggcactgttgtaagagctaactga

SEQ ID NO: 314577 - DNA, 264 bp, Proteus mirabilis
atgaatttagcagaagtcagcacttttacatgggtgatattagctatcagtacgatagctatagctccttttgctatctattttgtgaaagcttttattttcttcatagtatgcaagttaaatccgatacaaaagttaactgttcagcatgttcatgatggaaagattacaaatactattacgttagaactcaactcatctatcccaatagttagacaaattgccatacagactcaaaaaggcaaggaaggtgaaaatgtctaa

SEQ ID NO: 314578 - DNA, 426 bp, Proteus mirabilis
atgaatgaagtgattactcagcctcttatgggaaaaaactctcctgtattcagggtggaagtaaatgataaagaagtgttaaaaatagaaaacactgacactcaggaatttactccattaccaaaaaactcattaaatcatgtagcatctaaagttgtaactgcaaatataactattacccaagtgaattttgaaagccaaaatggctggaaaatgcggtatgacgataaagaacgggctgtgaaaatggccgatgaatcattcttaaaaagggtaaatgacaatacgaaaagctttacaaaaggagatatgctcgaagtagaattagaaatagccgataaaacgactgctcgaagcgagagaacacagtacactataattagggtgattagacatagagccatagctgagagaaaattggtatag

SEQ ID NO: 314579 - DNA, 279 bp, Proteus mirabilis
atgaccatggctgctttatttattgcacaagcaacgggcgtagatttgtcattaacaaaacagattacgttactctttgttaccatgatcagttcaaaaggttctgctggtgtcacgggtgctggttttattactttagcaacaacattatcggttgttccttgtgttcccgttgcaggtatggcgcttatcttaggcattgaccgctttatgtcagagtgtcgcgctttaaccaatattgtgagtaatgcttgtgcttgcattgttgtcgcacgatag

SEQ ID NO: 314580 - DNA, 210 bp, Proteus mirabilis
atgctaaatggaattgaaaatataaaacaaaataagtggtatagagctactccaccatgtttagctggtgtatttataaataatccagtgttccagaatttttttgttgtatattttaatgcgaatttttcggtaagcattttggagaaagggaaaaaaattgcactaggtatgcttaaagttagcattaataagccttcaatagtgtga

SEQ ID NO: 314581 - DNA, 324 bp, Proteus mirabilis
atgttattgatttcactcaaatcaagaaaggtatatgttggaatgctagatatagctagatttgatggccttgatacaaacactcttgtgattatacctgttatgtctggttatcgagataaggatacaatgacatttatagtagaacataattatgcagagcactatgatcaggaaggtatcactttaacttcagaaccattgtctgtatttcatttcaggcatgttctaccatttgatcaaatagaatcactatcattatttaacactaatacatatcaaaaattccaagagtcaatcaaagaaaaaaagaaagcagattag

SEQ ID NO: 314582 - DNA, 474 bp, Proteus mirabilis
atggctaataatatctatatgaaattaaaagggaaaaatcagggtggaatttctgatgggtgttcgtcttataagtctattggtaataagtatcagacgccacatacggatgagattttaattattgcagtttcttttgatatatctagagttcaaaatcttacacatggccctttttcaataacgaaatatgtagataaagctacacctttattactaactgcagtaactaataatgaagtaatggattgcgaaattgattattaccgtacatctgatataggttctcaggagaaatatatgaccattcttttacgaaatgttagtatcattaacttttcacaaacacatgctaactcactaatgcaaaatgatgcgttacccactgaaacactaacactacgttatgaaagtattacttgtaatcatataatagcatcaacatcaggttatagtatagctagtacgttgtag

SEQ ID NO: 314583 - DNA, 582 bp, Proteus mirabilis
atgatcaataaagagacagggataaatagtcgatatttaataataaaagcaaataatagtggcattgagaattctggtaatataaacactttatcattaaatcatgagtcttatgacttgcttaatcacggaaacatagatataaatacagatgataatttatatagaacagcttatgatgattataaacaatcaaaaataattgttttaactcgttatttgggtagtaataaatcatcatttaatattaaagatactgatttatttatgcaagcggagtatatgtatttagataaaaaaattaatattgataatggttatttatatgcaaatgtgggacgtatatctataggcaatgttaaattgtcggataagagcaaatttcatattaactccgatagaagtatatctcttcgtggtaaaattcgcgggtatggtcatgttgaattacaagtaaatgatgataaagttgatattaaaggtaaaaaattgttaataggaacagagaaagcaggattagaggggggaacaaaatataaattaggtacattaactattatagattatagtaaatacaaataa

SEQ ID NO: 314584 - DNA, 426 bp, Proteus mirabilis
atgcaagttatcgctggttatggtgcttgcacaggtagtattggcttactatgtagttcattaggtgtagggttgatttctcatggtaccaataacatgtatgaaaatggttactatcttttattcagggaaaagacaaatggatatttaagggaggggtataggtctttgtcaaaagaattaggatatggtaactatgaagcagatatagcttataactttgttgacttgactttatccgcaggtagcgtggcaaatccaacactcaaacctggagcattcaaactctttcgatatatagacactgatttcattacaacatggaaattaatgacaccatcagctttatttacagaaggttttttagacacagtaacaatatattccacatatgactcatacaataatgagaataaaaatgattga

SEQ ID NO: 314585 - DNA, 360 bp, Proteus mirabilis
atggatctcgttaaaaatcatctagaaaataacggatataaagttaaagattgctctgccttaaaatcatatgattttgaagcaagaaaagaaggttctttacttaaagttgaagtcaaaggtactacatccatattttgcgaagaatttattatgacacacaacgaagtggaacttcacaaaaaagaatctggtaatacagctctttttttagtttatggcattcaaattaaagaaatagatggtaaattttttggggaaaaaggaagtatagaagaatttatgtattggaatataaataactgggagttaaaacccattgcttatcgactacgttctaaatcctcctgcaattcataa

SEQ ID NO: 314586 - DNA, 459 bp, Proteus mirabilis
gtgcaattttttaaaaatacatgtgatgttgaaacacctgagagtattattttatcaaaaacacctgatgcaggggttgtgtcttcaatagatatcaaaaacgattcagttaatattccttttactataggtttacaaaaatgcacatcaaaagatttaagtaatgttagcatatatatttctcaaggaaacacattagcagatacaactgatttttttaataataaagcagatggtaatatcggggttcagataagggatgttgctaataatagagtattttcagttaatacttctaattctgcagtacctaatcctaattctattgtgtgggataatataaaatcagaagctgaaaagaaacagttaacagcatctcttcgctgtaaaactgaaaattgcgaaccagatattggttcatttacagcttctgtgacattaagctactatgttaactaa

SEQ ID NO: 314587 - DNA, 192 bp, Proteus mirabilis
atgtcactatctcaattaaaattaaatggagttttatattcttcacctatcccagtaatggttccgccactatcggaaatagctttagataataatgaaaaagtaaaagatgttagttggcaagttattgatgattttggtggatattcatctgtttattcacaatccttaattgaaaaaaataatagataa

SEQ ID NO: 314588 - DNA, 168 bp, Proteus mirabilis
gtgttaaaatccgctgtggctgcaagtggtgcacgttatgttggagaagggttccaactgtggggtaaaggtagtaaagagttcaatttagcgacaatatcagaagatgatgcagttaacggtcgtattgctgaagataaaggtcgtacttgtaaaatagtaaaataa

SEQ ID NO: 314589 - DNA, 153 bp, Proteus mirabilis
atgggaatgtcttcatctcaagccgtacagctacaaaaaggtgataacattcttcaatatagtgcatatgtacaaggtgctgatgtagaggttgactctataccactaggtaaatttgaagggatcactacttttactttatcttataattga

SEQ ID NO: 314590 - DNA, 909 bp, Proteus mirabilis
atgaacgattggttgactatggagtatgatgaaatattgaatgaggcaattatgtctgaaacgccaatgttagtcgttgaaggcgtcgatgacatttccatttatgaaggtatttgtcaacagcttgataaatatttcgaggtggttgctgttcagaatttcaaggatatgagtgaaggtaatagaggtgtaattgactttattaaggcattacttgaacttgagtatgagggggatttaggacactacattctaggtattatagatcgagatgctcgctactaccgaaatgaaattgttaataattcagccgtttttgtgctgaaatggtattcgatggaaagccattttatcacacggcaggcaataaaatgcgtgattgaacaatgtacaagaatacagccaaaattgctaactagtgagttaattgagatgctctatgaaaagttagtagaggctctaatgtcgttgtactatatgtctttagagtgtttaaagaaagcctgcgtgaaagattatgaatctctagcatcatataagatgagcgttcaacatttgaaaaacataggcgcttttgaatcaattgttgaacgagaaaaagaacttgataaatttgctattcaggtgggtgtaagcaatgatatggcaggtttacttaatgtatgtaaaggtaagtggcttattggagagttctgcagaatattaattagtgaaataaaagggctgaaaacaaaatgtctgcatgatgaggtagataaatgtcagttttgttacagtgggaatgatgagctctgtctttatggatttgaaggaagctataacgagtctcaaatagcgagtttaattaaaaagaatgaaggctacacacaatttggttatttaaaagaacgcatagcaaacatgatctaa

SEQ ID NO: 314591 - DNA, 1290 bp, Proteus mirabilis
atgaagctattatctatatacattgcaggcttccaatcacttaatagagcagcttatgttgaatttgctgatggtgacatatctgttatttatggtgataatggttgcggtaaaactacatttttgaaattagtacattctattcttaagcgtgatgatgagtcgcttgcaagcgaaaatgtaatgtatgttgaaatctattatgagaaaaataatggagaaagagaatttataccagtaacacagattcaagaggaggtagacgaggggattattaaaaactcatacgactggagtgagcttgtcgattctgaattagctgattgtacatcattatctcttggtgtggagagaggcgtaacctcagagtcattgaaagttgaaccagtggatattttgaggtttcttggtcatccagaatatcgctctttatttgcaaagacagatattcatttgtttagtgaaaggatggcaatgtttctaaaaagatatcaaaacaataggagaagaaataaaaaagataatatggatttagatgcaaaacatgtttttcttcaaaatataaaaatgagtaatatcgagaatatgctagttgaacgttatctgttagcgagaaatatagctactgaaagaattcaaaatgcgttgtttgatacgttggccattgcagtggatgcaaagaaaacttctgacgatatcgtgatgccttcgaattttgagaatgatgtgtataaaaataaagaaaggattattgaagcgttagatgatggttttgagaataattttaaaaatcatgttgttaatattttatcatcaattcaaagtgaatctgatgttaataaaatacttgaaaaccaattattaagaaagttagtcatgaatatgactcgtgaattaaaggttgagaaacaacttttaagctccattaacatcctagtcgatgtctttaactccttcttggttggagataaaaagctaattattaacaagcaagagatatatgttcaaactgaagattctaatctatccattggagcattatcaagtggtgaaagacatattcttacctttctatcaatagttataattgcaggtcgcggcagagatattctacttattgatgagccagaaatttctcttaatattaaatggcaacgtacattgctaagtcttctacaagaattagtgccagaaacacaaatcatcgtggcttctcatagccctatcatatctaagaagtcacccaacagtttggtcaaacttgcaccggttaaaattgagaatgattag

SEQ ID NO: 314592 - DNA, 564 bp, Proteus mirabilis
atggattactttcagactagcgggttattaataaatatattaacaatgttagttgccgttggctcatcatgtattagttaccttgtttacaaagagagcacctatccagacgtcattgtttaccttgaacaaaacaatgacgtcaaaactattttaaatattgtaattaagaatataggtaaaagtgctgcaaaagatataaccttcagttttaatgaaaacatctttaagaattcactgtctaatggtgagtatagtgcgttaacgaaaggtgcattggtttcaggcataccattccttgcacctggttcatccaggatattgaggcttggaaatttcgctgactctaagaaaattttaggtgaccaaaaaattagagtaacaacaactttccgcaaagcaaatagcaagaaccctttcgcaaaaaatattactaatgaaagttatattgaattgttatcactggctatggtggatgcctcagataatagtaatgataaaaagattgctgaaaatctagccaaaattgagaaagctttgcttaagataaaaacacaacactaa

SEQ ID NO: 314593 - DNA, 1425 bp, Proteus mirabilis
atggggagtaaatttgaaactaggttacttggtgaactttgtcatgagataacagttggttttgttggtacgatgacgaatgaatatatcgaaaatggtattccatttttgcgttcaaaaaatattgaggagtatgatgttaaatgggatgacatgaagtatgtgtcatctgcgtttcataaaaaactttctaagtccgtcctcaaaccgggcgatgttgcaattgtgagaaccggaaagccaggaactacatgcgttataccaaatgaccttcgagaggctaattgttcagacatagttattgctcgagttaataacgagctactatgtccacattacttatcgtatttcatgaatgcaatggctcatgggcaagtaaatgctcatattgtaggagctgtgcagcaacactttaatgtcagctcagctaaaaaattggaaataccgctaccttctagagtgaagcaaactaagattgttcaagtacttaagactctggatgataaattaaaactcaaccgccaaatcaaccaaaccctagaacaaatggcgcaaaccctatttaaatcatggtttgtggattttgatcctgtggttgataacgcactagatgcgggtttttttgaacaggatttagctttttctgatgaattactgcatcgagttgaagtgcgcaaagcagtacgcgaaagtgataattttaaaccgttatcagaggatattcggcggttatttcctgatgcttttgaagaatgtgctgagcctgcattagggctaggggggtgggtgccaagtggatgggaactcggtaatttgagtgatgtaactaatattttgagtggttttgcttttaagagtaacgagttccaaaattctgggtttggtgtcataaaaattaaaaatattggtaatgataaaagtgtcgatatatgtgacattcaacgaattgatatttcattagctgagaaagctaaacgttttagccttaaagatggagatttattaatggctatgactggtgcaaccgttggtaaatttggttttcttgttactgaaaatcaagaaccgtattatttaaaccaacgcgttgcaaagtttgaggctattgatgaaagtactgcttatttatattgtattctaaatagaaagattaccgagtcttatattgttaatacagcgcaaggaagtgcccagccgaatataagtgcaaaagatattcttgcaatgccattaattactgctccacaatctataagggaactattcaatgacaaagtaaatgatagttttcaaaaaatcattcagatgagaaagcaaaatattattcttgagcatctccgagacacactcctcccaaaacttatctccggcgagctgtctttgagtgatataaaaatagatattccagaagaaacacttatttaa

SEQ ID NO: 314594 - DNA, 1338 bp, Proteus mirabilis
atgtcatttgaactatcttaccagtacttacgctcaataaaacacctactttgtgatagcaataaaacaaagcactatcatggcaaatgccctttttgcaaatccattatcgaaattgcagaggttttcacatcacaaaccaaagttatgaataattttatagttccagaattaaatgaaaaaggcataatgatcggtaaatgtcacaattataattgtcgttactactttaaattagaggtttttaatcccgacctatcatgtttcaattctggtgcaacaaaaaaagacaattacatatatgttgacaacgaaactaaaaaaatagatgaatatgaatttgttaaatcaatggaagaaattatagatactaacaacatatttaaaaatagaaatgataactataattttgataatcacccattatatatttgtaacacttgcgagaggaatttagaacctatcgcgtatagtgatttggaaataaaatggcatacgatatcaaaaaaatattataattatattaattggtcacttggtaagggaggttgctccccaaaaaacattgttattaacttcccaataaattgcccttgtggtgaccaacatattgctaaatttgtaagtagttatcatgaaaacccatattttgataatcatgaattttcattattagatatatatggttctaaaccgttaacagaacatgtttttgcagttcattcaaaaactacagtaatgaactggctttacaaattaattgcaagatggaattttttattcgataagatatatctcatttctccttttgtaagttatcaatttgctaaaaaagaccaaagggttgatacgtggcttgaaataataaatagaacagacccattaaagaccttaatatccactaagggtaaagaggttaatagcttcaaaaatgcatattcagaaatcaatgaaataagctataaagaattagtaagctatggattaggttcaaacttagtagaatccgtaaagaaaaataacaaatttcatgcgaaagtttattgcggaataagtaatggtgtttgtgaagtattaagtggctctgtaaatctaacagaaggtccaacaccagaagtaattaacttcaatagaatttttgattctaaaaaagcatatgatatgtttttaaaaccactgggtattgatgatatatcaaacgagttaaacacattaaatacgagggattactctttattttttgatgaaaaaagagatttttctccaatagaattttataaagaagattatatcgattatgttattaataacattattcctaaaccattagttatataa

SEQ ID NO: 314595 - DNA, 270 bp, Proteus mirabilis
atgattaaaaccgttttattaccgatcttgttcgggtttattggtgcgggtatttactcgcacttaaagccaccaaaaccgctagtggcacaaattgctgtgataaatatgagcaatccggacgggagtatcaagtcgccccaagaacgcgctgtaatacagcatagagctgatattttgaaagataagggattcatcattttcaatcaatcagcgcttcatacggctcctgacggcgtatacatcagtggaaagctaaaagataactga

SEQ ID NO: 314596 - DNA, 942 bp, Proteus mirabilis
atgtcagtttcaaatgacactatcgactataccatacgtggcaactctgcggcagtagataaagtgattactcagctcgcagccgcagccggtataccaaaatctacttttattcgaaataaattagaagaaatatttcaaaatagatatgaccaatatgccgcctcaagttctctggttgctgcatatgacgaaattttagcaagagaactaggtacaactgttaagagtattccgatagacaactttatgacaacacctaaaaaaattgccatgtgtgaaatactgaagataaaggatagccgtcaactagagagtgttctgattaataacggaaagtacatattacatagagcgcgtcagacaatgtttggcaatagcaacgtccctgttcttactgccagttctctttggtttgctcttttctgtgaattagctggtactacccaagaacaagtgaaggaagcagaaaataggatcttcaataaatttaaacttgagggtcgttattatgagtacatggaagatataaatgctattcgtgagttaaaagggattcagcctctccctgttcgtgacaacgatgcggaaacaaaatactgccaagtacgaatttataaacctaaagaatatcagtatggagcatggcgcgttgaaatttttgtaagcaaagaatcacagccagtcatggaagaattcggtatatgttatccggtattaaaaaatagattattaatcgctgatagtgctttaagctatcaaacggcagtgctaaacagtgacaaagaatatgagtctggctttctctttaaaaatggagagtgtcaactggacttgtattcaagtgggatttctgaagaactcaatcccacaccaatcagtgaagtggctgaagtattaaaaaatcatataaatgatattattattcagcgtttaggatag

SEQ ID NO: 314597 - DNA, 1077 bp, Proteus mirabilis
atgaaacgcctagaacgaaaccctgaaaaatttgaagcactagaggtatttacagcattcagccgtgaacatggttataaacttagatcacaagaagataccgaaaaattcctgcaagtttttcgtgatactctcaaagtatctcaggaaaatacaattttgcttcacggcaagcgtatggaatcttgttttggtcaagtagtcgctggtctgcatggttgtcgtttgattaaaactgaagatataggtgacgtaatttatgatgatgacgaaattaagttaccagattacagactcattttgaaagatgggagacaagtatttgttgaagtgaaaaattgtaatcattctaacccgaaagcatcatattttcttacaaagaattatgttgaaaaacttcagcgatacagtgaaataaaccagatacctctcttttttgcaatatactaccgttgtctaagaatgtggactttactaccggtaacttcatttattgagcgcaaaacgaaatatgaaacatgtgctttgcattctttaggaaacagtgaaatggcaatgcttggtgatgtaatgattgcaacaaagcctccacttatcatcgaactagtagcagataatacacaagagatttctatcaatgatgacaattatgcgcattttgtctgtggtgatgtgaaaatgtattgtgatggagaagaaattattgatcacaatgaaaaaaatatagctttctatcttatgagattcggtcagtgggagtgtggtgaaccagaagcagtaatgactcagagtaatacgttacagagtgttcgttattcatttgtcccccaatctatggagggctttgaaaaaaatggattttcaatacttggtaatctaagttctatgataactgaagcatttaatgaacataccgtctatgagcaggaagtaacagctattacctctggagcagaacctgacgttttttcagtcaaaatccctgtagattataaaggaagcgttcttgggctgtggcgtttctcttttgaagcaaatccggattttaaagttggtgagaatagaattaccgaataa

SEQ ID NO: 314598 - DNA, 555 bp, Proteus mirabilis
atggaaaaatacacgagtctgagaacaatagctgacgatattcagatgtacccatattcatatctattatgccgacaattattaaaaaagggatacattgagggcgaggctgtgattggtatctataagcaagaactggtccaaactccggagacagatttagcttacacaaacagcattttgcaatactcatggatcgagacaaaggctcataccgtcatagaccctttaattgattttcgcgagggaaaccaaggaattaacctaatcgagagagacaaaacagcaaattatcatgctggcgtaaatcccttgaaaattacaaaggaattacttccagaacatcgttgctctgatgaagtgtttacactcatgagaggtgcagaatcagaggctatgaggcgaattttaggtttagatcagaatccaaatggtataacaatgactgaagctgcattcattgctaatttatcagtcgagcaatatctcggttatgatagagtcatgttcaaatttctggtgaaacatcatttagaaatgcttttagctacataa

SEQ ID NO: 314599 - DNA, 819 bp, Proteus mirabilis
atgagaagtaaatcgcatgtaaccgactctcaagcaaatgcacttatcaatgtgaaggttccagctaaagattgggttgtccataccataggtgaacgtgactatgggatcgatttaatgattcaagtatttaagaacgaaaaagcgacaggagactgtttttttgtacaagccaaaggcactgaaaaaatttttaatggtagtgttaaaatgccagatttccccgtcaaaactatagaatatgcattgttatttaatgtaccattttttgttttctacacatctataacaagtaaatcaattaagtatatttggcttcaaaaatacgtggaattagaattaaacaataaaaaaccaaactggcgtgaacaagaaaaggtaacgctatattttcctgaagaaaatgacttagatagcaatacagttaaaatttataacattttgacagaacatagagcaaagatagaaagccttgagtttttaaagttatatgaggaacttgtattacatgcagaatctttcgcttctggagaatatgaagttagtcgatactgtgtagatctttgcgttagacttatcaaaattcagtggttgattaactaccttggtataaatacacactcgcatggaagcaacattaatatatttaaccttaaagacgcatttcataatatatatactaataatcatgttagctcagatgattttacagtaatatgggatcaactggcaatgttagaacgtattaaaactgaaattatatccaaagacacattcaatgaaatagcttatgaccatgccaatattataccattttaa

SEQ ID NO: 314600 - DNA, 558 bp, Proteus mirabilis; identical to SEQ ID NO: 120952

SEQ ID NO: 314601 - DNA, 330 bp, Proteus mirabilis; identical to SEQ ID NO: 19372

SEQ ID NO: 314602 - DNA, 243 bp, Proteus mirabilis
atgaatgatgatttcaagtcatgtctaattgaggttttaaccattttcactgtaactatcttactttgttttacgctcacctttggggtgatgtatggcgttaattcatatcagtgtaatcagtatcagggtatcactggtattgagacaaaaatgggtggatttgagtgctatgtaaacactgggaaagcatatattccatatgatgaatacaaattacggtcggcaactcacagagagtaa

SEQ ID NO: 314603 - DNA, 297 bp, Proteus mirabilis
ttgaccgttgtcagtggcaatgatgttaatgtcattggtagtttgatcaaaagcgctgataaattaggtattcattctttaggtgatatcaacgttaaatcagcacaacaagtcactcagattgatgatgaaaaaacatcattagccattactgggcacgccaaagaagttgaagacaagcaatatagtgcgggctttcatatcactcataccaccaataaaaatactagcactgaaacagaacaagctcaaccattagtggcgccaatgttgatctgcaagcgaataaagatgtga

SEQ ID NO: 314604 - DNA, 537 bp, Proteus mirabilis
gtggatatcgaccaagggcccttagggtatcagcgagcggaataccgctacgatatcttagggcgccggattgaaaaacggttatggaaagccagtgcgattgccaacacagtcacctatcaccaacatgagccggatgaagtgtacacctttggctgggtagggatgcgactggtatctgagcacagcagcgcagcgccccataccacggtttatcatgcatacaatgaccaaagttatacgcctctagcccgcattgaatgcacggataacccgcttaatccgcaacgggcgatttattatacgcacagtagtttaagtggcttaccggaagcgttgaccaacagtgagggtgaaatagtttggcaagggcaatacagtgcttgggggcatttacagcgtcaaacccgacccacaagcacatttaatcgtgaacagaacctgcgctttcaagggcagtatttcgacaaagacaaatttgtcgggaacaaatttgaacagcgcttgcgctggcccgtagggcgagtatcaggatga

SEQ ID NO: 314605 - DNA, 801 bp, Proteus mirabilis; identical to SEQ ID NO: 96018

SEQ ID NO: 314606 - DNA, 633 bp, Proteus mirabilis; identical to SEQ ID NO: 142787

SEQ ID NO: 314607 - DNA, 753 bp, Proteus mirabilis
atgagtagacaacgggtatcaaaaggcagtgttataccaaaaaaagaattcaaaatagcaacggtgctgtctctccttgctgttgattgtgattttgattccttcttttctgagtttaaacgtatctatccaaaggattgggaaagagttaataagcgttaccaagagcatgagagattaacaaagccgggtaaatcacatcctatggcagagcctttgcaatacatgaagactgcttttaatagttttaaaagaaagctattaaaagaatctattaccgctaaggatttcttattatctcttgaggagccaaaagagaaatatagtgagtcagaaccatcagaaaaagtatggaaagatattaaaagaaatataagtgttgtttactcctttgagaaaaggctactggcgattcacttacttggtaaatataagtgtacagaatgtatagatatgctagttaatactatgaacaacgatcatatctttgaagtacaaaagttggctcatgataaacttgttcgtttcggactcgatgtcggtgctcaaccgaaaagaccaccacaccacaccgaccctcaaattacacaaaaaattgcttcactaggtttttcatcagaacaagtaaaagataaaaaaacatgcgaacgagctatcagcgagttccgtaaaaagtatcctattgattacgacctgtacactcactcaaaacgcaatcagttcaaggcttggtttagaaaacagatcagttaa

SEQ ID NO: 314608 - DNA, 426 bp, Proteus mirabilis
atgatgaacaacacagcgttgttacagcacatagcctctgaatttatagcccattcaggagttcctgtgaaaccggcatttgataaaattagtgcaggtgatgaaacattcattaatgaactgtcaccatcggatctgcttgaactactcgaaaaccccctgcctattatcatcaatactttgaccggtgagcctcattccgcaatacatagccacagtgacgatatattgcccgactgtaaaaactatgcatatgggatagggtatgagtctgctactgctttgtttgtggtgattgcggggattgagagttactatctcgcgcttaaagcaaaagcatatctgaagaaccagaattatttaccgttactaataaaattaaacggtttaaataaacatgcaggtcgttcaaatttccactattaa

SEQ ID NO: 314609 - DNA, 387 bp, Proteus mirabilis
atgacgattacacaacaagctggattaccactattacagggattaaaaattattacagagcaattaacgcattcactgtatcaacgagcactcactgatatgatagcgcatattactcaaggcaaatcacttagctcatttatgcgacataatcctctattcccaccaatctgttatcaatttatctcttcagcagaaaattctggacaactacagtttttttgccagcaacttacccactggttttatcatcaattagaagaacgtcttgatagtgtaaaaacatggcttgagcctattttaatgacactgatcgcattgattactggcacgcttattattgcgatgtatcttccggtgttacaactaggtgataccatacattga

SEQ ID NO: 314610 - DNA, 633 bp, Proteus mirabilis
  misc_feature (617)..(626): n is a, c, g, or t
atgttgcgtgaagggcaatttgagtatgagtttagtgcggggcaatatgatggtggtatcacgacagattccaaaaaaagtaaatttgctttaggaacgtttagttatggtatcaataactcaatcactgcatacggtggtttattaattgccaatggttatacctctggtgttatcggttcgggtgtttctcttgggttattaggtgccttatctgcggacgtcactctcgccagagctaatttggataaaacttatcacggtcaatcatatcgggttcgttattctaagagtttattatctacagggacttcgtttgatttaaccgcattacgttattcaactaaagattactatgactttagtgattacaataactcaggttatgaattgcgagaaggtattgcaccttggttaagccaacgtcagaaatctagttttcaaacctcaatttcacaatcattaggaaaatacggttccatgtatcttcgtggtgaaaccagccgttattgggggaatagccgtgttaataatagtgtcacattaggctataacactgttctgaaaggtattgcatttaatatagattattctatttctcgcctaaaaagtgatgnnnnnnnnnnccactaa

SEQ ID NO: 314611 - DNA, 177 bp, Proteus mirabilis
atgatatatttacacaagagaaatattattaaatttatttttacaaatcaatatattatcaatatcaaaacaacacaaaaaaatgtgattaagataaaacaaaaatatcagactgtaattttaattttacaaccgcaagaaattggctttcacctagcagatgaaacgactttataa

SEQ ID NO: 314612 - DNA, 201 bp, Proteus mirabilis
atggaagaatggacaagccagagtggcgagaagaaatcagctccagtaattgtcgttaaccaattggattttggcggtaacggtggtaatcaggcaggaagccagaagtcacagtctcaaggatggggacaaccacagcaaccgcaagcacagagtagtcagccaccaatggatttcgatgactctgatatcccgttttga

SEQ ID NO: 314613 - DNA, 270 bp, Proteus mirabilis
atggttgttgtgataaatgttgttgataggctttttcttgagtctcaaggcgcgttttttcttgtaaaagtttatcaagtcgctgtttttgctgctcttgcagacgtgttctttcctctaccgataatagagaggctaaaaagtcattttcatcggcaaaaagactctcttttaacgcgtgttgatagtgttcagtggcttgttgtgcttgtgttattgctcgttgtagggctttttcattctcttgatattggccaattaattgattaa

SEQ ID NO: 314614 - DNA, 519 bp, Proteus mirabilis; identical to SEQ ID NO: 299944

SEQ ID NO: 314615 - DNA, 267 bp, Proteus mirabilis
  misc_feature (48)..(57): n is a, c, g, or t
atgagcaataaaaagtccgccaaaaccaatctgttgtcctattatggnnnnnnnnnngaattagaagcaagtgcggctaactttggtttaggtacacaccacgaaacaaacaaagacggtgacgctgtagatactaaagtaggtttctatggtattaccatgaaaaatgcgacagtaaaaccaatctgttgtcctattatgggaaccgctaatccacaacaaaaaaggataaaactcgcactgattaatattttttctgcgccataa

SEQ ID NO: 314616 - DNA, 558 bp, Proteus mirabilis
atgaatgaattttcgattgtctgccgtctattaggtacattatttcaacgtgcaccgagtgatgctattttagcaccgatcataaccatgatagcggaagataaactaagccaattatggccattagagcaagatgagctgttcaaaacgttaaaaagtagcgtagctgatttagcggcagtagaagctgactaccaatcgctttttgctgacccaatacccgcagtatctctttatgcacatgattatggtgatataaaagagcaagatattcgtcaatttttagtcgctcgaggtatgcctgtcaccggatcagcgacagatagctttggtgcgttgttacttgccgcttcttggcttgaagacaatgccgcacaagatgaagtattagcacaaacacagttatttgataactatctattaccttgggcgggaacctttttaggtaaggttgaagcgcatgctaaaacaaatttttatcgtactttagcagcaattacgcgtggggcactttctgcattacgagaagaattatcagatgaagaagacgaaaaataa

SEQ ID NO: 314617 - DNA, 237 bp, Proteus mirabilis
atgaaagataaaacaggtgggcccgccttcccaaatgtaccagatggtgctggtgataagtggtctgattgggatatgggcatgacgttgcgagactattttgctgctaaatgcatgtcagcaatcattaactcattaaatggccctgttgtatttgaagaatgcaaaggcgattttgatgtgtacgcaaaacaagcctatgtcatggcagatgcgatgttaaaggctagggggtaa

SEQ ID NO: 314618 - DNA, 693 bp, Proteus mirabilis
atgaatatttatattgatatcgaaactataccatcacaagacccaatggttagacaaaaatttatagatgatgtgaccgcccctggtaattacaagaagcaagaatcaattgatgcgtggctagctgagaaccgagaaattgtcggcgaagaaaactggaaaaagactagttttgatggggggttgggtcatgtttgcgtgattggcgtagcaattaatgacggggaaacaaaaactttctacgcagaagattatctagccaatgaaaagagaattatcactgatttatttgagcttattgacgacaattacgacccatcaaaaaacgtaccacctgtatttattggtcataacgtagctgagtttgacctcaaattcctattccaacgcgctgttgttcttggtgttaaacctccgagagtgatccctttcggagctagaccatgggataaggccatatttgacacaatgactgtatgggctggtcataatggacgtgtatcgttagataaactctgctctgttcttggtttagacgctaaaggctctgaaactggcgaagatatagacggaagtaaagtttgggattttgttaaggacggaaagatttcagttgtagcagagtattgcaagggtgatgttgatcgggttcgagatattcataaacgcatgacatttcaattaaccgcctaa

SEQ ID NO: 314619 - DNA, 375 bp, Proteus mirabilis
atgatgagtaaaactctattattagccatgatgtgcttagttggggtatttgcgatgggcatgacttatctgtctaatgactatgtggtgttaattattgcattagctttattaggaatgtcatcttttgcactttatcctattgctatcacattagcttgtgatcatgttaatgcgagctatattgtggcaattactcaggtgatgttattaagttacagcgtgggttcagcaatggggccattaggcgcaggtatgtttatgtcacaagcaagtaacggcattatgaactttttctttgtcgtgttattagcgacagctgtatatatgttatttgccagtttacgacgcaaaagccatattgtgcttaactaa

SEQ ID NO: 314620 - DNA, 1743 bp, Proteus mirabilis
ttgaaaaataacgaattagaatggcaggcgttacgcccagattacgcctcctaccagactttctttcaaacagcatcgcaattgcctgcatcttcacttcgtgaggttcaacctcgcttgtatgaaagcttacagtggctaaataatgcagaagcaggccaatttatgctgttaaaagcagaagattctactgcttatttcgaaatactcgctgatacattacaacaagcagagataaaaacttatcctgttgtaggtgcctatcaagctgaatctaatcaaatttattggcaagaaaatgtagaaggttcattttcatcatcagaatctattgcttgttgccaatggatagagccagaacaactttttggttcattttattatcataaagataagctcctcgttaacccaggactgttgcataaaatcaatggtggtattttagtcttatccattaaaacgctcctagcacaacccttaatgtggttccgactgaaaaagatggttgaagagcaacgctttgaatggttagtgtggaatgaccatcaagcccttcctttgcctattgaagccatgccccttcacttgcgtgttattttagtgggcgatcgcctaagcttagaagagcttgagtttatggagcctaatattagcagtacggcactatatggcgaatatgaatacgatatgtatttagaagatgaaaccgctctgagccaatggtgtggttttgttaatggactttgccaaaaatatcgtcttccttcattatctgctgatgcttggcaagtattactgactcagggcgcaagagagcatgaagatcagcttatcttatctctcgatcttgaattcatattacgccaattacgttatgccatgcgttttaatcatgacgcttatcttggtgctgaggcgcttaaaaaagcgcaagaaaatcgtttatggcgacatagctacttattagaacgaagccgtgatgaaatattacaaggccaagtcactattcacacggaaggtgaaatggtaggccaaataaacggtctttctgtcttagattatcccggttatcccgatctaattggcgagccaactcgtattacctgtgtggctcatattggtgatggcgaattggtcgatattgaacgaaaagcagaattaggtggcaatatccatgcaaaaggcatgatgattatgcaagcctacttaaattctgaattacgattagatcagccacaaccttttagtgcttccgtcgtttttgaacaatcttacggtgaagtggatggtgatagtgcctcactagcagaattatgtgcgctaatcagtacattgtcacaacacccaattgatcaacaaatcgccgtaaccggtgccgtagatcaatttggtcaggtacaacctattggtggtgttaatcaaaaaattgaaggcttttttgatatctgtcagcaaagaggattaacaggatcacaaggggttattataccgctggcgaacgtgcgacatctggttttaaacgagagcgtgatacaagccgtcaaagaaaataaattccatatttggccggttgtccatgttgcagaagctattactttgctaacacatcagccttattacgaagagcaatgtgaaaatccacaatcaaatgaacacttgttagctgttattcatgatcgaataacacaagcgaataatcaggataggcctaagttaccttggttcctacgcttattcagatga

SEQ ID NO: 314621 - DNA, 207 bp, Proteus mirabilis
atgatcaaactcagtaaaggcagtaaaaactactatctgacacgtgaaaacgggcagttagtttttatcaaaaacattaaggtcagaaataaaacggctaaaaaacaagtgtataaaattattgttgggattgacttgcttcccgatgaagcagacagatctattttaaaaagtatgttggaacaatggaaaagtgaatatgaatga

SEQ ID NO: 314622 - DNA, 849 bp, Proteus mirabilis
atgcaacaccaaaatactcaaaagaaaatactacgtactatttgtccagatgcgaaaggacttatcgcaaaaattactaatatttgttataaacatcagctcaatattgttcaaaataatgagtttgttgatcatcgcactggccgcttttttatgcgcactgagctagaaggcatttttaatgatgaaacctttttagccgatttagatgatgcacttccacaaggctcacagcgagagcttaatactgccggtcgccgccgtatcgtcattatggtcactaaagaagcccattgtattggtgacctcttaatgaaaagtgcttttggtgatctggatgttgaaattgcagcagttattggtaatcacgacacgctaaaacaccttgttgagcaatttgggatccctttccatctcattagtcatgaagggttaacccgtgatcagcatgatgaaaaactgatagcacaaattgaccaatacaaacctgattatgtggtattagctaaatatatgcgtgtattaacccccgcatttgtacaacattacccaaatcaaattattaatattcatcactctttcttaccggcatttattggcgcccgcccatatcatcaagcctatgaacgtggtgtaaaaattattggcgccacagctcactatgtaaatgataatttagatgaaggccctattattactcaaaatgtaataaacgtagaccacactttttcagcagaagatatgatgcgcgcaggacgggatgtagagaaaaacgtactaagccacgccctctattgggtgctctcgcaacgtgtttttgtctatggcaacagaacaattattttgtag

SEQ ID NO: 314623 - DNA, 2337 bp, Proteus mirabilis
atgtataaaaataaacagtgggaattagatagaagaacgctattaaaaggaatgggagctattggtttggcagctctttcccctaatgcgtttagcctagctaatgaaaataaacccatatttaaccagaaaactcggataaaattatctgaatatcaaacttttcaatccacctgtgcaatggaatgtctccattgtaacctaaccgcttttactcatcagggaaaactaatcaaaattgaagctacagaaggctttaatgtcaaatgttgtttacgaggaattagccgaactaaatgggtatatcataaggatagactcactacacctttgctacgtgttggcgaaaaaggtaaggcagagtttaaacctattagctggaatgacgctttagatcttatcgaaaaaaacattcgagaaactatcgataaatatggcaacgaagggctttttatttctactcacgctggaaatatggattccatcaaaaacgatatgggtaaagcctttttcgactatttaggcggttctacaaaacaagccggctctttatgttgctctgcggttactgcagctatgatccctatggttggcctacgctatgcagatacgcgtgatacggtaaaagatagccgttatattctatgttggggcaataacccagcagtgactatgcacgcctactttaaaaattataatcaggctcgccgtaatggtgccagaatggtagtcattgatccgcgttttaatgaaaccgcagccaaagctgatgagtggatccctattattccgggtaccgataccgcccttgcattaggaatgatcaaattaatcattgaagaaaatcttacagataaaccttttttgcgtgcccataccggagcggtgtatttagtcgatcaacaacaaaaactactacgtgattcagctaatgataaagatagctatttagtctttgataccctaactcagcaaattgttcgccatgatacccccaatattgtaccggcgttaactcatgatgaactgccaaataaaataaattacaccaccgtttttgaacaaatctatttacaagctaaaccctggactatcgaaaaaaccagtaaagaaacagatattccacaagagactattattcgtttagctcgagactacgcgacaataaagcctgcaatgattgtacaaaatatgtctggcgcacaacgcactgaatttggtgcttatgttgcggcaagccagttttatcttgctctattaaccggcaatattggtaaaaaaggcgcgggtatttgtgatgccggtggcgtgcgtcagatggcaaaatttaatcctattattccccctgcaccaaatgttaaacccattaatcctattcctgttgcaaaagtgggtgaatggatagtcaacgaaagaccccacccgattaatttctggtggatcatgacgatgggggtgatgacacaattacccaataccaatatggtacgtaaggcgctaaaaaaagttccttttgttgtcgtagccgataatttaatgtcatcaacagcgctttatgccgacttagtacttccagtgacaaccatttttgaagatacaagtttaatggccggtgtgcgtagccaatatgttcaattaatggaaaaagccgttgaaccaccaggagaagcaaagcctgattattggatttttgcccgtcttgctgaacgctttggtttcggtgacgtatttaatcaacctattgagcactatattgatacttgcctcgcgggatcggggattacgcgggaaatgctagaaaaagggcctgtacgaccagtagaaggcgattggatcccatttaaagacggaatatttcgtacatcaacccaaaaagcacatttctttattgaagaatggcaagataaaaactactcccctatagtcacttattatccagtaaaggaatcgacaacaggctcccctgaattagcaaaaaaatatccgttaatggctgtgcaacgtaagctagcacgtagtgttcattccagccatgggatgaatgaatggattttagaagtacagcgtaatcaacccaatattttaatacatcctaatgatgcgttatctcgtggaataaacaatggtgattgggtgtttgcttttaatgatagaggtgaacatagagcaatagccgttgtcaccacacacataaaacaaggtgttgtttctcttgataatggttggtgggaacaacaaggggggagtagtagccatgtaacaaatgaccatgttgaacctttaggtaatggtcattgttgtaacagtaccctagttaatgtgagacgggaggcataa

SEQ ID NO: 314624 - DNA, 876 bp, Proteus mirabilis
atggtgacaaagagaatgcaacggatgatgttcgcggcggcggcgtgcattccgctgctgctgggcagcgcgccgctttatgcgcagacgagtgcggtgcagcaaaagctggcggcgctggagaaaagcagcggagggcggctgggcgtcgcgctcatcgataccaaagataatacgcaggtgctttatcgcggtgatgaacgctttccaatgtgcagtaccagtaaagttatggcggccgcggcggtgcttaagcagagtgaaacgcaaaagcagctgcttaatcagcctgtcgagatcaagcctgccgatctggttaactacaatccgattgccgaaaaacacgtcaacggcacaatgacgctggcagaactgagcgcggccgcgttgcagtacagcgacaataccgccatgaacaaattgattgcccagctcggtggcccgggaggcgtgacggcttttgcccgcgagatcggcgatgagacgtttcgtctggatcgcactgaacctacgctgaataccgccattcccggcgacccgagagacaccaccacgccgcgggcgatggcgcagacgttgcgtcagcttacgctgggtcatgcgctgggcgaaacccagcgggcgcagttggtgacgtggctcaaaggcaatacgaccggcgcagccagcattcgggccggcttaccgacgtcgtggactgtgggtgataagaccggcagcggcgactacggcaccaccaatgatattgcggtgatctggccgcagggtcgtgcgccgctggttctggtgacctattttacccagccgcaacagaacgcagagagccgccgcgatgtgctggcttcagcggcgagaatcatcgccgaagggctgtaa

SEQ ID NO: 314625 - DNA, 630 bp, Proteus mirabilis
atgaagtcactaatttatgattacggaagaatcaactgtatgagttgcccttctcaatgtgaattaaaaccaaatgcctcattgcgcgtttcgttttgccaggactattgtttttgtacctggccagaagggagtggctatttttctctggggattatggaggggctcctcaaacaaaattataataatctatatttaggctgtatttttgtcgatttttctatcagccatttgcgtttttttactaacgaacgttggatagattatttaattgaaacgaaattaaaaattgttatcgtttgtgataaataccttaaaccattggctaattactggtttaagcattctaaagatatttttcttgttatctatcagcaagatcggctgacgctggcctgtgaaaagttaaaaaagagatttatctatcagcgcgacgccttctttggcggagagtcactctctgaactggagtttgctgtcttaagcgcattgatttccggagacggttgtctgcaactggctgatgaactcaatgtcgatattcgtactatctatgctgcaaagcgccgtgcggaaaagaaaatgggggccgatatcaatacccttttccgattctcacattcgttataa

SEQ ID NO: 314626 - DNA, 732 bp, Proteus mirabilis
atgatcaacgtcggaggcgttgggctacgacgatacgctaaaatattcatgagaaaaaatcctgatcaagatggaatacaatctgtacctgttgcttgtgtcaccgatctggacgttatgccaaactgtgctccctatattactaagatcatccaagacgatagtgattggacaatattaggggacggagagaacagaaagtggcgtgctaagcgggattttacattgacgaaattaaatgaacataaggaaaagattaaatccaaggcccatgggcaaaatgttaagtcatttgtagcagatgagtggacactagaatatgacttagcatttgcaaacgacaacgctttggctgaagaggtctatattgctgctcaattggctatatgggatgaaggggataattactctgaaaaaacagctaaggaaaaaattaataaggcccaagccaaatatacagctttaaagaaaaaggctgacaaacttgcagcagataaaggttgggacaagaatgaagtgttagcgagtaaagtctatgcaatgtatgtcacaggctctaaagcttcaaaatccatcgcagcacagtatttgtgtggaattatcatggacaagataacccttgaaaaaacatatgatttaagaaccaagctcccgggctatattgttgatgcaatagactatgttacatcgaatcttcgtattgtttcagggagtaagattaatgaaagttga

SEQ ID NO: 314627 - DNA, 1335 bp, Proteus mirabilis
atgtttgggttaagtgcctttgatttggcgcgtatccaatttgcgtttaccgtttctttccatattatcttccccgcaattactatagggctagccagcttcttagctgtcttggaaggcttatggctaaaaactcgcaataaggattatttagcgctattccatttttggtcaaaaatattcgctgttaactttgctatgggcgtcgtctctggtctcgttatggcatatcagttcggtactaattggagctttttctccgattttgccggctctatcaccggccctttattgacttatgaagtacttacagcattcttcttagaagctggatttctaggtgtgatgttatttggctggaacaaagtaggtgaaaaattgcactttttcgccacttgcatggtggcattgggtacattaatgtcaacattttggattttagcctccaacagttggatgcaaacaccacagggattcgaaattgtcaacaatcaagtggttcccgttgattggctagcggttatttttaatccttccttcccttatcgtcttgctcatatgggcgttgctgcatttcttgcttcggcattctttattgccgcctcggcttcatggcatttattaaaaggcaacaagacatctgcaatgaagaagatgctctcgatgtctatatggattatcttaatcttagcgcctattcaagcacttattggtgatatgcatggtttaaacacgttaaaacatcaacccgccaaaattgccgcgattgaagggcattggcaaaataatcctggtgaggctacaccgttaattctatttggtataccggatatggatgaagaaaaaaccaaatatgctcttcaaattccttatttgggtagcctgatattaactcatagtttagataaacaagtaccagcactaaaagaatttcctaaagatgataggccaaattcactgattgttttttggtcatttcgtattatggtcggccttggcatgctgatgattttagtgggtgtatggggcacatggttacgttacaagaaaaaattatatcaatctaacctcttcttgagattcacttttctaatggcaccttcaggattaattgccattttagcgggttggtttactacagaagtaggtcgacaaccttgggttgtgtatgggatacaacgaacacgagatgcggtatctgcgcatggtgaaatgcatatgagcattagcctactgattttcttaatcgtttatggatctgtattcggaattggatatgcctatatgttaaaacttatccgcaaaggtgcgccggaggttcaagatgggaattga

SEQ ID NO: 314628 - DNA, 579 bp, Proteus mirabilis
  misc_feature (542)..(551): n is a, c, g, or t
atgaaaccggcaaaaaaagtggtgattgtaggcagtaaatttggagaggtttatctcaatgcatttatacaacctcaagacaaatggcatcttattggccttttttccaaaggtagcactcgttctcgagaattatctaaagcattcggtattccactttttactcgatttgatcaactacctgaaaaaatagatctagcttgtattgttgtgcgatcagccattgttggtggcgaaggtagccaacttgcgcaagcatttttacaacgggggatctcggttgtacaggaacatcctgtacatcctgatgaaattaccagactacaatcattagcagaaaaaatgcattgccactatatcgttaacagcctctatccacataataaagcaggacgtttatggatagaaaacacacagaagatatatcagcaaatacaacaacgaccagtgtggggacaaattatcacaagcaggcaattaatttattccgccttagatatatattgccaagcaatgaaattacaccctaatgatattacagnnnnnnnnnnttctacgactatccaaccctactggtga

SEQ ID NO: 314629 - DNA, 1110 bp, Proteus mirabilis
gtgcctgaggatattgttttcggtcaggcagcattaagtttatatctaaaagatccccgtgatgtttattacgtcaaatcgcctaaatcttttcttggtgcctcaggcttacatgagatacaaatcagcttttttgaagatttagtgtgcgccatgatggccaatataaaacaacaagcggaaaaaagcacccaagcaaccattactgatgccatgattggtaaacctattaactttaatgggttagggggagagactgccaataagcaagccgagcgtattttaattaatgcagctaaacgagccggctttaaacaggttttatttgaatttgaaccggtagccgctggtttagaatatgaatccacattaaccaaagaccaaacagtcttggtagttgatattggtggtggtacaacggactgctcattgattcaaatgggccctagctatcggggtaaaaccgatcgtgccagtacactattagcgcatagtggacaacgtgtgggtggtaatgatcttgatatctacctagcttttaaacaactaatgcctttatttggcatgacagggttaacttcatcaggcataaaattgccgttaaaacaattttgggatcctattgccatcaataatgttgaagcacaaaaagatttttattctcaacaaaatttagccgcattaaatcaactacgtcgtgatgcccaagagccagaaaagataaaacgcttaattgaagtctataatgaaacactaggatatagcattgtccgcaaagcggaagaggcgaaaatggcattatcagattgccatacctatttagccagcatcgcgttattaagcgaaacattagaaaccaatatcactcgccagcaaatggttgaagccattgcttcccctaaagataagatgattgatttggtcaatgatgccgtacaacaagggggcgtggtacctgatgtggtgtttatgaccggaggctctgcgcgttcaccgattttatgtcaagctatcgagcaacagttacctaatgtgcctattgtaaaaggaaatgatttcggctcagtaaccgcagggttagcccgttggggtgaagtttgttttaaatag

SEQ ID NO: 314630 - DNA, 921 bp, Proteus mirabilis
atgcaattaatggctgaaaatggctataaacttatcgatatgcaacaagggcaattgcgctatctcgcttctgccacctgttctgtcggtactgaaaaagcatgtcttagtggcttcacacactatcaaaatattgataaagccaacgctatacaaacgggcattagtggagcttatcgttttgatatcaatcaaacaccattagtggttggtcttgctattgatagcgatagctactcttctttaccaacaggctatgaatatcaaggataccctttaccgttaattggttttagcgttgatttaatcccgtcactaaacccaacctcgaatggcaatgcattacatctttcattaaaaggggcatatgtaaatcgcaaagtcacgattaaaagaccaatattagataataccgaagcaggtaaaggacacgcaaagatctccggttattatattgatttacaaggatattattcttacacactcaataaccttatcactgtaacgccttttgcaggacttacttttaatcaaacatcacgctctgcttatagcgaaacacagggggctaaacttgcagcccattaccaagaacttaatgcacattcattgcttgcaaaaataggattaggaatagagtatacggtcaatgccaaactcaaactggacagcaaagcgggtttattatggcatttatcacatcaccaaggtgacttccaaagtcatattgattatctaggtcagcaaaaaattaactataacgacaacaaaaaacagttagcacagcgtccatttgctagtgtagggctaacttaccaactagataaacagtcatctgttaatacgacaacaaattggcaaatgaccccttatcgtcatcacgatattcatatgggtattggttatacatatcgtttttaa

SEQ ID NO: 314631 - DNA, 942 bp, Proteus mirabilis
atgacttatgcattggagttaaccgagttaacgaaaacttaccataatggtgtcaaagcgcttaaaggaattaatttaaccgtagaagcgggggatttttatgcgttattaggccctaatggtgcaggaaaatcgaccaccatagggattatcagctctttggtgaataagagcagtggtaaagtcaaagtatttggctatgacaccgataccgatatggttaatgctaaaagacaactcggattagtgccacaagaattcaatttcaacccttttgaaaccgtattacaaatagtccttaatcaggctggctactatggtgtaccacgtaaagtggcattagagcgtgcaaaaacgtatttaacccaattagatttatgggagaaaaaagatgatagagcacgttttttatctgggggaatgaaacggcgtttaatgattgcgcgtgcattaatgcatgagcctaaattgctgatcctcgatgagccaacggcgggagtagatattgaattacgtcgttcaatgtggacgtttttacaacatttaaatgcacagggtaccactattatattaaccacacattatcttgaagaagcagaaatgctgtgtcggaatattggtattattcagcgtggtgaactggttgaaaacaccagtatgaaaggtttattaagtaaattagagtctgaaacctttattttagacttagcagcaaaaagtccgttacctgaattacaaaattaccaatatcgtttagtcgatacatcaacactagaagttgatgtgaaaagagagcaaggattgaatggggtttttgctcagctcaatgcacaaggtattcaagttttaagtatgcgtaataaagctaaccgccttgaagagttatttgtgcatttagttaatgaagatcatacagaaacagaaaaaggagagagggaatga

SEQ ID NO: 314632 - DNA, 123 bp, Proteus mirabilis
atggcaatggagttagaactagtaacgtttgatttagtaccaatagcaattgagtttgttccatatcctatttgggaatcggtaccaatactaatggagtcattaccatttaatttccgttga

SEQ ID NO: 314633 - DNA, 450 bp, Proteus mirabilis
  misc_feature (437)..(446): n is a, c, g, or t
atgggggatgatatcactttacaaggtgctgatttaactatcgatgggaaacagctacagcaaaaagagaccgatattgataatcgctggttctactcgtggaaatacgatgtgactaaagagaaagaacaaatacagcaaattggtagccaaattgatgctaaaaataatgcgacattaaccgcaactaaaggagatgttaccttagacgcggctaaaattaatgcggggaataaccttgcaattaatgccaataaagatatccatatcaatggattagttgagaaagaaagtcgtagtgaaaatggcaataaacgtaatcatacttctcgcttagaaagtggtagttggagtaatagccaccaaactgagacgttgaaagccagtgaattaacggcaggtaaagatcttggtttagatgctcaaggctcaataannnnnnnnnnataa

SEQ ID NO: 314634 - DNA, 186 bp, Proteus mirabilis
atggatgaacccttttcaagtttggattgggaaacacgttatcagctttgggagcttattatctcattaaaaaaacagcaaataacgatgataatagtcactcatgagcctcgtgaattgcaagcattagcagataaaacgctgttattatctaatggaaaaattgtgcaagaaagtaaaaactaa

SEQ ID NO: 314635 - DNA, 282 bp, Proteus mirabilis
  misc_feature (234)..(243): n is a, c, g, or t
atgttaaccattcactcgttaactaccggtattttaaccgaggtttcattacacctagagcaagggtgttgtttagggatcagtggctcatcaggtagcggcaaaacaacgttactcaatgctattgcgggttatactggctatacaggggatattgttttagctaaccaaaatatgaataaattacctgtttggcagcgcccctgtcgttatttaaatcagcgtctttatttnnnnnnnnnnctcaaatatcagggggagagcagcaacgagttgcattag

SEQ ID NO: 314636 - DNA, 369 bp, Proteus mirabilis
  misc_feature (307)..(316): n is a, c, g, or t
atgttaagccccaaagcgttacgtacaacgattgcccttatttggttaattgaagtaattggttcttctatgtcaatgggacacctaggcgatcctctcggcgcttatcgctcagtacttggtgttgctcactcatggttaagtcgtgaagctattgcctttgttatgttaaacggtttaatttccctctgggcattagcaagttggctacaaccaaataaaatacgccgtaatagcctactaggtctgttctgtggtcttattggcttacccgttattttaataacagcacaaatttattatcaannnnnnnnnngccctattattgggttttggctctgttattccttggttacagttgcaaggtaa

SEQ ID NO: 314637 - DNA, 387 bp, Proteus mirabilis
gtgtgcttacagtttttacgtaataaagatgagttagctgatggcatgatcaagcctattattgccaccatgaaacgcttctcattatttggtcacttcgctgttttattggttatagctagtgggattgtgagtgccattatgttactccccggttggcctgcgacaacacaactttcctcagagtaccaaagtatgttatggctaaaaatagcctttgttgccttgatgttaggattggcattagtgaataggtatgtattagtgcctcatatccgtaagaagaataactttcaatggttgcttattaatagttggtttgagttattacttggtactatggttattttgacagtggccatttttgcgattaactcacctgtatag

SEQ ID NO: 314638 - DNA, 288 bp, Proteus mirabilis; identical to SEQ ID NO: 289914

SEQ ID NO: 314639 - DNA, 801 bp, Proteus mirabilis; identical to SEQ ID NO: 307826

SEQ ID NO: 314640 - DNA, 579 bp, Proteus mirabilis
gtgcccgatgcaggccatcaagggccggatgtctctgctgttaatggtggtacgcaagtgattaatatagtcacgccaaataacgaagggatttctcataaccaataccaagacttcaatgttggcaagcctggggctgtatttaataacgcattagaagcgggacaatctcaacttgcgggtcatttaaacgctaacagcaatttaaatggtcaagctgcctctttaattttgaatgaagttgttagccgcaacccatcattcttattaggtcagcaagaggtctttggtatcgctgctgaatatgtgctttctaacccaaatggtatcacatgtgatggttgtggttttataaataccagccgctcttcattagttgttggtaatccgctctttgaaaatggtcagctaaaaggctatagcaccctcaacaacaccaatttactatcgcttggtaaaaatggcttaaatacaacagggttgttagacttaattgctcctcgtattgatagtagagggaaaatcacttctcacaacattttgatattctctcttcacaaaaacccgtttcagcattag

SEQ ID NO: 314641 - DNA, 675 bp, Proteus mirabilis
atgcaattgatgagtaagttatggcctgctcatttacctgctcgtatgacagaatatcgcgataaatatgagcaccatttaatgctaagaatggcggatagtggtatagaagaagcctcaacttatttaaaagaatactttaaacatgccacgggggattatttcgaatgtacagaagaagaaggtaataaagcctttttacatcgttttgccgccgcgggtgccgcggtgcgttatcatgccgttcatattaacgatgtggaagatgtgctacctttggatattgcattacgtcgtaatgatcgagattggtttgaaaaactgcctcctgaaatagaaaaccaattgctctataaattgtactgtggtcactttatgtgtcacgttatgcatcaagattatattattaaaaaaggtgttgacgctaaggcgcttaaagctcagatgttagccttactagacaaacgtggtgcggaatatccagcagagcataatgtaggacatctctattatgcaaaaccgcaattaaaagcgttttataaacataacgatccgacaaatagcatgaacccaggcattggtaaaacctccaaattaaaatattggggagaagagtgtggttgcgggcataatcatcatcaagctgaagttaatcatgtagaaaacaaagaataa

SEQ ID NO: 314642 - DNA, 285 bp, Proteus mirabilis
ttgtcagcggataaaacgtccgctatcgctgacagtacagatacagtaacgatcactcttaattacaccaagggcagctctccagtcgaaggagctaccgttaattggtctacaacaggtggtaaattaagcgttacttcatctaagacgggcaaagctggtggtgcgacagtgaaattaacttctgattcacagggtgaatttattgtcacagccactgttgatggtgttgcacaaaatactgatgcaattacattcacagaaaaaacttctccagacgagtaa

SEQ ID NO: 314643 - DNA, 630 bp, Proteus mirabilis
  misc_feature (8)..(17): n is a, c, g, or t
atgttggnnnnnnnnnngccaaaagagctaagaaaagaacctgattatgcagatgtaaaagtcgataagtggcaaatatcagtgactaccaatccaggaaaaaaagacctaccaaagcagaagatcaaagtggaaatagccaacattcctgcatacaccaacacccttcgaacgcttgttaaaaactatgagcagcttcctagtggctattctgacctgattattagagtggaagagctcacggaggtcatggctgataaattggtttcattcccagcaacaacctcacgtattcggtatagagatatgtgggatttggtgtggttgcaccagaaaggggttaaaccagacgctgaactggtaatgaaaaaggttgccgattataagctcaatgagcattttgaggaatggttgcaagcaagaattgagtctttgcctgcattggttgcgagtgaaaagtttaagggagagatgaagcgattcttacctgtgtctgtcgtagatagaactctccttcacccagattttcttgaatttttacaaattactcttcatgaactgctagtcactatccaaacagatatttatggaagtaaagatccgaagccagtaaaaaaatttgaaatgtag

SEQ ID NO: 314644 - DNA, 3978 bp, Proteus mirabilis
ttggttcgtacttggtttaatagctatcaaaattcaaaaggaaatattaattttgaaggattaggcggaggcaacggaatcttctctcgcgttgaaacaggtgatattaaatttaccggaggtggcttagaaaacgtcttaatacgcgaaggtaaatcaggcgatatctttatgtatggagcaggagccaataataggcttacacgtatcagccgaaatactgatacctataaagaaacaagtggcaatatctatttttcgggggggggaggttataatcatatctattccaatatagcacaaggcaatatcacattttatggagctggggcttacaatgagatcattcgtacaactcaagttcatcctcataatgatttattagttgaatatacgaaagctgaaaatatttttctaacaagtgcttatatgttaaatctagacttagataaaagtattaattttctaacaagtgataataagcaaaatttcgaatccggtaaacctgttgaagtaaaagcgattaaatcattgcgagaaccaaatacttatttgtttaaaacaccgggcccaggggataccaatttattcatatcagactatggtcgtcgagattatacctttaataaagtcaaaatttacaatgatcctgaaacgggaaaacttcaatacgattccgaactttggcgtataacgcctgatagtggggacattaggaacatacgttttgataaaaaaaattttgaggatacctataatcttagtgtggtcaataattgttggaatacattagaaaaacaagaaattatcgaatcaccacgtttcacaaaaataaatgctgatagccactatcaattatctaatttaaaagtatttcaacacattaatacagaacaaatccaaagaaagtctctagaaacaatcaagttgggcgtagcacaagaactttttaaagacgataattctgctgaatgctctggtgatatcaatttcacaggtggtggcatagcaaatgtaataaaacataactctaattatggtaataccaactttactggtggaggcgcagccaacatcattgtaaaaaaaggtcaaagaggagacctaacatttgatggaggaggattagcaaatgtcttactacatcaaagtaaagaaggaagaatgaacattaatgctactggtgccacgaatgtattaatccgaattggtgacggtgaatataaagcacatcttacggcattagggaatgtttctattcacaaaggacaaggtgatagtcatatcacaatgttaggaggattaaatacccatacccagattgatagtcatcagcgtgataaggctttatggcgagcattaggcggacttaatgtcatgacacaagtcggtgctggtactattacatctttactcggcggcggtggaaatgtcctgactaaaatgggtgaaggcgacctaagtagcatcatgttaggtggtgctaatatcattacacatatcagcaataacaaaataaaatcaaacacttacaccatcaccctaggtggattaaatattttaacaaaaaaaggtcaaggtgatattttagccataatggggggaggtggcaatgtcctaacacatatcggaaacggtaacatacatggcgttatgcttggaggtgccaatatcttaactaaagtaggtaatggtgatctttcaggcattatgctaggtattggtaatgtactaacacatgttggcgatgggcaaaccctaggtataatgggcgctgtggggaatattttcactaaagtcggtaatggaaccagtatgggtgccatgctcggtggtggcaatatattcacccatataggtaatggtgaagcttgggcactaatgggaggtttaggcaacgtctataccaaaataggcaatgggaatactttggcactaatgatcgccaaagggaatgtgttcactcatgtgggtgatggaatgtcggttgctctaatgttagcgataggcaatatagccacaaaagtgggcgatggcatgacattagctgcaatgattggcagtgctaatatttttactcacattgggcatgaagaaacctttgctgcaatggtgggtaaaggtaatgtccttaccaaagttggcaatggattaacgttgggattaatgctaggtgtggctaatatttatacccatgtcggtgatggcattggtattgggctgttttctggtaaagcaaatatcatgaccaaagtgggtaatggaaccacattatcagcgatgtttggcaaagccaatattatgacccatatcggtgatgggataactggcatacttgcattaggccaagccaatatcataacaaaagtgggtgatggcattgcgggaatcattgctggtgcgaaaggaaatatcgttactcatgtaggtgatggaataaccgctgcgatcctcggcggaaaagcgaatattttaacaaaagtgggtgatgggctcaccgtaggtctgctgatttcaaaggtgggaaatattatgacccatattggtaatagcaccacgattggttttgccaaaggcaacgccaatatcatcacaaaagtaggctatggtttaggcattaatgcggcatggggtaaagctaatattttcactcatatcggcgatggtgaacgatataacttcgccaaaggaaatgccaacatcattaccaaagtaggtaatggacaagaaacctctgttgttaaaggtaatatcaatattattacacacgtaggtagtggaaataattatactggtgcatggggcaatgggaatgttgtaacacaaattggtgatggtcgtcaggtcgccttagcaaaaggtcatgcaaatattgtcactatgctcggaaaaggtgacaactatggcatagtttggggtaaagccaatatttcgacaaaagtaggtaatggcacgcaagtcaccatagcaaaaggccaagcaaatattacaacaaccgtaggtgatggcctaggtgttaccgttacatacggcaacgcaaatatcaatactaaagtggggaatggtgtatctgtaaacgttgcttgggggaaatataacgtaagtaccaaagtgggtgacggcttaaatgtttcggtcatgaaaggtaccgctaatgcaaatatccatgttggtaacggtttaggtattaacgcctcttacgcaaaaaacaatgtcatcgttaaaattggcaatggtgatatctacagcttatcggttgcttctagtaatactcaaagtaataaactcgctactttcttcggcaatataaaacagagtgtacttggtgtggtcgggagtcaggctattaactatttagtacaaggtgatgatgtaaccacttccggctcccgcaaaggcaaaggcgctattcatttaattgaaaaatcttcaatcgacggtttcaaaatgaacaaaatcgacgaagtgaagagtaacattgatataaatttaaaaggtcatatcacagaggtagaaacccctagtttaagtgatgttaatacagatgaatccaacttaaccaataacagtccgaatttgatcataaatggtgactttaaacatggatttaaatctgtaacagaaggttggaatattgcatatactcaggataaaattacagcaattagccaatatggacatagagcctctattgatacaccaactaatactaataataaagattattgggatggtggacttatagcagaatacaaggaagaatatgaaccaaatatcgctatatatcaagatattagtggtttaatgcaaaatgaggtgattgaattaagttttgagtatgaacgacaagataatacgccaacagagaataaattaagtgttatctggaatggtgaggttgtcttcacttcatcaagtgatgataagtcaatagcatggcaacaacaacaaattaaattaaccgcaaatgcagaataa

SEQ ID NO: 314645 - DNA, 1092 bp, Proteus mirabilis
atgagtttattattactaaaaagtcgccctttagtcgttattcctgaattagcggtacgccttggtttaaatgaggcgatgctgttacagcaaattcaatattggctaactgaaaccacttcaggtgttgaatatgacggctcacgctggatttataacacagttgaggagtggaagaatcaatttccttttttctctgaatcaacgattaaacgtgcttttactaatttgaaaaagcagggtgttttacgcatcgagcaaatcaataaatcgaaccatgaccgcactaattattatgcgattaactacgatcaccacttgctgaccgatgaggtcaatatgacccaatcgaatggtgataattcatctgatcgaacagttcaaaatgaccttatcgataagcgcaaattgaaaccatcaaacagtgcaaaatgcgctgttctgaacgggtcaaaatggcctgttcttacagagaatacaacagagattacttcagagagtacaacagaaacagatcattcgtcgcagaattctgacgaatccagcgaccagtcgaaaaatgattttttaactcgttatcctgaagcagtgatttacagcgctaatgggcagaaatggggggatgaagatgatttaaaaacggcgaaatggatgtttggtcgtgttaaaaaactgaatccgtccgcgttagagcctacttggtatgactgggcgaacgatatccgcctgatgcgccaaatcgatgggcgtacccatgagaaaatttgtaccttgttcgattgggctaacaaagattcattctggcacaaaaatattttaagtcctcgaaaattacgtaaacactttgatgaactcactatccgtagccaagagccaaggaatgaaccaaaagttcaagttgacaccattgaacgcgatagtgccttttcccgcttgattggctctcgctctaaacctaaaaaccgcattgaagaaattgcacttgagctagcaggtaaaacaggcattcgtcgtatgagtgagttttcaggtcgccaagcatggaacagcatttggaagcaagcgatagaaatattacaggaggctcagtaa

SEQ ID NO: 314646 - DNA, 816 bp, Proteus mirabilis
atgacccgaattgctcgtttagaaaacgtcaaagcacgtgttgcccctattctttatatggaaggtgcttgtggcgtacgtttaaaagcggatgacagtgttgctgaaatttttaaacatggccgggcctccatttcattaggttatatcggtgttcatgaaacgattaatgccttatttggtacgcaaaaacatgtctttgatgatgaaacattgagagctaaagcaatagcaattattcagcgtttacgtgaagcgacagatcaatggaaagcagaaacaggctatggttttagtctttacagtacacctagtgaaaacttatgtgaccgtttttgccgtttagatgcagcagaattcggtattataccgggggtgactgataaaggttattacaccaacagtttccacttagatgtagagaaaaaagtgaatccatatgataagttggattttgaagccccttacccgccattagccaatggtggtttcatatgctatggcgaatatccaaacttacaacataacctaaaagcattagaagacgtttgggattatagctacacccgtgtcccttactacggcacaaacacccctattgatgaatgttatgactgtggttataccggcgaattttcttgtaccagtaaaggttttacctgccctcgatgcggtaatcacaaccctgcaagagtctcggtgatacgccgtgtatgtggctatttaggcagtcctgattcgcgtccatttaatgccggtaaacaagaagaagttaaacgtcgagttaaacatctggctaatggtcagttaggttaa

SEQ ID NO: 314647 - DNA, 459 bp, Proteus mirabilis
atgtttattggctttgactatggaacatcaaattgttctgtggcaataatgaaagaggggaaaccaacgctattacctttagaaggtgagaatgtttatattccatctactctttgtgcgccaacccgtgaatctgtttccgaacatttatttcgccacttaaatattaaacctaccaactctattggcgaacaactattaagaaaatcaatcgcgtttaatcgtgatgaagatattgaattagtgcctgaggatattgttttcggtcaggcggcattaagtttgtatctaaaagatccccgtgatgtttattacgtcaaatcgcctaaatcttttcttggtgcctcaggcttacatgagatacaaatcagcttttttgaagatttagtgtgcgccatgatggccaatataaaacaacaagcggaaaaagcacacaaacaaccattactgatgccatga

SEQ ID NO: 314648 - DNA, 174 bp, Proteus mirabilis; identical to SEQ ID NO: 298065

SEQ ID NO: 314649 - DNA, 195 bp, Proteus mirabilis; identical to SEQ ID NO: 306079

SEQ ID NO: 314650 - DNA, 456 bp, Proteus mirabilis
atgggagcgcccatttcaggattaatttcacgttcaatttggacagagcaaggctttcatggttttgtcgattgccaacatttaaaacaatatgaatgtagtcgctatcttgttgataaagtcggaaaaatagttgacgccttaatagataacgatattccactcgccacatttaaacatcaaccgtcagacttaaaaaaactgagcgaaaatgtcgttagtttacttgccaacaaatatgacatttcaaatatcaatcgtataaaacccggtattgctgaagcaactcgcgccgttttacgccgtgtacctgagcatattctggtaaaagaaattgcagatcccgatgttgcattactgatttatcttgctaaacaaaaaaatattactgtaaccgaggcaggtaaagcattaggacaatatcgtgccgttactatcattaaaaaggtgcaataa

SEQ ID NO: 314651 - DNA, 1377 bp, Proteus mirabilis
  misc_feature (1346)..(1355): n is a, c, g, or t
atggatggattagtttttacctgtcaatttaaaggaattcctgaagaaaaactgactgagcatttatctgagttatttacactttctttaactgcggtaagttcattaccgtctatctgttttgatgatatgttggggtttgcttgttccttaacggttacgcgcaatggtaaacctattcgtactgtacgtgggctattagctagtgcggagcaacaaaatacagatggtaatcaaacgtggtatcactttattattcgacctgaaatttgggtcatgtctttagggcaaaacagtcgaatttttcgacaaataacggtgcctgacttacttcagcaattattatttgagtctcatattaaagcggattgcaaactctatgctgaggatgcttatcctaagcgtgattatataacacaaaagcgtgaatcagattatcagtttttttgccgtttagctgcagaagagggaataagcttttggtttgaagatgcaggaattgagccacggatgttttacagcgattctcacttaggtatgacggcagatattgacttaatctacaacccacaatatgaaacagatactagagatcatactgcatatcattggcgttatagagagtcactgctttcagataaaattctttacaaagattataattctaaacgtccttcttatccccttgaaagtaaaatagaaggggaaatacataatcagcatccatattatgaaagttatgggcgttttcagacgcaagatgatgcggatcgttataccaaaattcgaatggaagagatacaacaacaccgttgtgtcggcaatgcattaactaattgttttgctttgatgccagggaaaattttttcgttatcttctcacccatgctcaaatatgaatcgccgttggcaagtcattgctattactcatcacggcactcaacccttagctgataatagggaagggcaagggacaacattatcgaataatttaacctttattcctgataatttaaattggcgcccgccttttattcataaaccaacagctgatggcgatgaattagccacagtagttggccccgaaggtgaagaaatctataccaatgaagaaggggctgtacaagtttattttcattgggatcgcatgcgagaaccagaattaggaagctcatgttgggttcgggtagcgcagggatggaatggtaacggttatggctttatggcaatacctaggattggacaagaagtgcttatcagttatctaaatggagatatagatagacctataatttcaggctgtacatataatggacgcaatactccgccactaaacctaccttatgnnnnnnnnnnagatgacgcgtactacgtttaa

SEQ ID NO: 314652 - DNA, 402 bp, Proteus mirabilis
atgatactttcagtatcaatgccactcattttctggacgaaaatgaatgacataaggctccgccctctggctattttcttcggctggacgcctgcgaaaaaaaccattcacccaagcccgtcaaactcactgcgttcgtctgaccacccccttttttcgcccctgtatttggtcgctcaaaaatgtggtggtcagacgcttcgcttgacggggggctttgcccccaaaacgaaacacgttcactggggttcacttgccatcgctggggcgtgtcatttcgtttcggctccccctgtttttccctttcttcgctggacgctcatcaggataaaaacaaaaagcctaccgccctcgttttactcggttggtcaaatcgcttcttgccacaaaacaagtttgtga

SEQ ID NO: 314653 - DNA, 900 bp, Proteus mirabilis
gtgtttgttcttgatagaagagacggtacacctattgttcccgtaacagaaaaacccgttcctaccagtgtcaaatatggtccacaaacacaaggtgagcattactcacccactcagcctttttcagcacttaatttagcacctaaaaataagttgcaaggttcagatatgtggggcggcacaatggcagaccagctgttatgtcgtatcgccttccatcagttaaattatgagggaatttatactccaccatcagaaaacggtacgcttgtttttcctggtaacctcggtatttttgaatggggcggtatttctgttaatcaagatagacaagtcgcggtaatgaactttattaccttgccttttatctcaaaactttatttaaaagatcctcaagatagtcaagcaattgacgcaggccacggagagcaaggtttacaacccatgacgggaacaccttatagtgttgatattcatccattcttatcaccactaggattaccttgtaaacaacccccttggggatttgttgctggtgttgatttaacaaaaaatgagcttgtttggcaacaacgatttggcaccattagggatagtttgcctaatttagtggaattaccaccattaaaaattggtgttcctgggctaggaggcgctatctcaaccgcaggtaatgtgatgtttgttgctgcttctcaggataattatattcgagcatttaatgtgacgaatggcaaaatgttatgggaagcacgattacccgcaggtggacaagcaacgccaatgacctactctattggaggcaagcaatatgtggtcattatggccggcggacatggttcatttggtactaaaatgggcgatagcttagtggcttatgggttacctgataatttatag

SEQ ID NO: 314654 - DNA, 1224 bp, Proteus mirabilis
atgtctttagctattcgatatcttgcgttattgccacttttcgttattactgcttgccaacagcctgtaaattataatccaccagcaactcaagtggctcaagttcagcctgctattgtcaataattcatggattgaaatttcacgaagtgcactcgactttaatgtaaaaaaagtccaatcattattaggtaagcaatcctctctttgtgcagtgttaaaaggagatgcttatgggcatgatttatcgttagttgccccaattatgatagaaaataatgtgcaatgtattggtgtaacaaataaccaagaattaaaagaagtacgtgatttaggatttaaaggccgtttaatgcgagtgcgtaatgcgacagaacaagaaatggcacaggcaaccaactataacgtagaagagttaattggtgatcttgatatggcaaaaagattagatgctattgccaagcaacaaaataaagtcattcctattcatttagcattaaattcaggtggcatgtctcgtaatggtttagaggtcgataataaatctgggcttgaaaaagcaaaacaaatttctcaattagctaacctaaaagtggttggtattatgtctcattatcccgaagaagatgctaataaagtaagggaagatctggctcgttttaagcaacaatctcagcaagtgttagaggtgatgggattagagcgtaacaatgtcacattacatatggcaaatacctttgcgacaattaccgtgcctgagtcatggctggatatggtacgtgtgggaggtattttttatggtgataccattgcgagtacagactataaacgtgtgatgacctttaaatctaacattgcttcaattaattattatcctaaaggtaatacggttggttatgatcgtacttacacattaaaacgtgactcagtactagccaatattcctgtaggttatgcagatggttatcgtcgcgtttttagtaatgcggggcatgcattaattgctgggcaacgcgtacctgttttaggaaaaacatcaatgaataccgttatggttgatattaccagtcttaacaatatcaaaccaggtgatgaagttgtattttttggcaaacaaggtaatagcgaaattaccgcagaagaaattgaagatatcagtggtgcattgtttaccgaaatgtcaattttatggggagcaaccaatcaacgggtattagttgattaa

SEQ ID NO: 314655 - DNA, 720 bp, Proteus mirabilis
  misc_feature (696)..(705): n is a, c, g, or t
atgaataaaactattagtgaacatgtagatgtcgcgctcattggtgctggcattatgagtgcaacacttggcacacttcttaaagaactagagcctaatttaaaagtcgcgatgtttgaaagacttaatgattgtggtcaagagagctctaactcatggaataacgcgggaacaggacatgctgctaactgtgagctaaattatacgccaccaaatcctgacggcaccgttaatatcagtaaagcgttagaagtgaacaccgagttcgatttatcgcgccaattatggtcttatttagtaacaaaaggaaaaattgccgatccgcgtgattttattcatgcttgccctcatatgagttttgtttggggtgcagataacgttaaattccttcatcaacgctatcgccaaatgtctgccaatcactgttatgaaaatatgcaatacagtgaagacaaacagcaaattgaagattgggcgccattaattatggaagggcgtgatccgaatcaacagcttgctgtcacccgagtagctactggtactgatgtcgattatggcgcattaacacatctattagttaagcaactttctcaacaagataattttgagttgcactataaacatgatgttattgatatcaaaagaaatgagactggtggttggaatatcgaagttaaagatctcaccacccatgannnnnnnnnncctcattacagctaa

SEQ ID NO: 314656 - DNA, 612 bp, Proteus mirabilis
  misc_feature (542)..(551): n is a, c, g, or t
atggatttcagaaatgtactgcgaaaaaatgccattcgcactcggtttgtgatagtcacctatttactattaatgctaatgatcggcttattagttgatagcgcgataggtgccaatcctcatttaagtttaattgataatatgctggcatttctgacattccaatcactgcctattgcttcattgattattgttgccatttcaattgtgttgctgattattgttcactttaaagggcataaaatcatgttgacgggcatgaaagcgcgactaattaatcctgaagagccattaaatgcccaagagcgacaattattaaatattgtggaagagcttagtttaagtgcgactttgggctatatccctaagctttatattttagatacaccagaagccaatgcctttgctgccggctggtctgaaaaaaatgcctttattggtgtcactcgtgggttgttaaatcaacttaatcgccaagaaatacaagccgtattagcccatgaaacaggtcatattattcatggtgatacccgtttaacgcnnnnnnnnnntaacgctgtatgtgggtattttagcaaatgttattttaacggtaacaaatatctttggtag

SEQ ID NO: 314657 - DNA, 669 bp, Proteus mirabilis
atgaataatgaagaaaaaaatcgtcgtcctataaaagcaagacaaaccaactgggcaactcgctgtagtcgctggctgcaaagcaaaggcgctacccccaatgggatctctttatttagtatcctattcgctgctatctccggtttgtttctctactttgctctcgctcactcccaaggcctacttcaatcaatccttcttattttaggtgcattagctatccagggtagacttatctgtaacctactcgatggtatggtcgcagttgaaggtggattaaaaagtcctgctggtgccgtttataacgaactaccagaccgaatagctgatacattgattattattggtgtaggttatggtttatccatcacttttcctatcgctattaccttaggctgggtagctgctttctttgcggtaatgacagcttatatccgtgtattaggtggtagttgtgggttagaacagcgttttacggggccaatggccaagcaacatagaatggcattattaaccggtattgccattatctctgcatttattcccgctgaatggggagcatggctctgtttagtctccctgtggatcattatcttcggctctgtacttactaccattttgagaactcgccaaattttacgcgatttaacacaaggagttgatgaatga

SEQ ID NO: 314658 - DNA, 960 bp, Proteus mirabilis
  misc_feature (947)..(956): n is a, c, g, or t
atgcttgatagtgaaagttggcatgatattttaatcaatactggttttgaaactattggtcaatggccccaaacagattcctcatctttgcgacaaacactctttttagcctctcccactcgtggaggaaaaccttatttaggtaaattacgtgattatttatctcattctcttgatcagaatatcgactcttttgagttgttccaatgtgaaaatattgaagcaacccttaatggcatagcaacatcatccgctcaagagctaaatgaacagatacaacctgttgcaatacctgatgtaccaaccaatatgattaatgaaatcattgcattatggtctgagttattaggtcgtgaggtcaatagtacaaatgatttcttccgttctggaggagatagtttgattgcaaccaaaatgatcagccaattacatcaacggggatatccagcaacattacaacagatttttacctatccatgcttagccgatttttgtgctcatttagagcaggaaaagcaatctcaacgagagtactcctctttgatacctctaagcgctgtatctgctccaaaaccttaccactactttatggtacatgcttctgatggtgatcccggtgtttacctacctcttgctgagtcgttaaataatacagtgtggggattaacagttacagatgcttcaaaactaactgatttggatacattgttatcattacatttatctagcataaaaacagcacaacagactggcccttatattcttattggttggtcatatggtgcttttattgccagttaccttgcagaacaactctcgcaacaaaatcactccgtattattagtattaatagatcccgtctatcgacatgattttattaaattttgtcatgatgactcagatagttcatcagatgaaaataagcagcttgcatgcactaaaagacnnnnnnnnnnatga

SEQ ID NO: 314659 - DNA, 273 bp, Proteus mirabilis
atgtttaatggatcggtttttactggtgaagaaaaacttacccctgatatgtggtgtgaagtcgaacttaagaaattatctgcaaacggcgataacaccttaatatcgggacttagattaaacggaaataatgatgggaaaatggtggtctctgataaatatcaaaataacagtgagcaaatctattttggtagtcccagtcgaaaaagtgaatttgatgctttagaagcaaaaaaccaatttaatatacagggtctcccccaatggcaatag

SEQ ID NO: 314660 - DNA, 279 bp, Proteus mirabilis
  misc_feature (265)..(274): n is a, c, g, or t
atgaaaagccctaaaattgatcgattaaatgtgttagatacggcgctttctttgctggaaaaagaagggattgaaggcttaacaatgcgaaaactggcagatgcattacatataaaagccgcctctctctactggcattttgataataaacaaacgcttattgagggaatggcagatcgtatagtcagtgaagtcgctgttgattttcactatagccaagattggaaagcggatctaaaacgtctagcaacagagctaagagaannnnnnnnnngctag

SEQ ID NO: 314661 - DNA, 615 bp, Proteus mirabilis
atgaacgggataattagctatgaagtagaggtaaaagatagtgatttacgtttggctcaatggagtacaaatcctaaaggaattttaattttacccaacaacaaagatgtttataccactatcgttgatgaccataaaacgaagatctctttaactggcaatcgtagtggagtggcttcattacagttgattctaagagatgaagataatgaagataatgcctattatgccccgccgttgcaaattcgagtgacacccgcgatccctaataccgattgctcagcggctaattgtgagaggtttgatgatttactgacaatcaactctgaatctatgcaatggccgagcaaatgggaagaggtatctaaaagctttgtggtacaccttcaaaatcaagaaggtgaagatatgcaaaacaaggaggtcacattagtttacgataaagacaacagcacactacttactcagcctgaaatttataattccgaaggtgagttaagcaatatttcaaaaaccaataaatatggtattgcaaactttaaagttagatttaaaggtacgagccaaagcagattgctgttttttatgctgaatcagaaaacagtgaagatatag

SEQ ID NO: 314662 - DNA, 258 bp, Proteus mirabilis; identical to SEQ ID NO: 295502

SEQ ID NO: 314663 - DNA, 375 bp, Proteus mirabilis
ttggtactggagaaaaatcatattgatagtcgtaattcaggtgattttgatgtgataagagcgtcatggataggcgattacaatgaaccctccacatttttatctttattaggctctaagcatgctggaaacatcccaaaatatcagagccagcaatatgatgagattttagtccaagccaatatgacgacagatgaagaggaaagaaatcgtctctataatcgtgcagaacaggttattgcggaagaggcgcctattgcccctatctatcagtatactaatgggcgtctaattaaaccttggctaaaaggttatcccattgagaatcctgaagatgtcgcttatagccatatgctgtatgttataaagcattaa

SEQ ID NO: 314664 - DNA, 249 bp, Proteus mirabilis
ttggatgaagcgcaaaatgtcaccattaatcaaatgaaattatttttaacgcgaatgggagaaaatgtgacagtgattgttaacggtgatattactcaatgcgatttacctgccaatgtaaattcaggattagcagatgcactaagtcgttttcaagctaatgagcgtgttggtgtcattaaatttaatgaagaagattgtgtgcgttctagtctatgtcagcatgtattagcagcatatagtgattaa

SEQ ID NO: 314665 - DNA, 339 bp, Proteus mirabilis
atggcgagagagaaacgtgatcaacgaacactctctcctcgcaatgaagttcaacgccaatatatgaacgctattaaacatcaaaatttggtttttgcaacaggggaagcggggtgtggtaaaacgtttttaagtgcagcaatggctgctgatgcccttattaataaagagatagagcgaattattgttactcggcctgtattacaagctgatgaagatttaggttttcttcctggcgatatagcagaaaaattcgcgccttattttcgtcctgtctatgatgtattagttaaacgtttaggcgcctcttttttacaatgcatttgtcatattggatga

SEQ ID NO: 314666 - DNA, 264 bp, Proteus mirabilis
  misc_feature (189)..(198): n is a, c, g, or t
atgcaacaagcttcattaagagcttggaataccacccataatattgtgacagaatcatggagtcctttagcacaaggtggtgaaggcgtgtttgatcaaccaattattcagaaactggcagaaaaataccaaaaaacaccggcacaaattgtgttacgttggcatttagatagtggcttggttgttatnnnnnnnnnnttattcctaaatcagttaccccttctcgtattgaagaaaacttccatatctttgatttcaaattag

SEQ ID NO: 314667 - DNA, 279 bp, Proteus mirabilis
atggagctattacgcaaaaaatttacttttacatactccgctttcattactatctatccagaacccatcgaagaaagcgggctagaacgatttagtttaattaatacaaaaaaatactgtccagaacatgtatggaaacatattctcaaatccgctatttataccaatgaagaattggatgactattttgggtcgcaggaattacccccactggagcggatgtgtacagatatggatttatataacgagtttaaaggcacggtttatttgatgaagtga

SEQ ID NO: 314668 - DNA, 213 bp, Proteus mirabilis
atgatcaaagatgcgaaaattcccgatgagcaaattgtttgcaatgtcggtgttggtaatgcaaaagatgaaattttagagtatgcacgtcaaatcgatgcagatttaattgctattgcttcacatcgtcctaatgtttcttcctacttattaggctcaacagcatcatctattgttcgccatgcaaaaatgtcggtattggtgatccgttag

SEQ ID NO: 314669 - DNA, 1125 bp, Proteus mirabilis; identical to SEQ ID NO: 311101

SEQ ID NO: 314670 - DNA, 363 bp, Proteus mirabilis; identical to SEQ ID NO: 295451

SEQ ID NO: 314671 - DNA, 150 bp, Proteus mirabilis
atgagcaaagaagatcgtaagacaaatgtccctgactttctttccgaattggacgctggcgtttttgaaaataaagtctctgctgttttaaatgatgtggctttaggcgttttaaataatggtggaaaagcaaagtcactattgaattag

SEQ ID NO: 314672 - DNA, 813 bp, Proteus mirabilis
atgattgtttcgaacaatggttacgctagtagagtacctcagcagtacaatcttacaaaagaagagttccacaaaaaatactatggtggagcagaatacatttctaacaaggtgttttatataaattccgatagaaataattttaaatatataattgctggcgatagttttgggttgcagtatgccaaatcatttgatgaacacaaagttgaagctgcagctctttttgatcatggatgtcttatatttccaaaatactccagatatctaaacaacaaagaagatatatcatgctccaatgagtatgataaattaaagatacttatggatagagtgccatcggcacctcttattttcgctagttcttgggatacctataacggcatccttattgaaaaaggtgaaattacacctgtagaaaaaaataaggacaattattactccattgtgttaaatgaaattttgtcagttatcaaagctggtggtaatcaacgcatgtactacataataggaagaccacaacgagcaaaagtagatggattcagttgtctagcaggtgagagtctacttggatacaaattaatatctaactgtgaagaaactcaagaaaagcaaaacatccaaataaatcaatttttaaaagaaaaactagcaccttatgaaaatgttagatttatagatccaaacaatgctctttgtgatggaaataagtgcaaagtaatctataaaagagaaccgatttatacagatggctctcacctgtcaatttatggtgctgaattagtaaccgagtatataattaaaaatttttaa

SEQ ID NO: 314673 - DNA, 1419 bp, Proteus mirabilis
atgagtaaaataaaaacccgttttgcaccaagtcctacaggctatctacatgttggtggtgctcgtactgcactgtattcctggttatttagccgtcacaacaagggtgagtttgtacttcgtattgaagacaccgatttagaacgttctactcaacctgccattgatgcaattatggacggtatgaattggttaaatctaaactgggatgaaggtccttactatcaaaccaaacgctttgatcgttataatcaagttatcgatcaaatgttagcagctggtactgcttatcgttgttattgttctaaagaacgtttagagaaactacgtgaagatcaaatggcgaaaggtgagaaacctcgctacgatggttgttgccgtcacggtgatcacaaccataccccagatgaaccccatgtagttcgttttttaaatcctcaagaaggatctgtgatttttgatgacaaaattcgtggcccgattgagtttagtaaccaagagcttgatgacttaattatccgccgtactgatggttcgcctacctataacttctgtgtggtgattgatgactgggatatggaaattacacacgttattcgtggtgaagatcatatcaacaatacccctcgtcagatcaatatattaaaagcacttggtgctccagtacctgaatatgcacacgtatccatgatcttaggtgatgatggtaaaaaattatctaaacgctataacgcagtgagtgtaatgcaatatcgtgatgacggttatttaccagaagcgttattaaattacttagtacgtttaggttggtctcatggcgaccaagagatctttagcatcgatgaaatgattaaagatttcactttagaagctattagtaaatcagcaagtgcgtttaatactgacaaattactttggttaaaccatcactatattaataccttacctgctgaacaagtagccgtacacctagattggcatatcaaacaacaaaatattgatactagtaatggcccatcactggttgaattgattaaattactcggcgagcgttgcaaaacattaaaagagatggcggaaagttgtcactacttttatgttgactttgatagtttcgaagaaaccgcggcgaaaaaacacttacgtcctgtcgctcgtcaaccattagaagtagttcgtgataaattatcagcaattactgattggacagcggaaaatgtacataaagcaatccaagaaaccgctgaagaattagaagttggtatgggtaaagtcggtatgcctctacgtgttgctgtcacaggtgcgggtcaatctcctgcactagatgttactgttcatgctattggtaaagctcgtagcatcgctcgtattaataaagcattagattttattactgacagagaaaatcaagcttaa

SEQ ID NO: 314674 - DNA, 285 bp, Proteus mirabilis; identical to SEQ ID NO: 312102

SEQ ID NO: 314675 - DNA, 171 bp, Proteus mirabilis; identical to SEQ ID NO: 300428

SEQ ID NO: 314676 - DNA, 429 bp, Proteus mirabilis
atggctttggtatcaatcagtgaagcggcaaggctgacaggaaaagcaagaagcacactacacaagtacataaaacaaggaaaactgtctacgactacagctcaaaacacaggaaataaaagcattgaaacatctgagttaattagagtatttggtaaaataagcaatttctcaactacggaaagtgacagtgtcatacctgtatcaaaactacagcaagaaacacccagcactacacaatcactacagattaaacttcaacttcttgaacaagaaaatgcacacttaaaagctgaaaaagagttactttcaaaaaatttagatgatatacgtcaggctatgttattaatcgaatccaagctgccaacctctcccgagcccgttacaccagtaccaacaagaaaatcatggcaattctggaaaaaatag

SEQ ID NO: 314677 - DNA, 129 bp, Proteus mirabilis
atgggacttaaacctggtccgaaacccatcgcaaaatcgacgggaaaaccagatcaacgtagacgtgacaataaagatactccggggaatactcctgagttaaaaccgagcaaatccacaggtaagtga

SEQ ID NO: 314678 - DNA, 225 bp, Proteus mirabilis
atgttagctattcgtttatctgatgacattgaaacacgtctggagtcactcgcaaaacagacaggaagaaccaaaacattctatgcgagagaagctatcctcactcatttggaagatttggaagattactacctgtccgctgaaaccgttgcaaaaattcgtcgcggtgaagaacaagttcattccactgaagatgtgaggaaagcgcttggtctggacgattaa

SEQ ID NO: 314679 - DNA, 267 bp, Proteus mirabilis
ttggtctggacgattaattattctgaacgagcgttaaaatatctacgaaaaatggataaacagaatgcccgtcgtattgtcgatttcatggatttacgcattgcagctttagatgacccccgacagtcaggcaaaccactcaaaggtgagctgggtgagttttggcgttatagggttggtgactatcggatactgtgcgaaataagggataatgaacttattattcttgctgcaacgataggacatcgcagggaagtttatgactaa

SEQ ID NO: 314680 - DNA, 405 bp, Proteus mirabilis
atgactaatctatacctgaaagtttactcaaatgaacatgaagaaatgttaatagatggaactgagaaatacactatatgtgccaatattgatgatattctagatgatataaaaaaaataatcagcaaaaaaaaagttattatacatagcgatgaaaatgatgacgaaccagatgagtttacttgtatttcagacgaagaaatacctgatgtattagaccttatttataaaaaatcaactagcttaattaaagaatcagcaaaaaaaatagactctatagataaaaatgaaggatatgagttactttacaaaatgaagaatcttaatgatgctttatttttaataaaaacaaaaaatgataaattattattgaataaacgcgcaatcttacaaattgggggctaa

SEQ ID NO: 314681 - DNA, 522 bp, Proteus mirabilis
atgtgcgataataaaaacaaagggaaatcaggtgaaatggtattgcttaacataatatcttccgcatgtcatgttactgacaaattggaaataactcgcccttccaagaccaactcagctgaccttggtctagatatgagcttatcaggacctaaaaaagaaattgaaaaattcataaatcatgcaattccagaacgaactcaaccaaaacatatagaaaatattgatgaaaataaaatagtaaaggcaagaatagactctaaaaattttgaaaatagaattacaaaagttgaaatgaaaaaatttgtaagtgaaacagcaatacattcagatagtacttaccatttattaatgggaggtaggggactaacaaaaggagcacaagaagtaatcaataatgccgctccattattagaaaaacaaggaattgaagttatacatataactcatgaaggaatagatagacttagtgataactaccctccagtgagaccagaaaagaaacaaaaaaaaatcaagtaa

SEQ ID NO: 314682 - DNA, 1746 bp, Proteus mirabilis
atgaaaagtagatctctagatttattacgacaaactaacaataaagtcgatttagctaaattattaggtgtgagtcctgtttttctaactaacacgttatatagaataaaagttgagactttatataatcaaataaaaataccaaaaaaaacaggtggaataagatatatatactctccagatagcaggttaaaagaaattcaaagaaatctttctaatttattattaaattgtcttgatgaaattagagctgaaaataaaacaaaagctataatatcccatggatttgaaagagagaaaaatataataacaaatgccaagaaacacataaataaaaatattgttttaaatttggacttggaaagtttttttgattcatttaattttggtcgagtcagaggtttttttattaagaataagtattttttacttaatgatgaagttgccactgttattgcacaaatatcatgtttaaatattcagataggcgaacgaaaaataagtatccttcctcaaggaagcccttgctctcctgttataacaaatttaatctcatcatcaatggatataaaattaaatagcttggcaaaaagaaatagatgtacttatacaagatatgctgatgatataacgatatcaacaaacctaatgagttttggaaagcaaatagttaaagatgtagatgaaaacaataatgtttcactaggtaataagctaatttcttatatagagaaatcagggtttgttattaatgataaaaaaaccaggattcaatataaaaattcaaggcaggatgttactgggcttttagttaataaaaaaataaatcccagcagaaaatacagtgatatattacggtcaatgtgtaattcattatttaatagtggtgagtttgaacttattgataaagaaaagaaaaaaagaaaagggacgattaatgagctggaggggaaattaagttttgtagatcaaatagatagattcaataataaagatatattgagcaaaggaggagtacttcttaaaaacagaagagagaatctgtactctaaatttatttactttaagaagttcatttttaacgatgaagtgactgtgattacagaagggcatacagatcatatttatatccgttcagcagccatatcaaggaaggataaatttaatgatttaattaaagaagataataaaaaaataaaattaaattttagttttctgaaaataaataataaaatagagtatttgcttgatgtcagagagggaacgtcaagtataaaaaaattcatagaaagattccctgaaaattattctaaatataatataggaaaaccaaaaaaaccagttattatcatacttgataatgattcaggatcatcagggtcaggcggtatttttcaattgctaataagtgataaattcaaaaatattacaaatgataaagatgaaataagaaatgttgaatttattcatgtttttggtaatttatatatcatatttacaccattaaaagatggtaaagatacttcgatggaggatttgttttcagacgagattttaaataaaaaaatgaatgaaaagaaatttaatagaacaaataaaaaatgtaaaaatgatgaatttggtaaggattactttgctaggttcgtaattaaaccaaatgttaaaacaatagatttttccaagtttgatactatttttaatagaattaagttagttatttctgattatgaaaaaaaagaaatttaa

SEQ ID NO: 314683 - DNA, 237 bp, Proteus mirabilis
atgaaagcatttacaactgacgaaaccattgttatttcagcaaaatattgtgaccgttgtaatcttttcgctgaaaaaatgtcccctgaatttcatgaatttctgtctattgaccagaaggtcggttttggctctatcttcggtgacggaaaccgtttgaagctggatttatgtcagcactgtgtgaaggcactgttgaattcatggttatctgtcagtgagcctgattcattttga

SEQ ID NO: 314684 - DNA, 156 bp, Proteus mirabilis
atgattaaaagcacaaatatcatgataataaatggtcaccctgcatctgttgtttatggatcagaaataagtgcaaaagaaggcgcaatttccttagctgaatttattgagacttgtactgaagaggagatcgcaccttttaaaagtagaagataa

SEQ ID NO: 314685 - DNA, 1824 bp, Proteus mirabilis
atgagtaatatttttcaatcacgaaaagagttaaagataggtaaaatcattgaagtatcgggcaataatttacgcatagagattgatgatagcgttaatgaactcattcgcgcggttgacggacaagtttatcctataggacaaatgggcagtatcattaaagtacattttggtagaaagctactatttgcttttgttcgctctcttaaaatgagatctgagttgattactgaagatagcaaccaacgccttaacgcagctgatgatgctcgtatcttagaagcagacctctttggtcagggtgtttggtctaacaaaaattctcgacttgaattttctcgtggcgttgaaacttaccccttaccattacaaaacgcctatatttgcctaaatgatgaattagaggccgtttataaagctgcagaatcaaatgctcaagatgaagccattacccccatgattccaattggaaattatatcggtggaaataatgcggtatgcagagcaaatattgataaactttttggacatcactttgcgattttaggatctacaggttcagggaaatcaggaacagtggcatcaattttacactcagttctagatcatcgacctggagacaccatattaaagccaagaattgtcatgattgatccccatggtgaatatgctaatgcctttggtgatagggctaaagtattccgtgcgtataatgacgcatcagtagtagaagatgaggcagaactattgaagttgccttattggcttatgtctagtgatgagttgagatcgttaatcatcggcaaaacagaatatgaagccacctctcaaaataatattgtttatgaagcaattacctattctagattgctagaggcgggctacgtgcaagatgtaggtcctgaaccaaacggcggatttgaagctgaatatgctgatggcgtaaatgaagatcaggttttgaattttgatagagacaagcccgttccgttcaaattggaacagtttgttaaacacatagataaggtacaaggacgcaaagatgggaaacaggataaattagctgcatcaacaggtcgcgataaaatagatagcatacttaaaaaactcaaagtccttcgctcaaatccccaacttagctttttgttagaagaatatagtgaagctaattctcccaaactacaggatatactggctcaatttgtcggtgaagcaaatggaaaagatattcgtatcatagatatatcaggtctaccaaatgaagtggctggaccattaaccgccttaatatcccgccttctttttcaatacaaactctggcaaacaagagatgaaagagaaaaagatcctgtattatttatctgtgaagaagcgcaccgctacgtaccaaaccatggcgaagcacaatacaaagaggctcaagatgctattcgacgcattgcaaaagaaggtcgaaaatatggattaggactgggacttatttcacaaagaccatctgatgttgaaagtactgttctctcccagtgtaactcttggatagtacttagattgtcaaattctagtgatcaagagcatgtctctagattcttgcctgatagtttgagtggcttaactaaaatgttatcagctcttacaagacgagaggctatttttgttggagaagcagctgcacttccaagtaggatcagagttcgagaattatcagctgataaattgcccaattctaacgatattaaattcgcaagtgggtggtcgcatgacgcgactcaacaagctgatttgatggaagttgtaaatcgctggtgtggaacttcgagtgactaa

SEQ ID NO: 314686 - DNA, 1191 bp, Proteus mirabilis
atggaagaatttgatagtagtttagaaaacataaagcagcttttaagttctcaaagtagacaaaactggctttttggtgcggggataagtttcaattcaaaaatacctttaatgtatccattaaccaatcgagttgaactacttattgcagaaaattctgaggataaagaaaaagaaattttggctgctttaaaagcagacttatctgatgactgccatgttgaacactacttgagtcatttgggagatcttttagctattgctgaacgttcgaagaatcagtctgcatatattggtgctaatagctatactggagaagaactaaggcaactgtatctagaaatcataaaagctattggtggaattgtcagatacggatatgttgcggctaatccccctcatgagatagaggaggaaattggcagcgcagaaaaacctatagttgaaatacagcctcattatgaatttataagagcattattaattagcaaatcaaatctagaacagcgctcaaaaactacattttttaccactaattacgatactttgcttgaggatgccttagctctacacaagaaaatagtatgtgatggcttttcaggtggagcagtaggtttttggaatgctgaaaatgaattctcaaatacggtcatagactcaaatacataccatctatataaattacatggttcgatagattggcacagagatgataagttaggtttggtacgtgcaagatatggaactaaatacttatcaaatcctgcaaatataatgatttatcctcaagcaacaaaatatgttgaaacgcagaaagacccattcgctaacttattcctaggtttaagaaaaaccttaatgtgtggacagcaaaatacattaatcacatgtggttatagttttggagatgaccatattaattctgaaatagaaagcgcattgcgaagtgagtccaaccaaacgacagttattgcatttgttcaagaatcgccaaaagatggaattgttattaataaaactctagacgcttggctgaaatgcccgaaaattaattccagagtgtatgttgccggcgaactaggtatttaccatacatcaataactcctttagctgaatctgatactagcaagtatatctggtggcgttttgatggcttaacgaagttcatcagcacaggagatattccatga

SEQ ID NO: 314687 - DNA, 444 bp, Proteus mirabilis
  misc_feature (402)..(411): n is a, c, g, or t
atggtcatacgtcctaatcaacactggttttttcggttatttgattggcacggttcagtgctatcaaaaataatctttcgcttatgtcttaatattgcaatgtctattatcgctattttggtttatcaatggtatgaattattaggtattcatttaactgttgccccatttagtttattaggtattgctatcgcaatatttcttggttttagaaataatgcaagttatagccgacttgtggaggcaaggacattatggggaaatatgttaattacccatcgcaacatattaagaaatataaaagccttattaccggaagataaacaatttaatcgtgacttttccaatctacttattgcttttagttggagtctaaaacatgagctaagaaaaacaaacccnnnnnnnnnngcctcttaccccgacctttatttgatgagataa

SEQ ID NO: 314688 - DNA, 363 bp, Proteus mirabilis
atggaaaaatatataaaagaaaatagctttggagatctaaataacaagattgaaaaccctttcatgatttgtaaagaatatgttgaaactaaacagttaagtactacttttatggtttttttatctagatatggcttttaccgaaattgtagttttattattttattgtttggcgttgtttgttttttaactagtagtttttcatgtatttcttttttggggttaattgtaagctatttgagtagtggattattaaaaaaaagagcagatgaattctatagttatcaggcgactacagtttatagcgcatttttgattgataatttaaattggccatcaaagaagtcatcagaaaataaataa

SEQ ID NO: 314689 - DNA, 324 bp, Proteus mirabilis; identical to SEQ ID NO: 301807

SEQ ID NO: 314690 - DNA, 384 bp, Proteus mirabilis
atgcaaatggaaagcattcaacgagcagttaatcgtgagttctttttagggctgtttgaatatgaagctcatttcgcttgttatgaaaaaggtgctttctataaaaaacatcttgatgcatttaaagaaaatgtcacaagacgtttaacgacagtgttatatcttaatgatgaatggacaccacaagacggtggagagctagttatctatgatctggatgataatcaattagcgacagtcgcccctcaaggtggtcgtttagtggtttttctttcagaacaatttccacatgaagtattacctactcataaagaaaggatcagtattgcagggtggtttcgagttaatggtgtcagagataattttctcgatatcgccagctaa

SEQ ID NO: 314691 - DNA, 276 bp, Proteus mirabilis
  misc_feature (225)..(234): n is a, c, g, or t
atgaatatagcaagtcttcttgaacaaattgcagataaaggttggtgtgtatgggatgatttccttacacctgaggcggttaaacaattgcgtgcttgttttggtaatgatgcacaacaagcacgtataggacgtcatgaaaacctattagcagaaaccacgatacgcagtgataaaattcgttggctagagccgcaaatgggagagccagttcaacattatctnnnnnnnnnnacattatcttatgcaaatggaaagcattcaacgagcagttaa

SEQ ID NO: 314692 - DNA, 345 bp, Proteus mirabilis
atgttgtataaatttacccccattattctgctgataatttccaatatctttatgacttttgcttggtatggccatttaaaatatggtaacaagccgttaattatagtgatcttactcagttggttaatcgcttttgttgaatactgttttgcagttcctgcaaaccgtatcggccacaactattacagcgcagccgaattaaaaaccattcaagaagtcatcacactaaccatttttgctgttttttcggtgacttatttaggtgaaagtttcacacttaaccactttatcggttttattttaattggtgcgggtgcgctatttatttttaaggggccattttaa

SEQ ID NO: 314693 - DNA, 156 bp, Proteus mirabilis
atgtttagtccaatagtatttttacgatatggcatgatgtgcggtaatattaaattaccgttattgtctgtagtggtttgtgaagaacgattagttttaattccggcaatgccattagtatttacaatagcaggtgccaaagttattccactttga

SEQ ID NO: 314694 - DNA, 435 bp, Proteus mirabilis
atgtcaattacaacagttgaattttcggttgcacgtttagagcctgttagatcttcattatcatatcaatctattgatgttcataatcgtaatttcaatggacaagtcgttatgtttcatcatggtgtcaaaattggcactttgaattttattggtacaaaagaaatattggatataagtgaaaaatcacctcttgaaaagttagctgaaatatctagtgctagaaataaaggattaaatgtagttacccgaggtttaaaagaattacaaatcaaaaaacaaatgttccgtgaaagattaatagatgtggttaatagtgcattaaatgatggtttgtgggtagaccttattcatgaggaattaaaatcgctttcgcgtgaagtcgttattgtttgcgataacctagatagtgattttgaagatataccattttaa

SEQ ID NO: 314695 - DNA, 795 bp, Proteus mirabilis
atgtcacagttaaggacgacgtgggtttgcatagccacggaaggcgaaaccgttgacggtcgtgaaattctccgcaatgaaattattgaaatggcggaaacctacgattatcagcgttataccgccatgatttggtatttacatccgccaaatgggaaacacgtcagagagcctggcgagaaacctgtcggagaagttatcgaagttaaagcggaagaagacgacgcgggcacattacatctttatgccatattgcgtccatttattcgcttattagaaatgaacgcacaagattatgggctatttccttctgtggagatgaatttagatttccaagggcaaggaataacatatctagagggattagcggttgttgatgaccctgcttgtgttggcacgacgcgttttaactttagtcggaaaagagataaagggaatggaagtatgaaagataaatcatggcataaaatgtttggcatcgaagaaccagcaccggagccagaaaaaaaatcagaagagcctgcaaaacttcaagtattagcggaagtgttagctgagctagaaagtaaatttagcacattaaaaacgatgctaacagaaactcagcaaagcgttgaagaagtaaaagaagatgttgaaaccgtcaaagaagtggttgatacagaagatttttcaaaattgcgcgataacttaccaaatattgttaaaaactttagcaagttagactctatttcaacaagaaaacctagcgctaatccgacaggaaataaaaacaaacgttttgattttctttaa

SEQ ID NO: 314696 - DNA, 453 bp, Proteus mirabilis
atgagtgggaaacggatttctgggcagtcgattgattttaatatcgacggtgatttagttcatgttgaaaaagtcagtctatcgattacagacaatacaggtgtcgctcaaaccaatggggtgcctgacggttatgtgaacggggatgtatcggcagagggtgaactggaattatccaccaaatatttaaatgtgattacagcaaaagcccgtagtgcaggctcttggcgcgctatccccttagtcgatttgatgtggtacgcaaaagcagggacggaagaacttaagattgagtctttcggctgtaaattaaacgtcaccgatattttagacgttgaccccaaaggcggggcagtcatgacgcataaaattaaatttatcgtcacttcccccgattttgtgcgcattaatggcattccatatttggaatcagaacttaccgacaaactgtaa

SEQ ID NO: 314697 - DNA, 1257 bp, Proteus mirabilis
atgcagcagcaactgcttacatggatacgtcagtttaatgaagagtacgctcaaatcacttctctgttacttgttttattgatcatttttgttgttgctcttgttctccactttattttgcacaaacttgtgctccctaagctttcaaaagctatcagtaaatacgatcaaaagtggcaactctcttttgaaattaataagttattcagtcgatttgcctttcttatccaaggtgtagtcattaatatccaagccttattatggatgggacccggtaaaacacaggagatattaaccaccacagctcaagcatggtgtttacttttcggtttattgatgattttctcaattatggatctctgtttgcagatcatgagaaattccccttcttttggccgattaccccttagaggtattttccaaagtttaaaattagtcgccagcgtgctgattggtatcatgattgtttcattactgatcggtaaatcaccgcttattttattaagtggtttaggtgccatgactgcggtgttgatgttggtatttaaagatccaattatgggacttgttgccggtattcaactctccgccaataatatgattagcttgggtgattggttagaaatgcctaaatatggtgctgatggtgccgtagtggatattagcctcaccacagtaaaagtacgtaattgggataataccgttacgaccattcctacttattctttaatttctgattcgtttaaaaactggcaagcgatgacacaatcaggtgggcgtcgaattaagcgcagtttatctcttgatatcaatagtatttactttttagatcaagagaatattgataaattagaaaaggcacagcttcttgaaccttatataaaaagcaaagtaggtgaaatctccagctataacgctagcctttgtcatgagcatcaaatgccacttaatcaacgtggtatgacgaatgtcggtacatttcgcgcttacgtggaagcttatctaaaaaatcatccgaagatccataaacagatgaccattatggtaagacagcttgccccaacctctgaagggttacctatcgaaatttatgcctttaccaatacaaccgtgtgggtagagtatgaagctattcagtccgatatttttgatcatatattcgctattcttcctcagtttggtttacgaatacatcaatcaccaacaggtagcgatgtcagagcattaaaattccctaccaatatcgacacaccatag

SEQ ID NO: 314698 - DNA, 2433 bp, Proteus mirabilis
atgtcaaaaattaaaaataatgtttctatcactgaaatgagccggcgtggcttcattcagtctgcagctgttctttctggcgctgctgctgtagctggaacggtatcattacctttctctgctaatgctcaaacaccccagggtattcgtcctgatgagacgtctgaaaccatcaaatacagtgcatgcttagtgaactgtggtagtcgttgcccattaaaagttcatgttaaagatggcgtgatccgccgtatttccaatgaaaccatgtttgatgactcaacctttggtcttcatcagatccgtccttgcttacgtggacgttccgttcgttggaaaacttataatccagaccgtttaaaataccccatgaaacgtgtcggtaaacgtggtgaaggtaaattcgagcgtatctcttgggatgaagcgacttcgattatcgctgataagctaaaatatactatcgatacctatggtaatgaggctatttattaccaatatggtactggatctaccggagcgaatttacatggtagaacagcctgtaaacgtctattaagtacagtcggtggcttcttaagtgactacggtacttactcttattcacaattaaccggcatcgtcccttatgtgtatggtgatatgctggaatctctgttaacagaaatcgaaaactcagatctggttgtgatgtttggtcataatcttgctgaaactcgtatgtctggcggtggtcagttctatgaaacactgaatgcgttagataagagtaaaagtaaagtaattattatcgacccgcgtcgtactgatagtgtcacaacattaggtgcagagtggatccctatctatccgggtactgatgctgcattagtggctgcgttaggttatgtgatgatccaagagggtatcactgatgaggcatttttacgtgaatattgcatcggttgggataaacaaactctgccagcctcagcacctgaaaatggctcttacaaagactatattctcggtaatggtcctgatggaattgctaaaacccctgagtgggcaagtcaattaaccggaatttccgttgcgcgtattattcaattggcacgtgaaattggtaatgccagagccgcgtggatctcccaaggctggggtattcagcgtaccagtaatggtgaacaagcttgccgtgccattatgatgttgccattaatgtctggtcatattggtcgtcctggtactaataccggatgttggggcggtagcattgaataccctgtcgcaagttttgccataccaaatccagtaaaaacccagatcccaacatttatgtggtctgaagcggttgctcgtggtgaagagttaaccagtaaaaatgccggtgtcagaaataaagataagctggatacgggcattaaatttatgtggtgttactccagtaatgtgattggtaaccagcatgctgatctcaataaaacacatgaattactgcaagatgaatcaaaatgtgaatttattttagtgtgggataaccacatgacaccatcagcaaaatatgccgatattttactgcctgatgtcactactgtggaaactaacgatcttatcaataactcttatgctagtggtgcgtatcattatatggtgcgtttacaaaatgccattgagccgttatgggaaaatcgtcctaactatgatgtattggcagatatcgctgaaaaattaggtgttaaagagaaatttactgaaggtagaacctaccaagagtggattgagtattgctataaccaagtaaaagcaaataacccagcgcttccttcttttgctgaaactaacgatatggggattgtggatagaaaacttcctcctcgtagcgcttatgtggcattagaagcatttcgccaagatcctatcgccaacccactaaaaacagcatcaggtaaaattgaaatctattctgagaaattaatgcaagatactgaaggttggatcttaccagaaggtgatcgtattcctgcaattccagaatattgtaaaaatgaagaaggtgttgaaaacgttaccttaaaagagaagttcccactgcaaatgacgggcttccacgataaaggtcacgtccactctacctattttaacgtcgcaatgttacgtgaagctattccccatcaattttggttaaaccccgttgatgcggcacagcgtggattaaaatctggcgatattgctgagatttataacgaacgtggtcgcttgcatattcgtgtcaaagtgacagatcgtgtattacctggtgtgattgcagtaccacaaggtgcatggcgttcacttgatacaacaggtgtagataccggtggatgtattaatacattaacaagctggcacccatcgccgtttgctaaaggaaatccacaacatactaaccttgttgaagtgaaacgtgcataa

SEQ ID NO: 314699 - DNA, 618 bp, Proteus mirabilis
atgaagcaatatggtttttattttgactccactaaatgcactggctgtaaaacctgtcaagtcagttgcaaggacgaaaaagatttagatttaggccctaaattccgtcgtgtttatgaatatggcggtggtagctgggcaaaacaagacggtatctggacacaaaatatttatagttattatttatcaatttcttgtaaccactgctctaaccctacttgcgtggcaggttgccctactggcgcgatgcataaacgtgaagaagacggtttagtggttgttaatcaagatgtttgtgttggatgccgttattgtgaattacgttgcccttatggcgcaccacagtttgatgaaaagaaaaaattgatgtcaaaatgtgatggttgctatgagcgggtcgcccaaggtatgaaaccggtctgtgttgaatcttgtccacaacgtgcactggattttgatgatattgatgtgatcagagcgaaacatggtacagagtgtggtatcgcaccaatgccagatccaagcttaactaacccaaatatcgtgataaaagcacataaagatgcaaaaccttctggtgataaaaccggctcagttcaaaatgcggcggaggtataa

SEQ ID NO: 314700 - DNA, 777 bp, Proteus mirabilis
atgcatgaacttcctcttgtcttttttactgttttaggctctagcgcagcaggtctgtttctgatcgcttatatcagtaaaaagttaggtcaaattgatgaacaacaactgcgtaatgccaatattcttgctctgatattaatgcttgtgggcttaggtattggtggattacacgtaggtcagccactacgctttttcaatatgttattaggcgtaggccgttctccaatgagtaacgaagcttttctaagtggtgtatttactggttttgcttttgcaacagtggcactcactattatgaaaaaatggcggggattacgtgaaatttgtaatctatttaccgttatttttggtttagcttttgtttggtcaattccgcaagtttaccatattccaacaattgctaactggaatacagattacaccacgttacagttttggatgacgctattaattggcggtggagtacttgcaatggtcagtggtgcaagacgtttaggggcattgtcctttattatcggtgccataattacctttgccgcacgctccggttatgtcagtttcctaagctttaatggcccagaattaagtgctgagcaatcactgttttggggtttccaattagcagtattagcattaggtattgtggttgtcgggtttagcgcattaaaagcgcaaacctcaaaagtgaccttagccacttgtgccgcagcggtcgtaattgctgaattatccggtcgcattgccttttataacttatggcatataaccatgtaa

SEQ ID NO: 314701 - DNA, 543 bp, Proteus mirabilis
atggttccttaccaacccgtattaaccttttggtttgaagaatgtaccccaaaacagtggtttcaaaaggatagcgcttttgataaagaaattaaggatagatttggtgagctatgtattagcgcaagtcgtgcagagcttgcctcttggcgcgagagcattgaagggcggttaggggaaattattattctagaccagttttcacgtaatatttggcgtgatacaccaaaggctttcgcccaagataatatggcgttaattcttgctcaagaagccattcgattacccgaatatctcaccctgacaccggtaaaacgcaaatttctgatcatgccatttatgcactcagaatcacaaaaaatccatcaagatgccattgcgttgttttcacaattaaatgatgacgacacttatcaatatgaattacgccataaagagattatcgataaatatggtcgttatcctcatcgtaatgaaattttaggccgtacttccacaccagaagagttagcgtttttacaacaacccggctcctcattctaa

SEQ ID NO: 314702 - DNA, 1236 bp, Proteus mirabilis
atgactaaaatatttaaaatcccctttgcaacgcaaggggataaaacagttgtgcctgttgagatccaaacagatggctcagtatcttatactcaaggttacggttatgattatgagcgtgaccaagtcactgatccggcggcaaaagatattgaacgtgaaaaaatgaatagcctatttcacgatatcaccgagtctattggtgaaatgcaattacaaggttttgctaaatggtcagaagcgggcaaaccctatgctattcgtagtgtggtttatcataacaataaggtatggcagtctaaaattgagaataataatattgagcctattgccggtaatgcatgggctgagctaaaagctgatatcaccgcgaatgaagtgggtgcttataacaaagctgaggctgataagcgttttcagccggtgggtaaatatcaagcggaaggttatagctatgcaaaagcggaatctgatactaaatatcaacccaaaggcaattatgctcctgcgggaaattatgcgaataaaggcgatagttataccaaagcggagtctgatgggaaatatcaacctaaaggcaattatcaagcatcgggagattatgccaccaataccaatttaaaaaatgagcttaataagaaatttgataaaggtaatattgctcaagcgaccggaacctcaacggctcatgttattagccaaaaagccgccactgaggcttttcagccaaaaggaaattatcaacccaaaggcaattatgcattagtgggtgcatcctatactaaaacggaatctgataataaatatcaacctaaaggcaattatttagcgacaggttatagttattctaaatcagagtcagatggtaaatatcagcctaaggggaattatcaacccaaagggaattatgcagttattgggagtagttatactaaggcggaaagtgataaattatatcggaaaactaaatatgaaaaaatggtaaaagtatggtcaggtgaagcttggcaagggcaaacagtaacgacgacacaagatattattggtcaatttattttatttaaaacaacgtggggaaattacttttttggttttcaattacctccagtaaagaatattgcagtacatcaagctcatgtgagtggtgattatcaaagaatgatatgtgtagataacaataagattaaaatagaagcaactaaacctgctgttacagaaatttggcttttaatatga

SEQ ID NO: 314703 - DNA, 657 bp, Proteus mirabilis
atgaatattcaacagtttgattatcattccgatcttttacaagcgatactttggcaatatgaaaatgccgataaattaaaatcactggctcattttaaggcagactattttcaccaatccaccgtgttattttggcaaaattggtatcgcgatatatttaatattgataccgccaacgactttgggttagcagtctgggcgcgtattttagatgtgcctttaggcattgatatttccccaagtgagaaaacaaaaataggttttggctttggtaaaaagaaagctaattttaacgcaaattttcgacgcaataccgattacaccttatcactgacgttagatcaaaaaagaatgttgataagaatgcgttatttcaatctcacccaaagtccgacggtcaccaatattaatcaatttttaaaacgttttttctggcggggtgaaagtaaagtatttgtacttgatccctttgatatgacgtatatgtattacgtttttaattttaatcccgatgaacgcttacgtttattattagaaaacttcgatttaatgccacgtccttctggcgtaggcgtcaaatatcgcatcataactaaaaaagcatttggttatggttcatatcgtaaaaatttcttaaagagtaatttcggagaataa

SEQ ID NO: 314704 - DNA, 1188 bp, Proteus mirabilis
atggctgattatcgatatattaataataaaggtgttattgttcctgatacggcagcgctacgaaaggaggtagaagacgaatttcgcactgtctttgggcaatcaatcaatttatcgccagaaacgccccaaggggttttggcaacaatggaaattgaaaatcgcgatgccattgtgcgtaataatgccgaacttgctaatcaaattaatcccgatattgctgggggtatttttcttgatgcaatatgggcgttaatgggaggagagcgtattaatgccacacactcctatttaagtaatgtggaatttatgggagtgcccggcaccattatccctaaaggttcacaagctctaacgataaatggcgcagtatttgaaacattaacctctcttattatcgcagacactggaaaaataactggggatatgcgcgctaaagagtacgggcctatcacttgtggtattgggcaattaaataaagtggcaagttcggtattaggctgggaaaaagtcaataataccacgcacgctattattggccgttatgcagaatctgatattaaagccaggcgtcggcgtaaacagactctcgctaaaaataccatcagtgttgcccaagctattacatcgtccctctatgaattagccggggttaactctctctcttttcgagaaaacttcactgataaaacattaactatcgatggtatttctttattgccacatagcatttatgtctgtgttgaagggggagacagccatgaaatagccaatgttttattaagaacgaaaacaataggtgcggcgtttaatggtgatattgaaataaatctcttagagccagcaagtggtcaagaatatccgattaaattttcacgaccaaaagaagtgacgattttttgcaaagttaccgttaaaaaatcctcttttgatgcacaaaccattattcctgatgcactagaaaaatggagtcatggagagatagagggggataatgggctggtggtagggcgagatgtctctccttttgagatctccgctgccgtcaatgctgtggagccacatttatttgtcacaaaagttgagttatcaacagatggaaaaaattggcatgtagcattaattcccattgccattaatcaaattgcccgcttacctaaaggggcgatacaagtggtgatggtatga

SEQ ID NO: 314705 - DNA, 345 bp, Proteus mirabilis
atgaggacatttgctataaaccagcataatgatctggtgattgatgctaaaggtgatctgcaaatttgtgataatgatgaagcagtaaaaaacctttgtcagcattttattaaagcggttcgtggagagatgttgcataaaaaagataaaggtattccttattggtcagcaacatttagccgtcaagttgatattcctttatttgaaatggcttttcgacaacgtctggctgaaattgaggaagttgtggctatcagccattttaatgcctttttagataatggcgtactgaaatatcaggcggatatacgcacgatatatggaggatttacattacatggctga

SEQ ID NO: 314706 - DNA, 693 bp, Proteus mirabilis
atgagtaaacccaataacgatattgcgagtgttggttcactggcaggggctttctcgtccgcatttcgccatttgatgatgaatacggatgatatgttgcccgcaacagtcattgattatgatgaaaaaagcaatcgagccgtgatcaaaccactggtgatgatgttaaccacggataatcaaactatttcacgagcacccgttgcaaatattcccgtatttcgctttggtggcggaggtttttttattagagcaccgattaaagcgggagattttggttggttaaaagctaatgatcgtgatattagccttatttttcaacgcggtggtctagaggatagacctaataccacccgattacatacctttagtgatgcgatgttttttcctgacaccttaaaaggttgggtgatcgacggaaaaaatattgatgctttggttattcagtcaatggatggttctgtctgcttttctcttcataacgataaagttgtactggaaacccccaagtatgaaatcaatgcccgagaaacgatatttaccggcaatgtcacagtaaatggtaattatgcggtaaatggaaatagtgattctcaagggggcgtgatgcgtcacaacgggaaagatatcggttcaacccatcgccatagtggcgtacaagcaggcaaagataacacagggagtccaatatga

SEQ ID NO: 314707 - DNA, 813 bp, Proteus mirabilis
atggatcttcgacgaataaggctcggaattgaagtcggagaacggcttcaatggtatgaaggattacgtatttcagccagtggaacaaagtatgccaatccattacaaaatgaatgtaatgtcactatctcagggctaaatgcacaaacaagagattatctgctgacagaaaccagtccctataataacaataagcaaacgcgacgactctatttggaggtcggccgagttaataccggattactctctttgtttattggcgatattgtcagtgctgaaatagattcacctcctgatgtgacgttaactttatcggcaaaaactagtcatcaaagcgcgggaaaaattatttcttccagtggcggcacaatgcgcaggctgagtgaaatagccttggctattgctgatgactgtggggtgaaactagattttcaagctaccgataagaatattgctaattggtattattgtggctcagcattgcatcaaatagaacgtttacaggaagctggggacgttaaagcctttattgatgatgatacgttatttgtaaaagatgacgacaaagcactaaaaagccgtttgcgtattttaaatatgaattcaggcatgattggcattcccaaagcgacagaaagtgggttaaccgtaagttacttgattgatagcacctcggagcttggtggaatgcttcgccttgagagtaaattaaacccttcattaaatggtgattatatcattgagcaattggcgtttagtgttgcctcacatgaggctgatttcaactataccgcaatttgtaaacgagcttaa

SEQ ID NO: 314708 - DNA, 321 bp, Proteus mirabilis
atgcaagaaataccattacaagccattcctaatcaacgattttctgtagcaatagccggtgtgaattggcaattaacgcttaaagtggctaatcaaaccatgttttgtgatatcgagcgagaaggcgaaatacttattacaggaatgcgccttgttgctaatacaccgataattccttatcgctatttaaatcagggaattaatttaatgtttttaacagagcatgatgcattaccttggtatgaggaatttaccaagacgcaatcattagtgtattggagtgaggaagatggatcttcgacgaataaggctcggaattga

SEQ ID NO: 314709 - DNA, 489 bp, Proteus mirabilis
atgataacggaagttagaatttttgatttagcctcttttaccacattgtttgatagtgttaacccaactcaagtcaccatagacgatagccaccaagcgattacatttacggtagaaaatggggaaagccgaagtgaccatgtggtgatcaaccccatcagtatcagtatcagcttattgttaacgggtgatattgctaatgcttatgccactataaaacagttatatgacgaaaatacgttagtgggtattcaaacacgtgttagtacctatcaaccaatgctattagaaagtcttagtcatgatgaagatccgtcaaaagtagacgctattgagttaaaactgaagtttattgaatggaaaagcattgagcctgaatacaataaaaaatcagctaaatcgactaaaaaacctaagcaatcctcaacgattaatcgaggaaatgtgaaaagtaaaaaatccatgccaataggaaaaaaacagggctag

SEQ ID NO: 314710 - DNA, 2304 bp, Proteus mirabilis
atgtcgctattacccgtatttagtcaggtactgacgttagacgcggaggtatctgataacgcattaaataatatcaggaaatcgaccaacgaaattcttgaggaaatgaagaaaatagagcagggcgcatcagcaggtattaatcgcttttttgcctttgttcaagaaatagccgccagttttaacgaattatcactggagcctgaaataaacctttcggtggacaaccaagaaattattcaagcctctgaaactgttgaaaattcgatacaacaaatcgttaaaacggcacttagtagtactcaagaatttgatacttttttgcaaaatatcttaacggggctgacgagtttatcgcttgatgagcccataaatattgaaataaatagtggtgaaacacaagagaagatccattcaattacgtcaagcattgacgctctaaaagatgcgatgtcagtattaaattacacgagaaatttgcttagcaatgatgtggatagtgatgcaagtcatcttgcgaatttaaatgctgaatatcaggcaatggaagatcagcttgcttcattaaataatgaattaactttattaactgaggcagaaaagaaaaataaagaaaataaattagttattgatgaggtgattaaaaatctaggtgccgattacgatcaatttatcagcaccatgcaaacccaaggtattaaagcggcaatagaagaagctcaagctcaacgtcgattaagcagtagtgttgatgaaactgggaaaagttatcagcaaaccgtcgataaaatgaaagattttatcctaaacgccataggtgcaacggatattatggggacgttacaaaaggtattttctgcgtcacttgaacgttctcaagaaatcgaatcattagataaactcagtaaaaaaatgggggttgcggcgattgatattgacgctttttcaggtgcgatggctgcaattggtggcacgaaagaagctgctcaagcggatttagccgctatggcaactgcgtttgacgatacgcaagatcccatagagcagcttttacaggtcgctgataacgttaaaaatatgagttttgatgatgcccaaaaagagctggaaaaattaggtgttgttgatgataaaaccatcgaattaatgatgaaaggtcgtcaagagctagagcgtacgatgggggtacaaaaacaattctcaggtatcaacgacgacagtattgaaagtgcgatccaactcaatgccacaatacataaatttagtcaattagcggcacaattcaaaaataactttttagatatgattattcctacgctggcaaaaggtatggaatggtttgataaattagtcgatttttgtgtgaaaaataaagatattgtgattagctttttctccgccatcggcgccgctgttgctatttattatttacccgtcatgatctctgctgccgcatcgacacttgccatggcattacctattattgctattgcaacggtgattggtttattaggtgtcgcctttaaactcgtctatgacgatattatgaattttattaacggtaacgattccatgatcggccgtatattagaaaaatacccagtattaaaaagtgtgatcatgacgatatggcaggcatggcaatcattctttgaatatttaaaagaggctgtcactgttgttgctgattttgttattgctgcatgggatctaatatctaactcatttaatcaatttatacagactctagaaatagggattaataatcttattgcttgggggcaatccattattgatatctttatttttgtttctgattcagtggtgagcctatttgaatggatgtggggctgtgttgaaaagatattggattttgtcgatgaaaaaatcaacctaatacaagatatatggcaatcagccaaaagctttttcggtatggacgacgaagaaaaagaaattcgtgtggtgcaaaaggtagagcggcgattaacaaatgagggggagcttgactatatcttgccacaatctcaaacagcgacacgatattatagtcctatgcaggaggttaaatcgttaaataacggattagcaatatcgtcaaataacagtttaaacccgatgaccagtcaaatgatcagtaatcaatcaagcattaaaaacgaaagtaatgtgcaaattggtgaaatcaaaattgaaactcaagccacaaatggtgcggaggtggttaaagaaatcaagaaatcttatacagagcaagaagctaaaaatatatcgcagaatcactctagtggctggagggtgtaa

SEQ ID NO: 314711 - DNA, 459 bp, Proteus mirabilis
atgttgattaagccaaaagagatcacggtgattgatagtgatcgtcaacagcatacctttattattagccggttacccgccacaattggacgagagatcttggctaaatacccattatcaaatgcccctaaaatcggtgattatgaagtcagtaaagaggccatgttaaagatgatggcgtatgttgctgtagaaaaagaaggccaagaaatttatttaaaaaccagtacattaattgataatcacgtccctgatggggaagcgttaattcgtcttgaattagaaatgttaaagtacaataccagttttttcggcaacggcgggagccaaaatttccttcaatacctattaggcaagctcagcggttctctcccgtcgattataaaaacgctgatggcttctttgccgtcatcatctcagccggcttcgcctctttcacagaactcaaaacaaccatag

SEQ ID NO: 314712 - DNA, 453 bp, Proteus mirabilis
atgaacgatatttcagcaacaggcttaagccttattattcaagcaagtaaaacatttccagcgggtattccgatcaccaccttttctgatgaaggtgatcctttagatttaccgacagttaatattacacaaacagcggtagatattaatggtaatttggtcagttggtcttcaccaacacctcaaacggtcaccattaatgtgttagcgggaagtgaagaagacgaaaatctagctattttgtttgatgctaatacggcaagacggggacgacgtcctgccagtgatgtgattactttagtcgcttcttatggtgatggctctattaccacggcacgtaatggacgtattactgacggttgccgaggtaattcagtcgcaggggcaggacgccttaaatctaagcagtacacttttattttccaagattttgaccgtgttagagcgcgttaa

SEQ ID NO: 314713 - DNA, 1488 bp, Proteus mirabilis
atgtctattaaacaaacacgctatgttgatattgcgagtgcggtgattggtgcctctactgcaccaatgcgtaaactgaccgcacgtattttttcaacaaaccctaaaattccagcagggaaagtactcgaatttacttctggtcaagttgatgcgtttctgggggctgattctccagaagcgcaatttgcccgccaatattttagttatgtgagtccggctcccgtcagcaagcctaaagagctacaaattgcctcttatgagccaatgggacgagcaccaacactctttggtgggccggttgccacactggataaattaaagctgattgaagagggtgagttaacgctggtgattggcgatgtgaccaaaaaaatcagcaagctctctcttcaagacgtgacgtcctatagtgatattgcatctgtaattcaagcaaaactcaatgctgaaagtgagccacaatttgccagttgttatgtgacttttaatgctatggatagtgctttcttaatcagcggcggtgtgcaagaaaaagcgcagattagcgtcaacaactcacctcttgctgatgccttagggttaagtcagggacaaacttctgagggtaatgcatcacagactgcccttgaagcctttatggctgcagaagctatttctgactcatttggtagtgcaacatttttaaccgaactatctattgagcaaagtgttgaactggctgaatacgtagcaggtgaaaatgtcaaataccaactttatttatcggtgccagatcaacaagctgaaatgtacagcaaggcattaatgaatacagcatcgacagggttgaatttaaaaaccgaggaaaacttttttgtgcaagcgttgcctatggcaattatggcagcaacagattttgagcgtactaatgccaccacaaattacatgtatcgacaatttggtattacattcccatcgcaagttaccacagatatggcggccgatcgcttagataaattgcgcgtgaactattatggtgaaacggcggtatctggctctgagatcagcttctatcaacgtggctttttatgtggtaatggtgctaatccagtagatatgagcgtacatgccaatgagcaatggctaaaagcgtatattgcacagcagtggcttagtttactactgtcaacacgcggtattcctgcgaataaagatggtgaagcaagagcgatgatgatcattgctggggcagtaaccaaggcattaaataacggcactattcaaacgggtaaggcattaacagaagtacaaaaaatcgcaattacagatgcggcaggtgatgatttagcgtggcacgatgtacaaaacaaaggttattggtacaacgctgaaatcgttgaacaaacagggccagggaatttaccggaatacaccatgaaatatgtattgatttacggtaaaggcgattgggttcgtaaagttgaaggctcacataatttagtttaa

SEQ ID NO: 314714 - DNA, 513 bp, Proteus mirabilis; identical to SEQ ID NO: 293646

SEQ ID NO: 314715 - DNA, 450 bp, Proteus mirabilis
atgaactatcttacaaaaatcataataatcattatgttatgtttaattgctggacttttttgggttattgatagaaataaaatattaaaacaaaaatatgtgaaaattaatgaaacactgacgcaacagattgtagaaaacaaaaactatcaattaagaataaagcaattatatcaaatggatactcaacgtttacaggagttagccagtgccaagagcgaaattaaccggttgcgtagttatgctgagcgtgatcctgagcgggtgtacatcagagccagttgtgcaacaaacgacgccaattccaccccccgcgtggatgatgcaacccgcgccagacctactgacgccgctatccgaaattattggatactcagagaaagaattgctcagtcagagtccatcatcttaggtctacaagattatattcgccaagagtgtattaattaa

SEQ ID NO: 314716 - DNA, 405 bp, Proteus mirabilis; identical to SEQ ID NO: 293644

SEQ ID NO: 314717 - DNA, 300 bp, Proteus mirabilis
atgaaagaaaatccagatctatgggaacaaatatgcattgttctttattcaatgaaagaacaaggtatatcagccttactcgctgggggaatggctattcttcgaagtttatataacgcaggaggatggaaaaaaacttttttagatggactgatgtgtgcaatgtttgcttggtttatcaaagatattctccttttatttagtattaatcatcaatttgcttacttagccagtgtctttattggctatgtaggcattgaacctgtaagcaaacttcttataaggaaaaataggagttaa

SEQ ID NO: 314718 - DNA, 816 bp, Proteus mirabilis; identical to SEQ ID NO: 303512

SEQ ID NO: 314719 - DNA, 738 bp, Proteus mirabilis
gtggttaaaaatgactataagttagcattcacaaaaagactacaagaagcctgcctagactccgggattgcgggtagagggttaggtaaaagaattacagaggcattggctaaacaaggaataaaagtcagtgcgcccgcggtctggaaatggttaaatggtgaatccgttcctgactcaacgaatattttagccttaagtcagtggctagatgttcgagctgaatggttagaatatggcagaggcgccaagaaaaatgatggcatttcagttaatgaaataatgcctgttaatgattgggataatagtactcctatagagcgagatgaagtggagatcccattttattcaacaattgaattggccgcaggttttggcagttgtaccactgataatcaaaaggtggaattattgagattctctcgttctacatttaatcaatatggtgtacagccaagtgatgctgttgcttttaaagtgcatggcgacagtatgtcaccggttattcctgacagctctattgtaaccatcagtacaggtcatactaagattattgatggtggtatttacgctattcagcaaggtgacttgttaagagttaaaatcttgcaccgcttacccaataataaaatcattattcgtagctataatacgattgattatcctgatgaagaatcaaccttagaagaagtaaaaatcttagggcgagtttttaattggtcggtgatgggctggtga

SEQ ID NO: 314720 - DNA, 1020 bp, Proteus mirabilis
atgaacaaatatctcactgaaaataaatcgatagttttaacaggggatcggatcactggacctttacatcttggtcattatattggctctcttcagcaacgtgtcgaatttcagaataaagcgacacaatatatcttaatggctgatatgcaagggttaaccgataatggctcaacacctgaaaaggtcagtaaatttctttttgatgtggtggctgattatttagctgttggtattgatccgaaactttccacattatgcttacaatccgcactaccggctttatcagaactgactatgctgtatttaaatattgtcacagtatctcgcttagagcgtaatccaacagtaaaacatgagattttgcaaaaaaatctttctcgttcattgccggcgggatttttaacctatcctgtcagtcaagcggcggatattactgcatttagtgcagatattgtgcccgcaggagaagatcaattgcctatgattgagcaaaccaatgaaatcgtcaccaaaataaatagcttaataggacaacccgtattgacaagctgtaaggtcgtggtagggcaagtcggtcgtttacctggtacagatggtagtgggaaaatgtctaaatccttaggtaatacgattaatttatcatccacagccgatgaaattaaaaaagcggtttattcgatgtataccgatccgcaacatattgatgttgcatcaccaggtcatattgaaggtaatgtggtgttcacctatttagatgctttttgccaagataaagccacggtgacagcaatgaaggctcattaccaaagaggaggacttggtgatatgaaatgcaaagctatgcttaatgatatcttacaagagcttctgcaaccaatacgtgaaaaaagagcgcaacttattaatgataaagcttatttattacaagtgatcaaagaagggagcgataaagcgaaagaagtgactcaacaaaagcttgatgaagtaaaacgtggtctaggattattgatcttgtga

SEQ ID NO: 314721 - DNA, 2694 bp, Proteus mirabilis
atgcgtacactgacccaattaaagccaaatacattaactcgcttatatgctctgtttcttctgtttatggccatatccctttttctatatgcttatagctattttgatacttggctagaaagtaaaaaaaatgccattaacaacacgactaataagtttgcatctcaagttgaagattaccgctatcacgctaaccaactattccagttatcaaacaaaattaatgatccaaccctctttctgcctttaaaaatcaatccggtcaaactacgctctgatgtttattggcttgaaggacgcgatcagaccgttgacgcaattgtttttggtaaatcgaatgaacaaacctttcagttagccggttattttgcaaacgcgttagaaattatttggggggtacgtaataactatagctctctctattatcttaatggtaaaggcaatgatcttatccttattactacccactcaatactaaaaccagaattgcgctataaagaaagctatttaacactaacggctgaaaacaaacgttctgagctattaatgcaatcaaccgcattagatgaaaaagagagcctttctcccattaggaaaatgccgacagaaaatatttattactatacctaccgcaccatgtttaatgtgccagggcaactgaccagtgttattgcctttgatttacccataaataattttctacctgctgagctatcacctcaatatttaagattattacccacaggacagcagagtgtttatgataaaaacaatattgaggtatcaacggatgggacttcactcatcttctcacagcccatcgcaggaataccctactctttatcttatgagtatccactaaaatcgattttcaatgagattgtgtataaaaatatctggttacttatcagcctactcatttttatctcgatttcagtgtttggccatatctatattcgtaataaatatgtattcccttatatttcgatgacgcgtaatcttcgcatcaaagaagagatgactaacgatatcatttctaatcttcctattggtctattggtgtataatttttcatcaaaccacaaaattattagtaatagccacgcagagaaactattacctcatatcgatttatctaagatccgccagatggcgattgaacataatggtttaatccaaacggccattgataacgaaatttatgagatccgcaccagtagcaacagcaatatcgataatactgctctattcatttttctgaataaagacaacgaagcattaatcaataagaaattgcagctagcacaacaagaatatgaaaaaaacacgattgcacgccgcaagatcttatccaatatgtcgttagaactcatacgaccaattaaagatattaatgagatggtatatcaatttaaagatctacttcctaacgatactcaccaacaattactgagtctgctattagaaaaaacgaattatatttctgagtggatagaaaacattacgctaattaataagttagaaaatcaagaatggaaaatacatcaagatgaatttgaactttcaacgctagttgaatctattctaataaccgcatcaccatttatgataagaaagggattaacactttatttccataataatattaaacctagtttacttttatttaatgatggcccagcattaagtaagattattttatcattgattaattatgccattagtacgactaattatggaaaaataaccgtcaatctaaatttagaaaaaaataatgataaagaagaaatagtaattgatattattgatagtggcagtgggttaacagctcaagatctggctaatattaaatatccatttttaggtcaagctatgggtgataaatattattccaactcgggtattattttttatttatgtcatttgttgtgtaacaaaatacaaggcactttgaccattacaagccaagaaagtattggctctcatttccgtatcgtacttccataccagcatatagatacagaagagcgctcttttgacatattattagagggtataactgcaaaactcgccataaaaaaccctgaaatagaaaaaataatctgccaacagcttgataaatatggcgctacatactttgataaaaataaagagaatctttactcagaatacgatatcatacttagagacactccggataataatcctgaatcagcaacagtattattagttagctctattaccggatttgaaaaaatagcaagaaatttaataaagtgtaactataacttcggtgatccattaattgaggctattacttatttgattgaagaaaatgaacaactttctctcgaaacaactcaaacgagtattcgtaatgagaataataaccttgatcatcacgaagtaattcttaataattataggaagaagttgaatgatagtgattataaggaactatttatcaatactgttcccattgatgttgaaaaactacacttagaagcaactaataaagactttcattctctagctcagacagctcatcgtctgaaaggggtttttgctatgttagatttagaatatctcagagagaactgcgaatatttagaagatgacataaaaaatcataatgaattagagataaaagaacgtatcaatcaactggataaatggatccgacagttgctgtag

SEQ ID NO: 314722 - DNA, 657 bp, Proteus mirabilis
atgaataaccttaatattattattgccgatgatcatccaattgttttattcggcattcgtaaatctttagaacaaattgaatgggttaatgttgttggtgaatttgaagattccacttcacttatcaataacttatctaaattaaatgcagatgctcttatcaccgacctatctatgcctggtgataaatatggtgatggtattacgttgataaagtacatcaaaagacattatcctaatttgtctattattgtactcactatgaacaataacccagctatcttaagtgctgttcttgaccttgaaatcgaaggtattgtattaaaacaaggtgcgcctgctgatctacctaaagcacttgcagcattgcaaaaaggcaagaaatttatgcctgaaagcgtggctaaactgttagaaaaagtgaatgccaatggttatggtgataaacgcttatctcccaaagaaagtgaagtgttgcgcttatttgccgaaggtttccttgtcactgagattgctaaaaaactcaatcgtagtatcaagactatcagtagtcagaaaaaatcagccatgatgaagctcggtgtcgacaatgatattgctctgcttaactacctatcatcagtcactattgataaggaaattaacggagaaagctaa

SEQ ID NO: 314723 - DNA, 2760 bp, Proteus mirabilis
atgttgtgggcaatgggcgcattattaaccatgttttatctcatcaacatctttaatgatactaaatcagatatccgacaagaatatagtaataactataccgatttattgggcttctttcgccaaacctcgagtactatccgcgatttgcaatatttagcagagcggcatcaagagcaactcaatttaaaccctaagatgaataattcttttttttatgaagggcctttttcacttcataaattaagtgaaagtgccgattgtgaattattcaaagggcaaacaaacaattattttcgatcatttaatagtattctgtattactggaaagataatacccctgctttacaaggtatcaaccaagtatttatggttggctctcatagtatgtgtatgattaatttcccattgcgtgcatcacctattgatactgaactgttgaaaaaaatggtttatgaaaatacacgtaattacattaatcaacgagctcaagggaaagagagtaatcaatactggatagtacctgatgccaagggggatagcggtatcctctatgtcatgtcgccagtttatgcgtcagggaaatttattgcactcattggtatcgaaagggcgatccgattggagtatttttcacctacgaaagatcgcgttatctctattcatcttttaaacaataaaaataatccagtcttaagttatcctgaagagaataattatcgcagtgtaagggatgtaccggatgttagtgctccttactttggttttgatgatgattttagtgatttagttgcaaaacgtaagctacttccttcttcttttagtgtggtctattcactaccattaaaacaaattttaaatgaatttaagtttactatttttaatgccattattttaaatatcatttcggcgattgttatctttattttcgtttggatttttgagcgaaaaatattttcacctgcagaaaataatgcttcacgcttagaggagcatgagcagtttaatcataaaatagtcgcgtcagccccagtaggaataagtatcttaagaatacgcgatggcatgattattttaagtaatgagctcgcccataattattttcgcttattaagccatagtgataaacaaaatattctctctattattgctgaaaaaagtagcaatatagtggatgtggtcactaataatcataatcatttgcaaattagttttgtgaattcacgttatcaaaatgaagatgtggcgatttgcgtattagtagatatcagcgctcgtgttaaaatggaacgctctctacaaaatatggcaacggccgcagaacaagcaaaccaagctaaatcaatgttcttagcgacagtcagccatgaattgcgtacaccactgtatggcattattggtaacttagaattattacaatcattgacgcaaaatgaagagactgccagattattaaaaacaatggataactcttcatcgctgctactcaaaattatcagcgatatcctcgatttctcgaagatagaatcgaaacaattaaaaattgacgttaagccattcaattgtcgccaagttgtctcttttgttatctctaactatttgccgttaattgctaaaaaagatttagctatttactgctttattgaaccggatgtacctaaaatcgttaataacgatccggttcgtgtccagcaagttatctctaatctactaaataatagtattaaatttactacgacaggatgtattactttgcacctgtatcgagatgaatattatctctatttcgatattcatgataccggcagagggataaatgaaaaaatgcttcatcagctttttgaacccttctttcaggtctcgcaaaatacagaaagtgcttcagaaggtacaggattaggattagcaatttgtgaaaaactgattaacttgatggatggtgatatcagtgttgtttctcaagaaaatgtgggtagccgttttactgtgcggatccctttatatggcgcactaaattcgagtgatggacaaaccaaatataatctctataaagagagtactattcgctgctttatcagtattaaaaatctctatctagaaagctttattgaacgatatttaagttatgtgggcttacattgtcaattattcacggaagtgactcaggtatctgagaatgattttattatcaccgatcatgatgaatgtttagataagtcttgccaatttatccgtatttatgaacactattttgagccagcaaagaaaatctctgagaataattggttatgcagtacatataaattaaatgaattaattaagattatcctacaattaccacaaacaaaattagagtctgatgactcagaaaataacgcgttaatgacggatcacgatctacaattattgacagtgctcattgttgatgatcaccctatcaatcgtttattgttgaccgatcaactgaaaaaaattggttttaataccgcaacggcagaagatggctgtgatgctttagcctttatgcaagaaaatcatgtcgatattattttaaccgatgtcaatatgccaaatatgaatggctatcaattagcgacaacagtgcgtgaattgagtcgcactattcctattattggcgttacagcaaatgcaattgccgaagaaaaacaacgttgtattgatgcaggaatgaatgattgtgtttccaagccagtctcccttactgtattaaaagacgtattactcacctatgtggcataa

SEQ ID NO: 314724 - DNA, 2634 bp, Proteus mirabilis
atgagcgacattgccagagaaatcacaccagttaatatcgaagaagagctgaaaagctcatatttggattatgcgatgtccgttattgtaggacgcgcattacccgatgttcgagacggactgaagccagtacaccgccgagtgctatttgcgatgaatgtactgggaaacgattggaataaaccttataaaaaatcagcccgtgttgttggggatgtaatcggtaaatatcacccgcacggtgacagtgctgtctatgaaacgattgttcgtttagcacagcctttttctatgcgctacatgttggttgacggtcagggtaacttcgggtcagttgatggtgactccgcggcggctatgcgttataccgaagttcgtatggcgaagatcgcccatgaactgctggcggatttggaaaaagagacggtcgacttcgttcctaactatgatggaacagaaaatataccggctgttatgccaacccgtattccaaacttgttagttaatggctcttcaggtattgccgttgggatggcaacgaatatccctccgcataacctcggtgaagttatcgacggttgtcttgcctatgttgataatgaagacatcaccatagaagaattaatggaatatattaccgggcctgattttccgactgctgcgattattaatggtcgcagaggaatattagatgcttatcgtacagggcgtggaaagatttatatccgtgctcaggctgatattgaaactgatgagaaaacgggtcgcgaaaccattatcgtgacagaaattccttatcaggtgaataaagcccgtttaattgaaaaaattgcggagcttgtaaaagataaacgtattgaaggtatcagcggattacgtgacgagtctgataaagacggtatgcgtattgttgttgagatcaaacgtgatgcagtcggtgaagtagtattaaatcacctcttttcacaaactcaaatgcaagtctcttttggtattaatatggttgcgcttcatcaaggccaaccaaaattattgaacctaaaagaaattatcgcagcctttattcgccatcgtcgtgaagtggtgactcgtcgtaccatttttgaattacgtaaagcgcgtgatcgtgctcatatcttagaagcacttgcggtcgctttggccaatatcgatcctgtgattgaattaattcgtcaagcaccaaccccagcagaagcgaaagcagcattaattgcccaaccttgggatctcggtagcgtgtctgcgatgttagagcgtgctggtgatagcaatgttgctcgccctgagtggttagagccacaatttggtgtgcatgacggtaaatactatctaacagaacaacaagcacaagccattttagatctgcgtttacagaaactaaccggacttgagcatgaaaaactgctagatgaatatcgtgaattactgctacaaattgctgagttattgcatattttgagaagccctgagcgtttaatggacgttattcgtgaagagctaacagcaattaaaacacaatataacgatcctcgtcgtactgaaatcactgaaaatactgctgatattaatatcgaagatctgattaatgaagaaaatgtggttgtgacactgtctcaccaaggttacgttaaatatcagccattgactgattatgaagcgcaacgtcgtggaggaaaaggtaagtcagccgcaaggatcaaagaagaagactttatcgatcgcctactggtggctaatacacacgatactattttgtgtttctcaagtcgtggtcgcctgtactggatgaaagtttatcagttaccagaagcgagccgcggtgctcgtggtcgcccaattatcaatttattacctctagaacaagatgagcggatcaccgctattcttccagtaagagagtatgaagaaggtaaatttgtctttatggcaacggcgagcggtacggttaaaaagacaccattacaagacttcagtcgtcctcgtagtgccggtattatcgcggttaatttaaatgatggcgatgagcttatcggtgttgatttaaccgacggtagtaatgaagccatgctgttctcagcagatggtaaagtggttcgtttcgcagaagagtgtgttcgcccaatgggtcgtactgcgacaggtgttcgtggtatgaaactggttgatgatgataaagtggtttcactgatcattcctcgtggcgaaggtgatatcttaacagtgactgaaaacggttatggtaaacgtaccgttcaaagtgaatatccaaccaaaaatcgtgcaacacaaggcgttatctcgattaaagtgagtgagcgtaatggtaaagtggtaggcgctattcaagttgaagaaactgaccagattatgatgatcaccaatgccggaacgttagtgcgtacccgagtatcagaagtcagcattgtgggacgtaatacacaaggtgttaccttgatccgtactacagaagacgagctagtcgttggcttacaacgtgttgaagatgaagatgatgcattagatgatgatgaagttgatgaaatgatcagcgacaatatctctgatgttccagagtctgaaccaacagatgatgcggatagtgaagaagaataa

SEQ ID NO: 314725 - DNA, 738 bp, Proteus mirabilis
atgaatgataaaacaacctctttgcatgctaacgtagatcagcatgaaatcgacaaatttgagagtgtcgcatcaagatggtgggatcttgaaggtgaatttaaacccctacatcgcatcaatccactaagacttaattatatccaagaacgtgctgatggcttatttggtaaaaaagtactcgatgttgggtgtggtggcggtattttatctgaaagtatggcccgtgttggtgcagaagtcaccggactcgatatggggaaagagccattagaagtcgcacgtctccactcactggaaaccggtatccctgtcacctatatacaagataccgttgaaaaccatgccgcagaatatccacaacgctatgatgtggtcacttgtatggaaatgttagaacacgttccagacccttcctccattgtaagatcatgtgccaaactggtgaaaccaggtggacatgtattcttttctaccatcaaccgtaataaaaaagcgtggtttatgctggtggtaggcgcggagtatattctgaatatggttcctaaaggcacccatgatgcgaataaatttattcgtccttcagaattattaagctgggtcgatgaaaccaatttacgtagcaaaaatatgattgggttacattacaatcctattacagacaaattccgattagcgccaaatgttgatgttaattacatggtgcacactcaagcgaccgataattcggatttgtga

SEQ ID NO: 314726 - DNA, 2292 bp, Proteus mirabilis
atgaatcacagcctgctcgtcacaaaacgtgatggtcataaagaacgcattgacttagacaaaattcaccgtgttattacttgggccgctgaaggtctagaaaatgtctctgtttctcaagttgagttacgttctcagattcagttttatgatggtatcaaaactgccgatatccatgaaacactggttaaagctgctgcagacttaatatctggtgaaacacctgattatcagtatcttgctgctcgtcttgctgtctttaatttacgtaaaaaagcctatggtcaatttgagccaccagcattgtatgatcacgttaaacatttagttgaactcggtaaatatgaccgtcatcttctcgaagattacaccaaagaagagttcgaacagatggataagtttattgttcatcaacgtgatatgaatttctcttatgcagcagtgaaacagctagaaggtaaatattttgttcaaaaccgtattactggtgatatttacgaaagtgcacaatttctctatgtgttagttgccgcttgcctattttcgcgttatccaaaagagacgcgtatggattatattgagcgcttttataacgcggtatccacatttaaaatttcactcccaacacctattatggcgggtgtaagaactccgacacgtcaatttagctcctgtgttctaattgagtgtgatgatagccttgattctatcaatgcgacctcaagtgctattgttaaatatgtatctcaacgtgcaggtattggaattaatgccggtcgtattcgtgcattaggtagtgctattcgtaatggtgaagcattccacacgggttgtatcccattctataagcacttccaaacggcggtaaaatcttgttcacaaggtggggtacgtggtggtgcagcaacgctattttatcctttatggcatttagaagttgaaagcctactggtattaaaaaataaccgtggtgttgaagataaccgtgtacgccatctcgattatggtgtgcagttaaacaaattaatgtatgaacgtttaatcaaaggtcaggatattacattatttagcccgtctgatgtgccgggcctctatgatgcattctttgctgatcaagacgaatttgaacgtttatatgtacaatatgagaaagataagagtattcgccaaaaacaagttaaagcggttgaattattctcactcatgatgcaagagcgtgcctctacaggtcgtatctatattcaaaacgttgaccactgtaatacacacagtccgtttgatccggcgattgcacctatccgtcaatcaaacttatgtttagaaatagcactaccaaccaaaccattaaatgatattaaagatccaaatggtgaaattgccctatgtacactttcggcctttaatcttggggcgattgaaaatctagacgatttagaagagctagcacgtttagccgttcgcgcgttagatgctttgttagattaccaagattatccaattttagcagctaaaaaaggtgctatgggtcgtcgtacactgggtattggtgtgatcaactttgcttattatctggctaaacacggtgttcgctactcagatggcagtgcaaacaacttaacacaccgtgcctttgaagctattcaatactatttattaaaagcatcaaatgaattagcaaaagagcaaggggcatgcccatggtttaatgaaaccacctatgcagaaggtatcttacctattgatacttataaaaaatcattagatgtactgactaatgaacctctgcattatgactgggaaagcttacgcaaagagatcaaacaatacggtttacgtaactcaacgctctctgcattgatgccatcagaaacatcatcacaaatatcaaatgcaaccaatggtatcgaaccacctcgtggttatatcagtattaaagcttctaaagatggcatcttacgtcaagtggttccagagtatgagcgcctaaaaggggcttatgaattactgtggcaaatgccaagtatcgaaggttatttgcagttagtcggtattatgcaaaagtttgtcgaccaagcgatttctgccaacactaactacgatcctactcgtttccctagtggtaaggttcctatgaaccagctgctaaaagatttgctgctcgcctataaatatggtgtaaaaacactctattatcacaatacccgtgatggtgcagaagatgtacaaggtgatctggaagaagtcgttgaaacggcagattcagattgtgaaggcggcgcgtgtaaaatttaa

SEQ ID NO: 314727 - DNA, 1131 bp, Proteus mirabilis
atgtcttataccactttttcacaagttagaaatgatcagcttcaggagcccatgttttttgggcaacctgttaacgtagcgcgttatgatcagcaaaagtaccctatttttgaaaaactaattgaaaagcaactctctttcttctggcgtccagaagaagttgatgtttctcgtgatcgtattgactacaatgcgcttcccgatcacgaaaaacacatttttattagtaatttaaaatatcaaactctgcttgattcgatccaaggtagaagccctaacgtggcatttttacctttaatttcgattccagaattagaaacttgggtagaaacatggtcgttctctgaaaccatccattcacgctcttatacccatattattcgtaatatcgtcaacgatccgtcggtcgtttttgatgatattgttgaaaatgaagagattttaaaacgtgctcgtgatatctcatcttattatgatgagttaatcaatttaactaacctttaccatatgtttggtgaaggtacgcatcaaataaaaggtaaaactgttgaagttactttacgtaagctcaaaaaacagctttacctatgcttaatgagtgttaatgctttagaagcgattcgtttctatgtcagctttgcctgttcatttgcctttgcagagcgcgaactgatggaaggtaacgctaaaatcattaaattgattgcccgtgatgaagcattacacttaactggcacacagcatatgctcaatttactgcgttcaggtcaagatgatcctgaaatggccgaaattgctgcagaatgcgaacaagaatgttatgacctatttgttgaagcagcagagcaagaaaaagagtgggcagaatacctattctcagaaggctctatgatcggtttaaataaagagatcctttgccaatatgttgaatatattactaatattcgtatgcaggcagtaggacttaaattgccgtttaaagcacgttcaaaccctattccatggattaatgcttggttagtatctgataatgtgcaagttgcaccacaagaagttgaagtaagctcatatctagtaggtcaaatcgactcacaagtagatactgatgatttaagtaacttcgaactgtaa

SEQ ID NO: 314728 - DNA, 279 bp, Proteus mirabilis
atggcatctcataaagtgaccctgcaccagcagggtctatcaaccgcattagaatttagctctgaaacgcatccttccttgttggagacgttagagcgcagcaaaattcaaatcgaatatcaatgccgagaaggttattgtggctcttgccgattacgcttagtaaaaggcaaagtatgttatcgcaatgagccattggcatttattcaagctgatgaaattttaccttgtagctgtcaccctgtgagtgatatcgaaatcgagatctgcacaaagtaa

SEQ ID NO: 314729 - DNA, 234 bp, Proteus mirabilis; identical to SEQ ID NO: 311578

SEQ ID NO: 314730 - DNA, 1212 bp, Proteus mirabilis
gtgaaaaatcgcactataggcagtgtatttattgttgcaggaacaacaattggtgcaggaatgttggcaatgccacttgctgctgtgggtattggctttagtaccatggtgttattgctggtgggcttatggctattaatgagttacaccgcgcttttattagtagaagtctatcaatacaacgatccccatacaggccttggctctattgcgaaacgttatctgggtattggaggacaagtcgttacaggtttagctttgctacttcttatgtatgctttaacaacggcttatatcagtggtgcgggtgaattattagcttcgactttatcttcttggattggtcataagataaccatcacacaaggtatcattatctttacagttattggtggtgcggtagtcggtattggtaccacttctgtggatatgattaaccgcttactctttacagcaaaagttattttcttaatttttatgctggtagtcatgttaccccatgtggaaaaagtcaacttaacctctatgcctatcgctcagggactcgttctttctgcgatcccggttatttttacctcttttggtttccacggtagtgtacccagtattgtcagttacatggatggcaatatcaaaaaactacgcctaatatttatcgtaggtagcgcaatccctcttattgcttatattttatggcaattagcaacattaggagctattcctaccaccacctttatggggattttagcccaagaatctggcttaaatggtctactcaccgctatccgtgatgtggttgctacaccgcgagtcaatattgctgtcaaccttttcgcagcccttgcactcgccacctctttcttaggcgtagcattaggattatttgattatctagctgatttgtttaaacgcagtaatcgcgcatctggtcgttttcaatctggtttattaacctttgttcccccgctattctgtgcgttatttttccctaactttgtgcaagccttagcctatgcagcaattgctttatctattctcgcactattattaccagcacttctggtatggaaagtaagacagcaaaagcagactacagagcattataaagttaaaggcggtaagccagccttagccatcgtatttatctgcgggttagtagtgattggtattcaaattgcgattacctttaatatattgccacaagtgggttaa

SEQ ID NO: 314731 - DNA, 543 bp, Proteus mirabilis
atgaaaaagtttttattattaggagcaatgagcgcattacttatttctgctaatgccaatgccatatcgatgaatgtgcaagcgggtaaacattataccgatgtacaagcaggtttaggtgatgctgattctggactttcttttaacggtaattgggcacgtagtgatcacgatggtcaattaggtagtttaggtgcaaaatttgcgttacctcttggcccattctcggcaagcgttggtggtaaagcactttacctctcccccaaaaatggtgatgacggcgcggcattagctggtggtgttggacttaattggcgtgttttaccttcactgagtgtttatggtgaagcttatgcttcgccggaaggattaacatcaggaagtaaatcctattatgaagctgatgttggtgctaaatacacggtatttaaaccacttcatgttaatgcgggttatcgggtgattgaaattgaaaacgcgcataatcacagtaacaataaacttgctgatggtttctatgtaggagctggtttaagtttctaa

SEQ ID NO: 314732 - DNA, 1455 bp, Proteus mirabilis
atggaaaagaaaaagctcacaacggcggctggtgcaccagttgtagataataataatgtaataacagcaggtcctcgtggtccaatgttactacaagatgtctggtttttagaaaaactcgcccattttgatcgtgaagttattcctgaaagacgtatgcacgcaaaaggctctggtgcctttggtacatttacggtcactcacgatattacgaaatatactcgagctaaaattttctctgaagtgggtaaaaaaacagaaatgtttgctcgtttttcaacagtggcgggtgaacgtggtgcagctgatgctgagcgcgatattcgtggatttgccttaaaattttatacagaagaaggtaactgggatatggtgggtaataatactcctgtattctatctacgtgatccacttaaattccctgatcttaaccatatcgtaaaacgtgaccctcgcactaatatgcgtaatatggcttataaatgggatttcttttctcatttaccagaatctctacaccaattaactatcgatatgagcgatcgtggtttacctttaagctatcgctttgtgcatggttttggtagccatacttatagctttatcaataaagataatgaacgtttctgggttaaattccatttccgttgccaacaaggcatcaaaaacttaatggatgatgaagcggaagctctagtaggtaaagatagagaaagctctcagcgtgatctttttgaagccattgaacgtggtgattatccgcgttggaagttacaaattcagatcatgccagaaaaagaggcatcaactgtgccttataacccatttgatttaaccaaagtttggccacatgctgattatccactcatggatgtcggttactttgagttaaaccgtaatccagataactacttctctgatgttgaacaagctgcatttagccctgcgaatattgttccaggtattagtttctcaccagataagatgttacaaggtcgtctattctcttatggtgatgcacatcgttaccgtttaggcgttaaccatcatcaaatccctgttaatgccccaaaatgcccattccataattatcatcgtgatggtgctatgcgtgttgatggtaatagtggtaatggtattacttatgagccaaatagtggcggtgtgttccaagagcaacctgactttaaagagccaccactttctattgaaggtgcagccgatcactggaaccatcgtgaagatgaagattatttcagccaacctcgtgcactgtatgagctattaagcgatgacgagcatcaacgtatgtttgcgcgtattgcgggcgaattatcacaagcaagtaaagaaacacaacaacgtcaaatcgacttatttaccaaagttcatcctgaatatggcgctggcgttgaaaaagcgattaaagtgttagaagggaaagacgctaaataa

SEQ ID NO: 314733 - DNA, 1425 bp, Proteus mirabilis
atggcaacagtagttaattttacacaatggccgtggcatcactgggcgcagcttaacccaaatgaaacggccatcatattcggtgattcacctataacatggcaacaattaagttgtcatattaatcaattggcgaaccatttagcgaaacagggtgttaatactaaaagtaccgtgttgctacgtggtaaaaatcatatccatgttgtttttacgctacttgctgtttttcaatgcggtgcaaaagtattaccgttagatcctcagctccctaagtctctacttgatgatttattaccccatttaaacatcgatttttatgctgatttaagtggatcaacacttgagttagatgcgaggttactcgatctttcaggtgtcgaattcaataacaaatcacatcaagataaaaataacatggcaggtgttgcatggacatcttctcgtatggcaacactgatcttaacctctggatcatcaggtttacctaaagccgcagtacatacttttcaagctcatctttgtagtgcagaaggtgttcttgaattgataccctttgaaaaaagcgacagttggttattgtctttacctctctttcatgtatctgggcaaggaattctttggcgttggttattacgaggcgctaccttggtagtgcgtaatatgcacccctttattgctgctttgcaaggctgtactcatgcttctttagtgccaacgcaactttggcgtttattacaaaatacacaacaggatagttcgcagcccatcacattaaaagcagttttattagggggagcgatgatcccaactgaattaacccaatgtgcggaaagtaaaggtattcagtgttggtgtggttatggcatgactgaaatggcctctactgtttgtgcaaaacgcgcagatggtaaagcgggagttggtacgccattaaagggtaaagcggtcagattagtggataatgaaatccagatcaaatctgatagtgttgcattaggatattggtttgatggtcaattaaagccgttatcacagactcaggatgattggtatgcaacacgggatagaggttgttttaaagagggggaatggtgcattttagggcgattagataatctgttttttagtgcgggtgaaggtatacagccagaagatattgaaaaggtgctaaatagtcacccgaatgttcgccaaacatttattgtcccgattgacgatattgaatttggtcaacgtcccgttgctgttgttgatactgatattgagacaattaatcaattaccacaatggtatcatacgcgtttagcaggctttcaacgtcccatcgcttgtttactattaccagaacagctaaagagtggggggatcaaaatctctcgtaaacaagtgcaacagtgggtgaaagggcaacaagtaaattga

SEQ ID NO: 314734 - DNA, 972 bp, Proteus mirabilis
atgcgaaacgccaaactctattcattcagcctgccaatggaggcaggtgttgttctgcgctaccaaagattaaaaacgcgagatggttttcttgtctgtttagagcaaaatggcaaacaaggttggggtgaaatttcacctcttcctgagtttagccatgaaacgttagaacaagcacaagatgccgcacaatcttggctagcagcttggtgtctaggtgaaaatcctactgacagtgaattgccaagtgtcgcttttggtattagttgcgcattagcagagcttgaaggcactttaccagaagaagccaattatcgtgccgcacctttatgcaacggtgatcctgatgacttaattttaagtcttaatgaaatgagcggggagaaagttgctaaagttaaggtcggtctgtatgaagctgtacgagatggtattgtcgtcaacttattactagaggcgagccccgacttaaaactaagacttgatgccaatcgcagttggacgccagctaaagcagaaggttttgccaagtacgtgaacccacaatggcgcgaccgcattgcatttttagaagagccatgcaaaaccccagaagagtcactcgccttttcacaagcaacaggtatcaatattgcttgggatgagactgtacgtgatgaaggttttgaagtgaaagctcaagagggtgttacggcgattgttatcaagcctacgctagtaggaagtcttgctcgttgccaatctatcgttgaacaagcgcatgctttaggtctagaggcgattattagctcgagtattgaaagtagctttggattgacacaactggcaagagtggctcagtggttaacgccagattctattcccggtttagataccgttgatcttatcaaacaacaacttattcgttgttggccagatgtagatattccgcttatcacgcttgaacagcttaagacagtatggcaacagtag

SEQ ID NO: 314735 - DNA, 858 bp, Proteus mirabilis
atgctttacccgagcgaagaaaagctatatgcaccgattgaatggcaggattgttctgaaggttttgaagatatcctctaccacaaatctgtcgatggcattgccaaaattacgattaaccgcccgcaagtgcgtaatgctttccgtcctttgactgtgaaagagatgatccaagcattagccgatgcacgttacgatgactcaattggtactattattcttactggtgctggcgaaaaagcgttttgtgccggtggtgaccaaaagatccgtggtgactacggtggataccgtgatgaaagtggcactcaccacttaaacgtattagatttccaacgccaaattcgtacttgtcctaaacctgttgttgctatggtggctggctactccattggtggtggtcatgtcttacatatgatgtgtgatttaaccattgctgcagacaatgccatttttggtcaaactggtcctaaagtaggctcatttgatggtggatggggtgcttcttatatggcacgtattgtcgggcagaagaaagctcgcgaaatctggttcttatgccgccaatataatgcgcaagaagcattagatatgggattggtaaataccgttgttccttatgcttctcttgaaaaagaaacggtacgttggtgtcgtgaaatgctagaaaatagcccaatggcactacgttgcttgaaagcagcattaaatgctgactgtgatggtcaagcgggtctgcaagaattggctggtaatgcaaccatgctgttttatatgacagatgaaggtcaagaaggacgtaatgcttttaatgaaaaacgtcatcctgatttcactaaatttaaacgtaacccataa

SEQ ID NO: 314736 - DNA, 768 bp, Proteus mirabilis
atgactttagcttgtaggcaatataacacgcataacgaagggccatggttagtttggttgcatggactattaggagacagtcatgagtgggagaccgtcattaaggcttgccatgaatatccctcactcgtgattgatttgccccgtcatggtaactctgcctctattggggtaaataattttgtcgagatgagtgcattactccatgacactttaaaagaatacgatattaatcattactggctgattggttactctttaggtggcagaattgcgatgtatcacgcatgttttggtgaaacatcgggattaatgggattgattgttgaagggggaaacccaggtttatatgatgcaatagaaagacaaaaccgtattgcacatgataaacgttgggccgcgcgttttcgcaatgaacctattaatgatgtattaacgcaatggtatcaacagcctgtctttgctgatttaagcgatgaaacgcgtcagttattagttgaaaaacgcagtagtaatgcaggtttttgtattgcggaaagtttagaaacactctctttaggccatcagccttggttagttgcagaattacaacaactcaccttaccctttatttggttgtgtggtgagcaagataaaaaatttcaatcaatagcgcagcaatattcgctgccattaacgactatcccgcaagctggtcataatgcccatcaggcacagcctgatgcttatgctgcggtgataaaccatgtattatccctctttggttaa

SEQ ID NO: 314737 - DNA, 1686 bp, Proteus mirabilis
atgtctaatagttcgtttaatcgccaatgggctaaagttatactggaaactttgactcgtcatggtttacgtcatatctgtatcgcacccggatcacgttcaacgcctttaacgcttgcggcagccgccaatcataaacttatttgtcatacgcatttcgatgagcgtggtttaggtcacttagcattaggtttggcgaaagccactcaacagcctgttgctgtgattgtcacctcaggtactgcagtggcaaacttatacccggctttaattgaagcgggacttactggtgaacgggtgatttttctcacggcagatagaccgcctgaactgattaattgtggcgccaatcaggctatacgccaacaaggtatttttgccagccatccctcagaaacactctctttaccacgccctacagcagatattcctgctcgttggctggtttctacattagataatgccatgaataatcttgtgcatggtgctttgcatgtaaactgcccttttgcagagccattatatggtgatgatatagagcatgacacaccatggacacaagcattaggaaagtggtggcaaagtgataaaccttggttacaagaaacgctttctccctctgtgactacacaccctcaatgggatcgactacgtcagaaaaaaggggtcgttattgctggacgtatcagtgcgaaagaggggattgccgttgccaaatgggcctcacaattgggatggcctctgttaggtgatgtgttatcacaaactggacaaccactaccttgtgctgacttatggctaaataatccacaagtgaaggctgaattaaaccaagcagaaatagtgatccaatttggctccagtttaacaggcaaacgcttattacaatggcaagcgaattgctcaccgcaaatgtattgggtgattgatgctattccgggacgtttagatccggggcatcatcaaggggagaagtttaccttatccccgagtcaatggttaacggcacatcctgctattgataatttaccttgggcgttgtcattaagtcatattgctacacaaacttatcaacatgttactgaagtaacagactattttggggaagcacaagttgctcatcagttagatcatttacttcctcacaatgggcagctttttgttggcaatagtttaattgtgcgcttaattgatgcttttgcacaattgccacagggctatcctgttatgagtaatcgtggtgctagtggcattgatggattactttcaacctcagcaggtgttcatcgagccactcaaaaaccgacgttaactatcttgggtgatttatcggcattatatgatttaaatagtttggcactacatcaacaagtctatgccccaaatgtggtgattatcgtcaataacaatggtgggcagatattctctatgttaccgacgcctatagcagagcgagagcgtttttactgtatgccccatgctttaaattttaaacatgctgctgccatgtttggtttagattatgttgcaccaaactgttgggatgatctgtttactacagtgactgcatgttggcagggggaagccaaaacaacattaattgaattgattgtcaatgaaactgagggtgctgaaaccttaaatcagttggtaaaacaggtaaccgcttatgactttagcttgtag

SEQ ID NO: 314738 - DNA, 1329 bp, Proteus mirabilis
gtggaaaaggttaatcctgtgttttcgacactgtacgaaaaagttaaaaatataaatctgacagcacaagatgatcttttacatttgaaagttatcttgccatcagaggtgtcattttccttactttcatggctagcagcacaaacgtattacccgcaattttattggcaacatcgtgatgaaagcgaagaagtagccgcttgtggacaagttaagtgctttaatcatatccgtgatgctcatcgatttttagcaacacatcggcattcattgcatactgatgatgtgcgtatttggggattaaacgcgtgggataccattattccagggcgtattgataaagaaaagggggatgatgcttacctttttttacctcgtattgaaataagacgtcagcaacaactgtcgatccatattaatttattggcagaagaagataagcaaagtgcgcttgcttttattcgctcacttaaaaatgcactgaatattgcacctttatctgtcaaagtaacatctgtagagcactcgttaacgcaacagcaatggactgactatcttaatattgctttagatgaaatcaatcaaggcgtatttgaaaaagtagtacctgcacgggcaacctgcttaagcttagataatccgttaaaagctattcaatttatgaaagcaagtcgagatgttaatcatcattgctatcattatatgctggctttttcacctactgatgcttttatgggctcatcaccagaaagattgtataaacgcgatgaatttgtgctttataccgaagcgttggcgggcactgtggcaagttctgataatgaacaacaggccagagcatttgctgattggctaatgaacgataaaaaaaatcaacatgaaaatctggtggtagttgatgatatttgtcagcgattacaaggtgggatagaagggattgatgtgtcgtcagcagatgtgatccgcttacgtaaagtgcaacatctgcgtcgctatatccacggtaaacttatccatgctgatgatgtggattgtttacagcgtttacaacctaccgcggctgtttgtggcttaccgcgctctattgcgcgcacttttattcgtcaacatgaaccttttgaacgccgttggtatgctggctctgcgggctatttgtctttgcctcatgccgaatttgcggttagcctgcgttgcggtgaattgcatgatgatgcattaacgctttatgcgggcgcaggggtggttgcgggatctgatcctttgcaagagtgggctgaaattgaaaataaagcagcaggtttgcgcactttattagaaaaagagtgttga

SEQ ID NO: 314739 - DNA, 1470 bp, Proteus mirabilis
atgacaataactcctgaacaattgatcgcaatgctaccgctgttagtcgtcatcttgacggtggtggttgtgatgctgtccattgcgtggcgacgcgatcactttactattgccaccttgacagcaactggttttatcatcgctctcggatcactttactacgttaatgcattaggcgtagttgatgtgaccaccctctaccatgtagatggttattccagctttttcacggcattaactattattgctggtttaggtacggttgcttttgcttatccttggttggaaggctatcaagataataaagaagagttttatatgctggtggcgattgctgtcattggcggtattttactctcttctgcgcaccacttggcgtcaatgtttattggtattgaattattaacattgccgttatttggtctgattggttatgctttccaacaacgtccttcactggaagcgagcattaaatatatgctgctttctgcggcggcctcttctttcttgttatttggtatggcactactttatgctgaagcaggaaatctctcctttacggcgatggggcaaagtttaagtgatagcaatatccataaaccattagtacttgctgggttaggcatgatgttagtgggaattggttttaagctctctttattcccattccaattatggacaccggatgtataccaaggtgcaccagcaccaacaggtgcatttttagcgacagcgagcaagattggtatatttgcggtagtgatgcgcttattccttgaagcaccggcggcggatagcgaaacattacgcatgatcttaggctttatggctattgcctctatcctgtttggtaatatcatggcgctgactcagaagaacgtaaaacgtttactcggttactcttctgtctctcaccttggttatttactggttgcattaattgtcttgcaatatagccctatactggcacaagaaaccgctgagatttatttagcaggttatctctttgcaagtttaggtgcatttggtgcgattgctgtggcttctagcccgtacaataaaggtgaattagagtctcttgaagattatcgtgggcttttctggcgtcgtcctgttgctgccgtcgtgatgtcattaatgatgttatcactggcaggggtaccaataacattaggctttattggtaaactgtatgttattcttgctggtattgattcaagtttgtggtggttaacaggcatggtggtgttaggtagtgcgataggtttattctactatctacgtgctgcagctatcgttttcttacgcaaaccagataacgataatgcaccagcggttacgaccacatcacaaaatatggcaacattaattactttagtttgcgccattatcgtgattgtattaggtgtatggccacaaccattgattgagctgacacgttttgcaatcattgcacctgcgataaattaa

SEQ ID NO: 314740 - DNA, 1530 bp, Proteus mirabilis
atgttattaccctggctaatacttattcccttcatcggtggcctgctaagttggcaggctgaacgaatcggctcgcaagttcctcgctgggttgcgttgctgacgatgggattaacactcgttatttctgtgcaactgtggttgcaaggtgactatcaactgattagtgttgatggtgcacctcgctggacagagttttactttgtaccgtggatccctgctttggggattaatattcagtttgcacttgatggcatgtcattattgatggtggtattaactgctattttaggtattttagcggtgctctcttcatggagcgaaaatcaaccatctcaaggggctttccatttcaacctgctgtggatcttagcaggtgttatgggggtattcttagcgactgacttgttcttattcttcttcttttgggaaatgatgttgatcccaatgtattttcttatctctctttggggacataaaggaagtagcgatgagaaacatgttagtgcagcaactaagttctttatttatacacaggcgagtggcctgttaatgttgctggccattatcggtttagctgtcgctttttacagcaaaacaggtatttggacgtttaattatgacaccttactacaagcgcacaccttattaggtagtgaactgcaatttattctgatgcttggcttctttgctgcattcgcagtaaaaatgccaattgtccccgttcatggctggctagctgatgcacatgcagaagcaccaacggcgggctctgttgacttatcaggtattttgctaaaaacagccgcttacggtttattacgttttaacttaccgttattcccagaagcgtctgcattactggcacctgttgcgatgtggctaggcttaatcaccgtattctacgctgcactgttagcattccgtcaaacggatattaaacgtctggccgcttacagtagtatttctcacatgggctttatcgtaattgcgatttatgctggctctgttttggcttaccaaggtgcgattattcaaatgatcaccaatggtttgtctgctgccggtctgtttatcatgtgtggcatgctgtatgagcgtttaggtacgcgtgatatgaatcaaatgggtggattgtggaaaagcatccgtttcttaccagcattttcactgttctttgcggttgcctctttaggtatgccaggaacaggtaactttgttggtgagtttatgatcctatttggtacttatggccactttaagctgatcactattatttcggtctttgggttagtttttgcttctgtctacgctttgtggatgatgcaacaggcttactatggttcaccgaaaacagcagaaagaacctataaagggttaaatctgagagaatttttgatcctgtttatcttggtggttttattggttattttgggcttcttcccacaaccagtattagatacctcgatatcagcaatggaaaatctccagacttggtattccgcttctctttcaacagtaaggctgtaa

SEQ ID NO: 314741 - DNA, 1836 bp, Proteus mirabilis
atgaatatactctatttaacctttgtgctaccactgctgggatttttactgctcgcattctcaggtggtcgttggtctgaaaatgtatcagcatggattggcacgggcgctgttggtttatcagctttagtgacactttgggtggggatagatttctttgctcacggacaagaaacagaagtcttaacactctggacttggatgtcagcggggaactttactatcccatttacgttggtgcttgatggcctatcattaaccatgctaggtgttatcactggcgttggttttcttattcatatgtatgcatcttggtatatgcgtggtgaagaaggatattctcgcttctttgcttataccaacttatttatcgcgagtatggttgttttagtattggctgataatatgatgctgatgtatatgggttgggaaggggttggtttatgtagttacttattaattggtttctactataacaacccagctaatggcgcggcagcaatgaaagcatttattgttacccgtattggtgatgtcttcttagctatcggtatgtttatcctgtttgatcaattaggtacgctaagtttccgcgaaatggcggtactggctcctgaacaactgaccgcaggatcaagcatcattaactgggcaatgttaatggtcttagggggtgcggtaggtaaatcagcacaactaccattacaaacttggttagcggatgcgatggccggtccaacacctgtttctgcgttgatccacgccgccaccatggttaccgctggtgtgtacttagttgctcgtagtaatgcgctattcttaatggcacctgatatcttagaattagtcggtatcgtcggtgcagtgacattagtattagcgggttttgcggctttagtacaaaccgatatcaagcgtattcttgcttactcaaccatgagccaaattggttatatgttcttggcgttgggggctcaagcatgggatggcgcaattttccacttaatgactcacgcgttctttaaagcattactgttcttatctgcaggttcagtgattattgcctgtcaccatgaacagaatatctttaagatgggcgggttacgtaagaagatcccatttgtttatgcatgctttttaattggtggaggtgctttagcggcattaccactgttaacagcagggttcttcagtaaagatgaaatcttatggggtgcgtacgcaaacgggcatttcaatttaatgttagcaggtttaattggcgcattctttacgtcactttataccttccgtttaattttcatcgtattccatggtgaaaccaaaaccgaagcacaccaagttaaaggtttcactcatactttcccattagcggtattagcgttgttatcaacctttattggggcgttaattacccaaccgttaggcgatgttttcccagaaagcaccgttactcatgaaggtaagtatgtattagaaatcctttctggtgtggtagcgattgtaggcgttgccattgcagcatggttatacctgaaacagcgtcaacttgtttctcaggtggcaaataccaaaacagggcgtttcttctcaacatggtggttctacgcatggggatttgatgcactgtatgaggtgctgtttgtcaaaccttataaaggtgcggcatggcttatccaaaatgatcctgttaaccaattctttaatctctttggttgtctctttaaaggcgccaataaaggcttgagtttcagtgaaaacggattagcgcgttggtatgcggcttctctcggtttaggtgcagtgctggttatcgctctgctgcttctggtttaa

SEQ ID NO: 314742 - DNA, 303 bp, Proteus mirabilis; identical to SEQ ID NO: 293616

SEQ ID NO: 314743 - DNA, 534 bp, Proteus mirabilis
atggaatttgcattttatattgcaggactgatttcaatccttgccactttgagagtaataacgcataccaatccggtacacgcactgctgtatctgattgtttcattaattggcctttcagtggtgttcttctcgttaggtgcctattttgcaggtgctttagagatcatcgtttacgccggcgcgattatggtgctattcgtattcgttgtgatgatgcttaacttaggaaaatcggtcgttgagcaagagagaaaatggttacagcctagattttggatagggccggcgattttgtctctggtactgttaattgtattggtttatgcaattagtagtgtcactcatggtgagattagtggcgagattattggggcgaaagaagtcggtattagcttatttgggccttatattctggctgttgagttagcctccgttctcttattgtcaggattaattgttgcttatcacatcggtcgtgatcagagccatgacgatctcgtcgaaaacgaaaaagtaggggagccaaaatga

SEQ ID NO: 314744 - DNA, 543 bp, Proteus mirabilis
atgactttaaaagagttagtgactggtttcggcacccaggtacgcagcatttggatgattggcttacacgcctttgccaaacgcgaaacgcagatgtacccggaagaacctgtcaatgttgcaccgcgttatcgtggacgtatcgtattgacccgtgatcctgatggtgaagagcgttgtgttgcttgtaacttgtgcgcagcggtgtgccctgttggttgtatctcattacaaaaagcagaacatgaagatggtcgttggtatcctgagtttttccgtatcaacttttcgcgttgtatcttttgtggcttatgtgaagaagcatgtccaacaacggctctacaattaacccctgatttcgaaatgggtgaatttaagcgtcaagatctggtttatgaaaaagacgatttattaatttcagggcctggtaaatatcctgaatataacttttaccgtaaaacaggtatggcgattaatggcaaagataaaggtgaagcagatgatgaagcgaaacctatcgatgtcaaaagcctgttaccgtaa

SEQ ID NO: 314745 - DNA, 978 bp, Proteus mirabilis
atgagctggttatctcctgaagttacagagattttactcactgttttaaaagccgtggtgatcttgctggtggttgtcacttgtggtgcttttatgagtatgggggagcgtcgtctactgggattattccaaaaccgttatgggcctaaccgtgtaggttatgcaggttcagcacagttaattgcggatatgatcaaaatgttctttaaagaggactggatcccaaaatttgctgatcgctttatctttaccatagcaccagtgattgccttttcttccttattattgtcatttgctattgtgccagttagctcaacctgggttgtggctgatttaaacatcggtattttatttttcttgatggtagcgggtttagcggtgtatgccgttttatttgctggctggtcaagtaacaataaatattcgttattaggtgcaatgcgtgcttcagcacaaacagttagttatgaggttttcttaggactttctattttaggtgttgtggcacaagcgggttcgtttaacttaacggatattgtcaattcgcaagcccatatgtggaacattatcccacaattctttggctttattacctttgcgattgctggcgttgccgtttgtcaccgtcatccttttgaccaacccgaagcagagcaagagttggctgatggttatcacattgaatattccggtatgaaattcggtctgttctttgtcggtgaatatatcggtatcgttgccgtttctggcttaatagtgacgttattcttcggtggttggcaaggtcctttcttaccgtcattcgtttggtttgcactgaaaacaggattcttcatgatgatgtttattctgatccgtgcatcattaccgcgtccgcgttatgaccaagtgatggcttttggttggaagatctgcttaccgttaactttaatcaatctgttggtcactgctgcagtgatcctctacaacgctcaataa

SEQ ID NO: 314746 - DNA, 2733 bp, Proteus mirabilis
atgctgactatggctacgattcatgtagacggcaaagaatatgaagttaacggggctgataacctgttagaagcctgtcttaatttaggcttagatattccttatttttgctggcacccagcgctgggaagcgttggcgcttgccgccagtgtgcggttaagcagtatcaaaatgctgaggatacccgcggtcgtttggtaatgtcttgtatgacacctgcggctgatggcacgtttatctccattgatgacgaagaagcgaaaaaattccgcgaaagcgttgttgaatggtatatgactaaccatcctcacgattgtcctgtttgtgaagaagggggaaactgccaccttcaagatatgaccgttatgacaggtcatactatgcgtcgctatcgctttactaagcgtacacatagaaatcaagagttagggccgtttatttctcatgaaatgaaccgctgtattgcttgttaccgctgtgttcgttactacaaagattatgctgatggcactgatctgggtgtctttggtgcacataacaacgtgttctttggacgggttgaagatggcacattagagagcgaattctcaggtaacttagttgagatttgtccaacgggtgtctttactgacaaaactcactcatcacgttataaccgtaagtgggatatgcagtttgccccaagtatttgccaaggttgtagtatgggttgcaatatcagcccaggtgagcgctatggtgaattgcgtcgtattgaaaaccgttataacggtacagtaaaccgttacttcctttgtgatcgtggtcgttttggctacggttatgtcaatttagcgagtagacctcgtcaacctaaaaaacgtttaggcagtaactggcttgaaatcagtgcagcacaagcaacgcaagccgctgcagaaatgctgaagaaagggcaacgtgttgtcggtatcggctcaccacgagccagtattgaaagcaactttgctttacgtgaagtggttggtgctgaaaatttctatagtggtatttcggctgccgagcaggctcgcttgaccttaatgctggatattttacaaaaaggtggcgtttatactccatctctccgtgagattgaagactatgacgcagtactggtgttaggtgaagacttaacacagacaggtgctcgtatggcactgtcagtacgtcaagccgtaaaaggtaaagcacgtgagatggcagccgcacaaaaagtggctgattggcaaattgccgccatcatgaatatcggtcaacgggcgaaatatccactatttgtcacccatgttgatgaaactcgtctggatgatgttgccgcttggagttatcgtgcgccggtggttgaacaagcgcgtttaggttttgccattgctcatcatattaatggtgaagcccctgcggttgatggcttagatgaagcattgaataaacagattgacatgattgttcaagccttatcgcaagcgaaaaaaccgttaatcattagtggtagtcatgccggtagcgaagaggttatcaaagcggctgctaatatcgcttttgccttaaaagccaaggggagcgaagttggtctctcttatgtggcagatgatgccaatagcatggggctggcgatgatgaaagcgaaaccactggatgacgcattgaaagtgatgcgtagtggtcaagcagatagcgctattgtgatggaaaacgacttgtatcgccattttgccgccgacgtcattgatgacgcgattgctaaagtggatcacctaattgtgattgaccatcagcaaactgagatcatggaaaaagcacaccttgtgttacctgcttcctcctttgctgaaagtgatggcactatggtgagtcaagagggcagagcgcaacgttacttccaagtgtttgaaccttctttctataacaaagaagtggtgatgcatgaaagttggcgttggctaagtgctgttgattcacaatggcatgaaggtaatcttgactggacgcagttagatcatgtgattgagctatgtgcaacgcgtctaccgcaatttgccggtattgtgaatgcggcacctaatgcatcattccgtattcgtggtcaaaaattagcccgtgaaccgcatcgttatagtggtcgtacttccatgttggcaaatgtttcagtacatgaacagcgtcaacctaaagatatcgatagcccatttgctttctctatggaaggaaacaacagtccaacggctcctcgccagcaaattccatttgcatgggcaccgggttggaactcaccacaagcatggaataagttccagtctgaagtcgggggaagcttacgttttggtgatccgggtgtacgcttaatcgaatgcagtgataacacattaggttatttcactgatattccaccagcctttaacctagttgaaaatcaatgggttgtagctccttactatcgtctgtttggtagcgaagagttatcgcaacgttcacaagtgatccaacaacgtatggacaacgcttatttaaccgtgagtgaatctgatgccatcgcattagcattatctcaaggtcaacaagcgatgtttacttacgaaggtcgtgaattcaccttacctgtgaaaatcagtgctcacttaacccgaggtcaaattggccttccgttagggatggctggcatttcgccatcactggtgggtgtatcggttcgtcaactgcggggtattgcataa

SEQ ID NO: 314747 - DNA, 1365 bp, Proteus mirabilis
atgacagcaatttcaggagcaaaaccgattattcgtagcgcagaaacgcatccgctaacgtggcgcttacgtgatgatcgtcagccagtatggctggatgaataccgtgcaaaaaacggttataaagcggcagaaaaagcattaaaaagcatggcacccgatgaggtgacctctgaagttaaagatgcaggcttaaaaggacgtggtggtgctggattctcaacaggcttgaaatggagcctgatgccaaaagatgaaagtatgaatatccgttacatcctttgtaatgcagatgaaatggagccgggaacctataaagaccgcctgttaatggaagaactgccacatctgttaatcgaagggatgattatcggtgcgcatgcactgaaagcttatcgtggttatattttcctacgtggtgaatatattgaagcggctaagcacctgcgtcatgctattgaagaagccaaagcagcgggttttttaggcaaaaatatcttcggctctggtatcgattttgagctatttgttcacacaggagcaggtcgttatatctgtggtgaagaaacagcactgatcaactcactggaaggtcgtcgtgctaaccctcgctcgaaaccgccattccctgcaacctccggtgcttggggaaaacctacctgcgtgaataacgttgaaacgctgtgtaacgtacccgcgattattgagcatggcaaagattggtatatcggtttaagcgccggtaaaagtccagatgcaggtactaaattaatgggattctctggtcgcgtgaaatatccaggcttatgggaattaccttttggtactacagctcgtgaaatcttagaagattatgcgggggggatgcgtgatgggctgaaattaaaagcttggcaacccggtggtgcaggaacggatttcttaacagaagatcatctcgatctccctatggattttggcacgatcgccaaagctggtagccgtttaggtactgcgttggcgatggcggtagataatgaaattaacatggtttcattaacccgtaacttggaagagttctttgcgcgtgaatcttgtggctggtgtacaccttgtcgtgatggcttgccatggagtgtcgaaatcttacgcgcgatagaaaaaggtcaaggtcgtcctggtgatattgagactcttgagcacctctgccgctctttaagcccagggcatacattctgtgctcacgcaccaggggcagtagagcctttacaaagcgcaatcaaatatttccgtgaagaatttgaggctggcattattcaagaagactataccaatgccaatcttatccgtggtattcagcctaacttgctgaaaagccgctggtag

SEQ ID NO: 314748 - DNA, 546 bp, Proteus mirabilis; identical to SEQ ID NO: 293610

SEQ ID NO: 314749 - DNA, 1797 bp, Proteus mirabilis
atgaccgatcagatagcgcaaaatagcgcacggccagcgtgggaaaccagcgatcatattgatgatcaggtggttaacgaactgcgtcagaaatttgggccagatgcgtttacattccagccgactcgtaccggcatgccagtggtatgggttaagcgggaacaacttattgaggttatgcaatacctcaaatctttaccaaaaccatatgtcatgctgtacgacttgcatggcgttgatgagcgtgtacgcacgcatcgtcaaggcttgccggcagctgatttttccgttttctatcatctgatatcactcgatcgtaataaagatatcatgctgaaagtcgcattaagtgaaaaagatcttaatctaccgactctcacttctatctttccgaactcgaattggtatgagcgtgaagtgtgggatatgtttgggatcgtctttaacggacaccctaatctacgccgtattatgatgttgccgaattgggaaggtcatccactgcgtaaagattatcccgctcgggcgacagaatttgatccttatgtgctgactaagcagaaagaggatctggaaatggaatcactgacctttaaaccagaagagtggggaatgaaacgcggtactgagaatgaggactttatgttcttaaacctcggtcctaatcacccatcttctcacggtgcattccgtattattttgcaacttgatggcgaagaaatcgtcaactgtgtacctgatgttggttatcaccatcgtggtgcagagaaaatgggcgagcgtcaatcatggcatagttatattccttataccgaccgaattgaataccttggtggttgtgttaacgaaatgccttatgtactggcggtggaaaagcttgccggtattgaagtacctgagcgcgttaaagtcattcgtgtcatgctgtctgagctatttcgtattaatagccatttactgtatatcagtacctttatccaagatgttggtgcgatgacaccggtattctttgcctttactgatcgtcaaaaagtttacgatattgtggaagcaattactggtttccgtatgcatccggcatggttccgtatcggtggtgttgcccacgatttaccaaaagggtgggaacgcttactacgtgaattcttagattggatgccaaaacgtcttgattcttacgttaaagccgccttgcaaaacagcattttaaaaggccgtaccattggtgttgcctcttataacgctaaagaagcgttagattggggggtaacgggtgccgggcttcgtgctacaggggttgagtttgacgtgcgtaaatggcgtccatactcagggtatgaaaactttgagtttgaaattccagtggcaagcaatggtgactgttacgatcgtgtcatgctgaaagtcgaagaattacgtcaaagcttacgtattctcgagcagtgctataaaaatatgccagcagggccatttaaagccgaccatccactgacgactccgccaccaaaagagcgcacattacagcatattgaaaccatgattaaccacttcttacaggtttcatggggccctgttatgcctgcgaatgaatcattccagatggtggaagccactaaagggatcaacagctattatttaaccagtgatggcagcacgatgagctatcgtacgcgtattcgtacgccaagttttgctcacctgcaacaaatcccagcggttatccgcggtagtctggtttctgacttgattgtctatctgggaagtatcgattttgtaatgtcggatgtggatcgttaa

SEQ ID NO: 314750 - DNA, 675 bp, Proteus mirabilis
atggattatacgctcacccgcatagatccgaacggtgagaatgaccgttatcccctgcaatcacaggaaattgtcagtgacccgttagatgctcacgttcatcgcagcgtgtatatgggaaaactggaacatgcgttacatgacgttgtgaactggggcagaaaaaactctttatggccatataattttggtctttcctgttgttacgttgaaatggtgacgtcatttactgcggtccatgacgtagcgcgttttggttctgaagtattacgagcttcccctcgtcaagctgactttatggtggttgcaggaacctgctttacaaagatggcgcccgttattcagcgtttatacgatcagatgctagagcctaagtgggttatttccatgggagcttgcgctaactctggtggtatgtatgacatctattcggtagtgcaaggtgttgataaattcatccctgttgatgtgtatatcccaggatgcccacctcgtccagaagcttatatgcaagcattgatgttattacaagagtccattggtaaagaacgtcgcccattatcttgggtggtgggcgaccaaggcgtttaccgtgccaatatgcagtcagaacgagaaagaaaacacggtgagcggatcgcagtaaaaaatctgcgtactccagacgaaatttaa

SEQ ID NO: 314751 - DNA, 453 bp, Proteus mirabilis; identical to SEQ ID NO: 293607

SEQ ID NO: 314752 - DNA, 918 bp, Proteus mirabilis
atgattaatgcaaatcgtccgataatgaatctcgacctcgatctgcttagaacgtttgttgctgtagcagatttgaatacttttgcagccgctgcggccgctgtatgtcgaactcaatctgcagtcagtcagcagatgcaacgtttagagcaattagtcggcagagaactctttgcccgtcatggtcgtaataaactgttaacagagcatggcttacaattattaggctatgcacgtcaaattctccgtgctaatgatgatgcaactgcttcattaacatatagcgatgctgaaggtgagttacgtattggtgcatctgatgactccgtcgatacactattaccatttttgttaaatcgtatcgcatcagtatatccacgtttagcggttgatgtgcgtattaagcgttctcaatttattgagactatgcttgataaccacgaaatcgacttagcattaaccactgcacgtattggacatcatccacgcacagcgttacgtacagcacctgttttgtggcattgtgcccctgatttccaattacaaatgaatgagcctattcctttagtagtcatggacgaaactaacccattccgtcagttggcgacaaatacactagatgacgcaggtattcaatggcgtattgcgtatgaagcggcttctttatctgccgttcgtgctgctgtaaatgccgaagtggggatcacagctcgtccattagaaatgcaaaatgctgatttacgtatattaggcgaaagcgaagggttacctcgtttgcctgagactcagtactggttatatcgtaattttgatgagcaaaacgaagctgtattaacggtattcaatgccatcgaaaataagaaaacgccttatactgtcacttcagttgaagaagcgcattctttagatttagagtaa

SEQ ID NO: 314753 - DNA, 582 bp, Proteus mirabilis
atgagttacttttttgcccacctttctcgtttaaagctaattacacgctggcctctgatgcgtaatattcgccaagaaaatgtctctgagcatagtttacaagtggcttttgttgcccatgcattagcggtgattaaaaatcgtaaatttgatggcaatgtcaacgctgagcgtattgcactacaagcaatgtatcatgatgccagtgaggttatcaccggtgatatgccaactcctattaaataccacaatccacaaattgctcatgaatataaaaaaatagaaaaatatgctcagcaaaaattgattgaaatgttacccgaagagttacaagaagattttcgccctcttatcgatgagcaattacatagtgaggaagaaacttttattgtcaaacaagctgatagtttatgtgcctatttaaaatgccttgaagagttagctgcgggtaatagcgaatttaatttggccaaaaatcgtttagaaaaaacgttagcagaaagacatagccctgagatggactattttatgaaagtgtttgtaccgggctttagtttatccctagatgagatcagtgagtaa

SEQ ID NO: 314754 - DNA, 1830 bp, Proteus mirabilis
ttgaatagcgaattattatgggttttaagcctgctattgatagctattgtcctttttacgaccaacaaaatccgcatggatgtggtcgctttacttgtcatcgtcgcttttgttcttagcggcacactctcattaaatgaagccacggtaggatttagcgatccgaacgtattactgattgcggccctttttgttattggggaaggattagtaagaacaggtgtggcatatcaaatgggagattggctagtacgagttgcgggtagtagtgaagtaaaaatgctggtgctattaatgatctgtgttgcaagtttaggggcttttatgagctcgacaggggtggtggctatttttattcctgtggtgctcagtgtggcggcacggatgaaaacttctcccagtcgattaatgatgcctcttggctttgcggggttaattagtggtttaatgaccctagttgcgacaccgcctaatatggtggttaatagtgaattagttagggaagggctacccagttttcagtttttctctattaccccaatagggatcgctgtattagttgcgggtgtgttatatatgctggtggtacgtcgttggttaggttcaagtgaagggggtaagcaaaaagaggtttatcgtcgtacttttcgtgatcttatccgtgattaccaattagcagggcgtgcacgtcgcttagccatacgtaaaggttcaccactgattggtcactctctagatgaattacatttacgctctcgctatggagcaaacgttgtcggtattgaacgctggaggcgttttcggcgtgttatggtcagtgcgacaggaggcactgaattaagagagcgagatgtcctattagtggatatgtcagcaagtgaggtagatttacgagagttctgtcgtgaacaaatgttagagccgatggtgttacgtggagagtatttttctgagcaatctcgtgatgtgggattagcagaagtctctatgaaccctgactcagaattattaggaaaatcattaagagaaatcaaattccgtacacgttatgggctaaacgttgtggctattcgccgtgaagggagtgctttaccggggaaaattgttgatgagccattacgtctgggagatgtgttactggttattggtgattggaaattaattcgtatactttcgacaaaaccgcgtaattttattgtattaaatttagcggctgaaattgatactgttgcaccggcctcatcgcaagcaccacatgcacttttttcattagcattaatggttgcattaatggtgaccaatgaagtacctaactttattgccgcgttaattgcttgcttattgatgggaaaatttcgctgtatagatatggaaagtgcttatcgttctattcattggccaagtattatcttgattgtcgggatgatgccttttgcggctgcattgcaaaaaactgggggtatcgagcttatcgttaatggacttatggatgtagcagggaatgctgggccacaggttatgttagtctgtttatttgtactttgtgccactattggtttatttatctctaatacggcaacggcggtgttaatggcaccgattgcaatagcagcggcccatcaaatgaatgtctctccgttaccttttgcaatggttattggtgttgctgcatcggcggcgtttatgacacctgtatcatccccggttaataccctgatccttgagcctggtggttataaatttgctgattttattaaaataggggtgccttttaccattattgtgatgttgattagcgttttcttaataccgctattattcccattttaa

SEQ ID NO: 314755 - DNA, 663 bp, Proteus mirabilis; identical to SEQ ID NO: 309828

SEQ ID NO: 314756 - DNA, 498 bp, Proteus mirabilis
atgatggaaatgacacacgcacaacgcttgatcctctctaatcaatataaaatgatgaccatgatggatcctgataacgctgaacgttatcgtcgctatcagacaattattgaacgtggttatggattacaattacgtgaattagaccgcgattttgatgagatgtcagaagagacctgccgaaccattattaacatcatggaaatgtaccatgcattgcaagtttctcgagaaaatttaaaatcaccagaaatgccggatgctcgtcgagtggcatttatgggctttgatgcagcaacagaatctcgttatcttagctatgtacgctttatggtcaatactgaagggcgatatacgcattttgatagtggtagtcatggttttaactctcaaactcctatgtgggagaaataccaaagaatgctggctgtttggttagcctgtccacgtcaatatcacctaagcagtgttgagatccaacaaatactgaatgcgtaa

SEQ ID NO: 314757 - DNA, 456 bp, Proteus mirabilis
atgaacgaaccgacagtgactcccccaggtttcttcaaaaagttacgcctagggaacgagtatctaaaaacctggccggttgagaagcaattagccccagtttttcctgaaaatagaatgataaaagcaacgcgttttggcatacgttatatgcctcctatcgctatttttacattaacctggcaaattgcattaggtggcgatttggggccggcgatcactactgcactttttgcctgtagcctgccaatgcaaggattatggtggttaggaaaacgcgctgcaacgccattacccgcggtgttactcaattggttttatgaaattcgtgaaaaatttgagcaagcgggtattgcattagccccagtagaaaagacgccaacctatctctcattagcgcatttgcttaaacgtgcttttaagcaacttgatcgctcttttcttgatgatgtgtag

SEQ ID NO: 314758 - DNA, 141 bp, Proteus mirabilis
atgttgaataataacaattttacaataatgtctgttgaccaatttcccattattaccatgcaggttttcccagaaacgttagagcatgctaataactggattgctgaaatggacttagtgcttgctcaaaaacaaaactga

SEQ ID NO: 314759 - DNA, 216 bp, Proteus mirabilis
atgaaagccgttagacgctggctgaaaacagggaaaatgccattaagtcaatattgtgctggaatgatcatgaccgtcaatcaacaaacaaatgataaagagcaactgatgcagttatctcccgttgtttctgcggtgtacggtgtacctatctttgttgaagaaacccttgatggggcttatgctcaagctaataaacttctgggcaataaataa

SEQ ID NO: 314760 - DNA, 279 bp, Proteus mirabilis
  misc_feature (230)..(239): n is a, c, g, or t
atgaatagacggtatttgttattactatttttatgttgcttacttcctttattaaacggttgtaaggatcaatcactgctcactaatttaagtcaaaggcaagcaactgaaattcaagcggtgttacagaaacaccaaataacaagtactcgtactgcgttaggaaaaggattatttgagatctcagttaaaaaggaaaatatagggattgctattcaaatattagaagnnnnnnnnnntattagaagaatatcaattaccaacaatttctcgtattga

SEQ ID NO: 314761 - DNA, 333 bp, Proteus mirabilis
atggtcatgttcatggtgaagatgaaggtcatgagtgttgtggcggacatggccacggtgaagaaggcggatgctgtggtggtggtcatgatcacgatcacggtgaagaaggtggatgttgtggtggcggtcatggaaaaggtggtcacggccacggtcatggcggttgtggttgccaacattaatcttgtgaaaccattgaaaaaggagcgtgataacgctccttttttgttcttgcctacagtctcacttgaagttaataatgaggtggtggggtctcatcttcagggcgagcgagcattgacgattgggatgacttcaatcgttcggtga

SEQ ID NO: 314762 - DNA, 183 bp, Proteus mirabilis; identical to SEQ ID NO: 310288

SEQ ID NO: 314763 - DNA, 273 bp, Proteus mirabilis
  misc_feature (253)..(262): n is a, c, g, or t
atgaaaaaatcattattttcactattaattctatctatgctttctttatcaacgcaagctattgcaacgaatcatgatttaggaagtaaaacaataaccttaactgccaaggtacttaaacgtattccatcttgtacaattagtgagatagaaccaattgagttaggtgatatttacgatgatatgattggaacacttcgtccaacggcgattagtataagattttctgactgttctaatctaggattagctnnnnnnnnnnggattagctag

SEQ ID NO: 314764 - DNA, 726 bp, Proteus mirabilis
atgcgtattaaaaaatcattaaagcgaaaattgagaaaaagaaaaactctattaagaaaaaagcgtataaacggaaagccgagcgataaaccaaagctaaaattattaccacgatatccatcacaaaaaagaaagataacacacaatttcattaatggtgtgtattcaaaatccatatgttcaaaaatcaacctctccaatattgtctttataaatatcaatttacgaggttccatctttaaaaaaacaaaatttaacgacagtaaatttttatgttctgattttaatggtgttagcttcaattgtattaaatttaaaaacacggaatttaaaaaatgtctattctatggtacgacctttaaaagaagcacttttaataattgtcagttcaaagaatgtatttttataaatataaaggtagagacattaccagcattaaataaaacaaatttagtcttaaaaagacatccgtatatctcattatctactgcttttatagaaaaattgaatcaatttaaaaaaatagagcatttgactaaaagtagattgatacacataaaagggggaaaaattaaccatgctacattttatgctattaccactttatttaacaataaagaagaggctgtaattttgtcgttagagaaagtattcgaaaaacaagggaaaaagataccttatacggtaggaagcctcatcgaaaacctaaaactcattgacaattaa

SEQ ID NO: 314765 - DNA, 447 bp, Proteus mirabilis
gtgctcgacaatatccgtttaacgcagccatcagcctcattagatgaggttattcatgtagctaaattagcaggtgctcatgagtttattttgaaacttcctttagggtacgacacactcattgctgaaaatggcagatctttatctgggggacaatgccaacgtattgcaattgctagagccttactctcatcccctaaaattttaatttttgatgaagctaccagcgcattggatggtgagtctcaagccatcatcgaaaaaaatcttccccttattacccaagataagaccgtcattatgattgctcatcgcctttccacaataaaaaactgtgaccgcattattgtattagaaaaaggccagataattgaagaaggcaaacataatgaattgattagaaaagatggcgcttataagaaactttggcaacatcaacaaggataa

SEQ ID NO: 314766 - DNA, 351 bp, Proteus mirabilis
atgcttcaagaaaatgtagttaaagatatcattgtttggatcgagcaaaacttagattcacgtttatcattagatattattgctgaaaaatcaggctataccaagtggcacttccagcgcttatttaaagcatatacaggaatatctttaggcaaatatgtcctagcacgccgtttatcttgtggcgcttatgcattgaggatcactcgtagtagccttttagatatttctttaaaataccattttgattcgcaacaaacgttttgtcgtgcgtttaaaaaacaatttaatatcaccccttctgaatacaggaaaaagcaaggttgggatattagtgaccttaccttctaa

SEQ ID NO: 314767 - DNA, 291 bp, Proteus mirabilis; identical to SEQ ID NO: 311704

SEQ ID NO: 314768 - DNA, 843 bp, Proteus mirabilis
atggcattaccagagagaagatattacacgttagataaagcagctaaaaaaataggtgataatgttgatgttgttgacctcatacactttgctgctgttggtattattgagctatcaataaagtatgaagaattattaactgaagattatatggaatcactatcgttcagagatgattttatagaaattgttagggaacctgatcctgattcaaagttagatgagttaatagagtttaagaatgattacttacatataatagaatgtattaatggagagcattactcaatatcatatatgaatggtttattaggggttcctggtagcgtgattaattggcatgaactaaatctagttaatgagcctgaatataggttctcatctaatatgtttaattatcctagaagcagagatgggtttacatacacttatcataaagatcctctatggataatgtctagaagggagatttctttgaaaagagatcgcttattaatgactgattatgaaatcgaaaactttttaaacggcgggttgcaaaccgaaaaaaaagaaagtaacaaaagactgataaaatcaatggaaaatagagagctaattagaaaagcaattattaaattattgattaattaccctaatgaccctgatgatagcgttaataattacagaggacgtaacggaaaactaataatcagtcgaatagctaaagctcttgattaccatgaagcaactttatttccagataaaagcctacctataaaagaccctacaactttaaacccaattataagtaacttcttgaaaaataatgaaataaaaagcaggttgaaaaacaaaccatag

SEQ ID NO: 314769 - DNA, 135 bp, Proteus mirabilis
atggcagattggttatttttaattgccgttacatacattttgattatgacggcatcaagtgaatatggcgcgtggtggtctaactttttactatcaatcgtcgctatgtcaataatttacagtcacaaagggtag

SEQ ID NO: 314770 - DNA, 825 bp, Proteus mirabilis
atgtctcagttatacatagtatatctagatgaatttggccatgacggtccattcatatcacatgatcatgagcttcataacactcacccagtattcggactaggtgggtttgtaattcctgctaatagagttcgagacttctctcatttcttctttaagttaaaacaaaatctttttggtaaatatgagattcctgccgcaaggaagaaagaagaagaggctggtggaaaatttcaactgtctaactgggaaaagaaagggtcaaaacagtattctgtagccaacttaaaaaattataaaagctttctgatcggcagcactggacgaattataaacaatataaccaagatgggtggttttttgttttatgttggagaagctaaaaaaaggggaatagagaagcacaatcctcaaggcgtatacaaatccagtctaaaagaagttattaaaaggcttgatgatgaattcaagggccaagacgctcagtttcttatttttatggatgaccatgagataagaaaagaaattgtaaagcgttcgatatatgaaatgcatcaatgcgataagtatcagctgctggaagcacctgttcaggtagacagtaaattgtatcagactattcaatgtgcagattggctttgtgcactgtatggaaagatatcttactttgatgttgagcctgagagtaagccagaatatatattatttaaacaatattttggtgaccgaatagccagagcgcagaagcgaagtaatgtcaggaataacatagacagaccagcgtcgactcaaaagctgactgagctcttaaataaattcaactaa

SEQ ID NO: 314771 - DNA, 651 bp, Proteus mirabilis
atgactggagcacttattgttaataatttagcggggttaatgatgatcacctcgctactggtgataggcgcaagaaagcctattgcttcctgttggttttatgctctgcaatcctttgttttggtgatgatttttgtcactttagcaaatacgctagatgcacatcaactgacactttgggcgataaccgccttctttaccaaagttctactcgttccacttatcttaggatttgccttccgcaaattatccgatccgagcgccaatatcagtgtcattaaaccagcattattgatgttattagccgccgtgattgtgattttatgttggtttgtggttgagccaattcaaatacctatggtggcggaattgaaacctgcattagcggtctctttaggccattttatgctaggtctactgtgtattgtgactcaacgaaatattctaaaacaagcatttggttactgcttaatggaaaacggctctcacttaacactcgctttattagcgtggagggcaccagagttggtagaaattggtatagcaacggatgccatttttgctgtgattgtcatggcagtattggcgcgtaagatttaccgcacgctcaacacactgaacgtggatcaactgaccgcgctgaaggggtga

SEQ ID NO: 314772 - DNA, 1569 bp, Proteus mirabilis
atgaatcaaacaaccatgttaacaatcttaatgtttgcaccgctggtattttcgatattggcatttttaagcccattattgaaagcagcagcacgacctatcgttacaggcattcatactataggtatttttgtcttagtcattgccgcgttaggcactgttgctgatgtgatgtcccatggcgaaatactggcagcagcgaaatgggttcatgttgatagtttaggggcactatttctagccattttaggcatcattggttttttaaccggcctgtattctattggttatatgaatcatgaagtggatgagggcgaaatttctgttcgtactttatgtaactactatggtttcttccacctcttccttttcaccatgttattagcgatcaccagtaataacttgatcttgatgtgggccgcgattgaagccacaacattaagctctgctttcttagtaggaatttatggtcaacgctcttcattagaagctgcatggaagtacattattatctgtagtgtcggtgtcgcatttggtctttttggcacaattttagtttatgccaatgcagcaagctttatgcctgatcctgatcaggccatcttctggacagaagtgttgaaatatacacatcagttagatccaacactgatgcatttagcttttgtatttattttgatcggtttcggtaccaaaaccgggttattcccaatgcatgcatggttaccagatgctcacagtgaagcgccaagccctgttagtgcgctgttatctgcggtgttattaaactgtgcgctgttaatcattattcgttactacattattattgatgcagcaataggcactgaattcactcgtaacctattgttaatctttggcttcctctctgttgctatcgccgcgttctttattctgatccagcgcgatatgaaacgtttattagcgtactccagtgtggaaaacatggggttaattgcagtggctctgggtattggtggcccgattgggattttggcggctttattccacacgttaaaccacagcttagcaaaagcattgctgttctgcggctctggtaacgtgttactgaaatacggtacacgggatctaaatgtcgtgaaaggtatgtttaaagtaatgccattaagtgctgcattatttgctggcggtgctttggcattagggggcatgccaccatttaatgtctttatcagtgaatttatgattgttgttgcaggcttagcagctaagcatatgggattaacaattctattattattgttattaaccgtagtattaggtggattagttcgtatggtagctaaaacggtatttggtccaaaaccggatgtggttgccaaaggtgaattaggtctgttaaccacactaccgatgatcattttgattgcgcttatgttgttaatgggaacacatattcctaagccagtcagtgagttattggagaacgcagccaatatcgtgatgaatatcgatgagagtggatcaccaaattatacatggccaacaacgttaatcagcaatccatcaatatcggttcaggagaagtaa

SEQ ID NO: 314773 - DNA, 1734 bp, Proteus mirabilis; identical to SEQ ID NO: 313710

SEQ ID NO: 314774 - DNA, 555 bp, Proteus mirabilis; identical to SEQ ID NO: 300531

SEQ ID NO: 314775 - DNA, 783 bp, Proteus mirabilis
atgagtctaccagaaattcccatcaatcatcatgtcagccaacctatcacattaagtgatcaggtgaaaaagctgaaaaaaacgttattgaaagatattcaacgttccgcgtatgtttatcgtgttgactgtggtggttgtaatggttgtgagattgaaattttctctgcaattacacctgtttttgatgccgagcgatttggtatcaaggtggttgcttcacctcgccatgctgatattttgttatttactggtgccgtaacacgccaaatgcgtgtaccggcattacgtgcttatgaatcagcaccagatcccaaaatttgtatctcttatggcgcttgtggttgtggtggtgggatattccacgatctctattgtgtatggggtgggagtgaaaccatcgttcctattgatgtgtggatccctggttgtcctccgacacctgcagcaactatttatggttttgctgtggcattaggcttattagatcaaaaactaaaaggtcaaaatcacactgaagtggataatgagcaagcgtcactgttactgccgtcgatccctcttgatactcgcgtaatgatagagcgtgaagctcgtcgtcttgctggttattatcaagggcgacaaattagtgatcatttcctcactttacttgatggtgccacagtacaagaagtcagtgggcgtgttgatgaatggttacgccaagcgaatgatcctcgtttagcggaaattgtaaaacgactggtgcattcattaaaccaaggaggcgttcatgtctga

SEQ ID NO: 314776 - DNA, 411 bp, Proteus mirabilis; identical to SEQ ID NO: 294721

SEQ ID NO: 314777 - DNA, 501 bp, Proteus mirabilis; identical to SEQ ID NO: 294722

SEQ ID NO: 314778 - DNA, 993 bp, Proteus mirabilis
atgtcctcttcttttccccaattaagtattgtggtggcggtttttaatggtgaaaaatttttaccacagttttttaattgtttacatgcacaacaactggaaaactgggaacttattttagttgatgatggctctactgataactctcgtcagatcttagataaatgggaaaaacactttcccaatgtcactattttaacacaagaaaaccaaggtgtttccgttgcgcgtaatacaggatttgctgttgcaaagggggaatacgttgcttttcctgatattgatgatgtgatagataaacgcatgtatccccgattacttgaaattgccaaggccgataatttggatgtggcaacctgtaatgggaattatgtttatgatgataaaaaccgaccaacacgccctatctttccttcaacgcgtttaacaaccacagaggtattaaccgggcctcaatggcttgaacgtgctcttgaatcgaaaaagttcttacatgttacatggctaaatatttatcgacgtcagtttttattggagcatggttattactttgagccgggtttgcatcaccaagatattccttggacgacagaagtgttattaacggcgaaacgggtaaaatatatcgatgagcgttattacgactattttattcattctggctccgtgtcgcatacgacacccgatgatcgtattcatgtaagaacaatttataactatatgaaaatacttgagatgctggatgctattaatcaacgccatgctgagatagcaaaaacgatcaatgcttgttattggcaaatagccaaagaaggtttaggtattattcattctattgatgcgattagttcaccagaaaccaaaaaacagatagttaaggtattttttgagcggggaatttgggcattaatttggaaaaatgcgaaagattttagattaaaatggcgtttagggcggcgttattttcgactgaaaaaaatattagcagaataa

SEQ ID NO: 314779 - DNA, 1584 bp, Proteus mirabilis
atgtctattcggtttagttggcgaaaatcgtttattgctttatcctgcttagccgcacttagtgttcctgttactacttcagcacaaaccttaaaattagccattggtgaagagccgacagaaggttttgatcccatgttagggtggagccatggtagctacttactgctacacagcccattattaaagcaaaatgcggatctgacttggtatagcaatatgctcagtgattatcagcctagtgcagagggcacaacatggaagctgacgttaaaaccagatttgaaattttctgatggttcccctttaaccgcaaaagatgttgcctttacctataacaatgctgcggcaagtggcggtaaagtggatatgggaaactttctttctgcaactgcagatgatgatttacatgtcactattgctttaaaagcgcctcaaagtacttttgttaatgtattaggctcgctaggcattgtttcagctgataaatatgatgaaaaaacctatgcacaaaagccgattggtgccggtccttatcgtatggtcagttttcaaccgggtcagcaactcatcgttgaggcaaacccttattatgcgggtaagaaaaatgatttcgaaaagcttatctttgtttttcttgatgaagatgccgcttttgctgccgctcaaagtggacaactaggggttgttcgtattcctcctgccaccgcagccattgctaaaaatttgcctaatgtaaaattgtgggaaagagccagtgttgaaaatcgtggtatcgtctttcctatggtgaaatcaggtgagaaaaatgcacaagggtatgatatcggtaatgatatcactgcagatatcgccatccgtaaagcgattaactatgcccttaaccgccaattactggcagagcaagtattagatggatatgcagttcctgcttataccggcgtaaaaggattaccttgggatcaaaccgaggctgcatttaaagatggtgatattgaaaaagccaaacaaattcttgatgatgcgggttggaaactcaataaaaatggcattcgagaaaaagacggtctagaagcgaaattaacactctggtacaccagtggtgatgcaactcgtcgcgatttagctgaatcaattcgtgcgttagtgcaacctcttggcattcaaatggatcttaagtcaggaagctgggataccgtagagcgttatatgcactcaaacccgactttgtttggttggggaagtcttgatccgatggagctctatcatcactatagtatgaatgccgcaggtgtgggttactataatcctgggtattataaaaatcctgccgttgaaaaacatttacaagcagcattagatgcaccgacatggcaacaagcggtaccacattggcaagcggtagagtgggatggtaaaaatggcgtcggtatcaaaggtgatgctgcttgggcttggttaatgaatattcagcatacttacttaaccgatccttgtgttgatttaggcactggcgctccggaaattcacggttcatggtcattattaaatagcgtagatacttggaagtggacttgtcagtaa

SEQ ID NO: 314780 - DNA, 978 bp, Proteus mirabilis; identical to SEQ ID NO: 294725

SEQ ID NO: 314781 - DNA, 813 bp, Proteus mirabilis
atgatttacgatcccaataagcctttatttagactgctatttgtctcaatcgtattagtggggctggttatttatggcttatctgtttctcatactgatattgtgatggattttttagctagaaaccaagcgccatctactcagtactggtttggcacggataatttaggccgttcactgtggttacgctgttttcaaggtatgttaagtagcttaaatatcggtgtcactagtgccgttgtcagtggtgctattgctttgatatttgctgggatctcctccattaatcgccattgtgatttattggtcagaggggtggttgatgccttgttagcattacctcatttactgttgttgatcttgatctgttttactttaggtgggggacagcaaggtgttatctgggctgttgcattaacccattggcccaaattagccctaattttacgtggtgaaattcaacgtattcgtgaagcagattatgtgatgctatctcgccgtattggcaatacgccttttgagtgtgtgaaaaaacactatatcccaatgttattaccgcaatggattgtaggaacgttgcttatgtttccacatgcggtattacatagtgctgcgttgagctttttaggttttggacaagcagcgcatgagccttctcttggattgctattagcggatgccttacgttatttaagcaccggtgcttggtggatggtgttttttcccggattaattttaatgtgcttggtattgatatttgatcaatttgctaaagccatgcagcaactatggttaagaggggcaggatgttaa

SEQ ID NO: 314782 - DNA, 804 bp, Proteus mirabilis; identical to SEQ ID NO: 294727

SEQ ID NO: 314783 - DNA, 612 bp, Proteus mirabilis
atgccacttttagcgctacaacaactctctgtgcaacaagccggtaagatgttatggcatgatctctctttttcattagaggcgggagagcgcttaggcatttctgcgccaagtggtagaggaaaaacaacgttaggtcgtgtattagcacaatggcaaatgccgactagtgggcaaattctttttaatcagcaacctctgcctaagaaaggttattgtcccattcaattggttccgcaacatcctgataaatgttttaatccatttagaacaaccggagagagtgtacgtgatgcatgggagcctgatagcctgtggcttgaaaaattgatgatagagccagagtggttaacccgtaggcctaatgagttatcaggaggagaattggcacgtattgcattattacgagcacttgatcctcgaacacaattattaattgcagatgaagtgactgcacaattagatgcacagatccaagccaaaatttggcaagtattaatcgatgaaagtcaaaaacgtcctttaagtttaattatctttagtcacaataaagccttactagaaaaagtatctaccagaatatggtgggtagataaggaaaaaatatgttga

SEQ ID NO: 314784 - DNA, 921 bp, Proteus mirabilis
atgcaattaatggctgaaaatagctataaacttatcgatatgcaacagggtcaattgcgttatttagcttccgccacctgttctgtcggtactgaaaaagcatgtcttagtggcttcacacactatcaaaatattgataaagccaacgctatacaaacgggcattagtggagcttatcgttttgatatcaatcaaacaccattagtggttggtcttgctattgatagcgatagctactcttctttacccacaggctatgaatatcaaggataccctttaccgttaattggttttagcgttgatttaatcccgtcactaaacccaacctcgaatggcaatgcattacatctttcattaaaaggggcatatgtaaaccgcaaagtcacgattaaaagaccaatattagataataccgaagcgggtaaaggccacgcaaagatctccggttattatattgattttcaaggatattatccttacacactcaataaccttatcactgtaacgccttttgcaggacttacttttaatcaaacatcacgctctgcttatagcgaaacacaagggactaaacttgcagtccattatcaagaacttaatgcacattcattgcttgcaaaaataggattaggaatagagtatacagtcaatgccaaactcaaactggacagcaaagcgggtttattatggcatttatcacatcaccaaggtgacttccaaagtcatattgattatctaggtcagcaaaaaattaactataacgacaacaaaaaacagttagcacagcgtccatttgctagtgtagggctaacttaccaactagataaacagtcatctgttaatacgacaacaaattggcaaatgaccccttatcgtaatcaagatattcatatgggtattggttatacatatcgtttttaa

SEQ ID NO: 314785 - DNA, 294 bp, Proteus mirabilis
atgccgtttaatacgccttgtaacatttctaagatactattaaatagtaaaaaaatagggaaccatatctatgaaatttatttaagtggcaaacctatagatcaagaggctattcgttggaatatgaattttaaaatcatagaagacgataaagtcatacgaaattttaatatagaaagagattggtatacttttggaattgaacaagtaattaaggaggcatcaagagaaggattggtccatgaaaacattagctcaagtactgtaccaatggcaatcctccgccataaataa

SEQ ID NO: 314786 - DNA, 951 bp, Proteus mirabilis
atgacccgtttacgcacagtatcaaaacacccggagcaattagaaaccacaccattaattgcggaaagtcatcactatgatgaccctttagcacctcaaaaactaatatttttagaggcagttaatcaacagcgttgtgtgattaactcaccacagcgcaatagccaactcaccaatacaatacctttttttatcgtacttttagttatggccttttatacattgttcggatttgttgataatcatataggtaaaaaaatgtctattgagcaaatggctaaacatatagaagaaaaatatggcaatcgaagtaatttagaccctgaaacatttaagatgattgaatcatataagccattttttaatgaagaaaaaattagctggtgggagtatataaaagcgtataactccggtgagttttttattgatagccaatatgataaatacctcgtcattggctggctaatttttttccccggttttttatggctatttggctatctctctttctttacacctcctgtgtaccttattgctgataagcaaagaggaatactgtatagctatggcatgggaaaagtacgtttaacccgctataaagaggcgcaatttggttatgcgggcaatatgttggcaattaaactatatggcattaatgaaaaaacaggccaattaaaaacgatcctctatcgccccaatgtgtcccactactccagtttcctaaccagtactgacagtgaaaaccaccgttttatcactttccttaatgcctatatgcaacaaggccgagatgccgtttcgactgttgattaccaagcccgtaagccctttttatcttttggtaaaaacccacttcctgctgattttgagcaacaggtcaaacagattctggcaaagcttgatcaggagaaaaaaactatgtgtaaaattgataaggaaggtacagaatga

SEQ ID NO: 314787 - DNA, 927 bp, Proteus mirabilis
atgaccaatttacgcacagtatcaaaacacccagagcaattagaaaccacaccattaattgcggaaagccatcactatgatgatcctttagcacctcaaaaactgatatttttagaggcagttaatcaacagcgttgtgtgattaactcaccacagcgcaatagccaactcaccaatacaatacctttttttatcgtacttttagttatggcctgttatacattgttcggatttgttgataatcatataggtaaaaaaatgtctattgagcaaatggctaaacatatagaagaaaaatatggcaatcgaagtaatttagaccctgaaacatttaagatgattgaatcatataagccattttttaataaagaaagaataagttggtgggagtatataaaagcgtataactccggtgagttttttattgatagccaatatgataaatacctcgtcattggctggctaatttttttccccggttttttatggctatttggctatctctctttctttacgcctcctgtgtaccttattgcggataggcaaagaggaatactgtatagctatggcatgggaaaagtgcgtttaacccgctataaagaggcgcaatttggttatgcgggcaatatgttggcaattaaactatatggcattaatgaaaaaacaggccaattaaaaacgatcctctatcgccccaatgtgtcccactactccagtttcctaaccagtactgacagtgaaaaccaccgttttattactttccttaatgcctatatgcaacaaggccgagatgccgtttcgcctgttgattaccaagcccgtaagccctttttatcttttggtaaaaacccacttcctgctgattttgagcaacaggtcaaacagattctggcaaagcttgatcaggagaaaaaacaccatgcgtaa

SEQ ID NO: 314788 - DNA, 342 bp, Proteus mirabilis; identical to SEQ ID NO: 297719

SEQ ID NO: 314789 - DNA, 426 bp, Proteus mirabilis
atgagtaaatctaatcttattgcctttcgtctccctgctgaactacaaaccctgtttaatgatgctatatcgaactctggtagcgataaaacagcatgggtagtctccgctatcaaagagaagttaaaccgtccagacagtaatcctgacgctcgcatactgtcgctggtggaacgcctagagtcgtctgtcgcatctttaattgctggtaaggcagatatcccaccgtatacctatgatgagtctgctgttgtttctgtggttaattctgtactgtctgagggtgtaaccaatgggcgcattattgctgaacggattaacgaggcaggctatcaaactaaggcaggcaaagcgtgggataaagatatttattcagcgtggaagcgccataaagatattactggcaaactacaagttaggcattaa

SEQ ID NO: 314790 - DNA, 1209 bp, Proteus mirabilis; identical to SEQ ID NO: 19673

SEQ ID NO: 314791 - DNA, 1209 bp, Proteus mirabilis; identical to SEQ ID NO: 19673

SEQ ID NO: 314792 - DNA, 420 bp, Proteus mirabilis
atgagtaaatctaatcttattgcctttcgtctccctgctgaactacaaaccctgtttaatgatgctgtatcgaactctggtagcgataaaacagcgtggatagtctccgctatcaaagagaagttaaaccgtccagacagtaatcctgacgctcgcatactgtcgctggtggaacgcctagagtcgtctgtcgcatctttaattgctggtaaggcagatatcccaccgtatacctataatgagtctgctgttgtttctgtggttaattctgtactgtctgagggtataaccaatgggcgcattattgctgaacgaattaatgaggctggttatcaaactaaggcaggtaaagcgtgggataaagatatttattctgcgtggaagcgtcataaagatattactgacaagctgattagctaa

SEQ ID NO: 314793 - DNA, 378 bp, Proteus mirabilis
atgtgggaaggtatcaaagaagttaaaccaggtgcaacactcggtgatatcggtcatgcaatccaaagctttgcacaaagtcatgggtatagtgttgtaagagagtattgtggacacgggattggtcgagaaatgcacgaagcccctcaagtattacattatggtattcgaggacaaggtgttgtactaaaagaagggatgacctttaccattgaaccgatgattaaccaaggtggacacaaaataaaaaccaaaaaagatggttggactgtagtcacccgtgataaaaaattatcggcacaatcagaacatactattttagttactgctgatgggtatgaagtactcactttgcgtccagaagaaacacttccataa

SEQ ID NO: 314794 - DNA, 174 bp, Proteus mirabilis; identical to SEQ ID NO: 297727

SEQ ID NO: 314795 - DNA, 369 bp, Proteus mirabilis
atgataaagataaaagtatctaaaaggaaaggtcgcaatcaatcatttctacaatattgccagcatgtagatcaacgagtatcacgggctatgcaacggtttcttttcgatgctggagcacaatccgcaatttatacgcctatcgatacatcaacattgattaatagtcagtttagggatgttactgttaatggtacaaaaataacgggacgtattggttactccgccagctatgccgtttatgtgcatgatccgaaagttaagcagaaatttaaacgaccaacagctaaaaaagaattcttgaaaaaagcggtcgaggaaacgctacctaatttaactaagtatattcatgaagaattgaagagttag

SEQ ID NO: 314796 - DNA, 228 bp, Proteus mirabilis
atgaacaagactaaaacaactcggttcagttttttacattactggcatgggttgggggcctggaatttttattttttgctaaagtttgttttgctttggtatggttatttaaaatttgatgcatttagcaatttactctttctagcatttttattatttccattaccgaaaacattttggcataaattacgtaattggatagcgatccctataggggttatgctctga

SEQ ID NO: 314797 - DNA, 348 bp, Proteus mirabilis
atgaagataaaacttactaataagagagtgcacaaactctctatagagccgattgaaaaagaaaataaaaatgacaaaaaaaagataagaatcagatatatagttaatttaagtattgaaagcatttttgctttatatttagaatatgattttgacttcgatattgatggcgaagtagatgatacctttaaggattcgtccgagataaaaacatcaattcctagttacacatatccttatatcaaaacttttatagaaacggtaattactaactgtgactatccaaaaatacaaatccctacaattaatttttacgatttagatgacaatattgaaatagaagattaa

SEQ ID NO: 314798 - DNA, 309 bp, Proteus mirabilis
ttgactgctaggaacagactagaagtggcttggcagtgtatcgctaagctgcgaactctacgcatttcattctgtgcattcaccgcgcaattaaaaacactcacagaaccttacagaaagtcgaacctgagaaaaaccgttaatggtgttttctgtggggcggttatttctggtgaacaggttcgcttttctataaggatttacaccatgagcaaatcattagttttcaaaggtaatgaaattactccatttgataatggtgataataagatttggtttaccagctctcagatggctaagctactctaa

SEQ ID NO: 314799 - DNA, 333 bp, Proteus mirabilis
atgaaaacgcataaagttaaccgggttcgcccctttagtgcatttattgatgcatgtgtaaaagagccttactcttttgcccgtttattaaaagatattattgcagggatcaccgtcggcattatcgcaataccactagcaatggcattggctattggtagcggtgttcccccgcaatacggtctttataccgcagctattgccggtattattatcgctgtatgtggtgatactttatcctgtttcacaacaatttggtttaagtgggctattaattgccactttgatgtctgggattattttagtggttatggggttagctcgttttggtaa

SEQ ID NO: 314800 - DNA, 705 bp, Proteus mirabilis; identical to SEQ ID NO: 61560

SEQ ID NO: 314801 - DNA, 393 bp, Proteus mirabilis
atgccggcactcgaccgacagaaccgaattttggcaccgccgagacgcaaatacgctttctctgcgcggagggcttttgtccgaagcgcgccgtttgggcgctccgggcggtcagtcactatgtggtcggttccgttctcgagcagcaggcatctgatgccgatgagagagttccggacaggccagatgtgtccgagcaagcaccgtcgtccttcctgcacgatctgtttcacgagttggaaacagacggcatggatgctgcgttcaacttcggactcgacagcctcatcgctggtttcgagcggctgcgttcatctacaacagattagaggcttatgcccctttgccgccccaactgccacgacaccgatccgctttgcacgatgcccatga

SEQ ID NO: 314802 - DNA, 756 bp, Proteus mirabilis; identical to SEQ ID NO: 267573

SEQ ID NO: 314803 - DNA, 387 bp, Proteus mirabilis
atgttgaccgttgcacccaccagcacaaacagccagatttctgccgccacccaaagctttgaaaatttgccggatatacgctttgcaaccggggcgttggtttttaaaagggtgacgcccatccccatcaccgccagcaatccggaaaatagcgccctttcgcccagggttttctccaacgcaaccagcgcaaaggatgcgcccagcagcaggagcaccttgatcgtatcacgcatatgtacccgcttaaaaagggctgccggccggcaaggtgctgtgcacggatctgccctggcagggcatcaacgaagaccagaacctgggcatcgccatcacccgccgtgcgctggaagccccgctgcgcgccatcgtggccaacgccggtga

SEQ ID NO: 314804 - DNA, 702 bp, Proteus mirabilis
atgacccagcgtaagctgacgcaacgtctgcgccatcgcccgcggcgtggtggtgtctctcgggtcgccgggaatggcggtattcagcgtaggttcagtgcgatccagacgaaacgtctcatcgccgatcgcgcgggcaaaagccgtcacgcctcccgggccaccgagctgggcaatcaatttgttcatggcggtattgtcgctgtactgcaacgcggccgcgctcagttctgccagcgtcattgtgccgttgacgtgtttttcggcaatcggattgtagttaaccagatcggcaggcttgatctcgacaggctgattaagcagctgcttttgcgtttcactctgcttaagcaccgccgcggccgccataactttactggtactgcacattggaaagcgttcatcaccgcgataaagcacctgcgtattatctgcggtatcgatgagcgcgacgcccagccgccctccgctgcttttctccagcgccgccagcttttgctgcaccgcactcgtctgcgcataaagcggcgcgctgcccagcagcagcggaatgcacgccgccgccgcgaacatcatccgttgcactctctttgtcaccatctcaaactcccaatacggtcaatccgtgttacatcagtattccctaaattccacgtgtgttttttattagcttcaaaaatcactatttcacgaagaatttag

SEQ ID NO: 314805 - DNA, 213 bp, Proteus mirabilis; identical to SEQ ID NO: 307435

SEQ ID NO: 314806 - DNA, 558 bp, Proteus mirabilis; identical to SEQ ID NO: 7707

SEQ ID NO: 314807 - DNA, 861 bp, Proteus mirabilis; identical to SEQ ID NO: 5314

SEQ ID NO: 314808 - DNA, 756 bp, Proteus mirabilis; identical to SEQ ID NO: 267573

SEQ ID NO: 314809 - DNA, 387 bp, Proteus mirabilis; identical to SEQ ID NO: 314803

SEQ ID NO: 314810 - DNA, 1176 bp, Proteus mirabilis; identical to SEQ ID NO: 52403

SEQ ID NO: 314811 - DNA, 723 bp, Proteus mirabilis; identical to SEQ ID NO: 290979

SEQ ID NO: 314812 - DNA, 183 bp, Proteus mirabilis
atgatcatgacaaaagaaataattaatgtagatagcggaaaaatgctagatacattacatcgagtaaaagcattcttaatttcagctcagttcctttctcgtaatagcgaagagcaagcaattcaacttagcttattatctcaagcagaagatgaaatcgatgaggttttaaatgatgaataa

SEQ ID NO: 314813 - DNA, 663 bp, Proteus mirabilis; identical to SEQ ID NO: 190890

SEQ ID NO: 314814 - DNA, 741 bp, Proteus mirabilis; identical to SEQ ID NO: 190889

SEQ ID NO: 314815 - DNA, 990 bp, Proteus mirabilis
atgtctgacgcgaagatcagaacgcaccgatacgaacgtgcgaacacaggcgcaacactgagcagccgtccccgcaccggagcgctgcgtgccgcgcctcgccacatcccggcggcaagccgcgggatgcgcgccactgccgtccgcccacaccggttcgcggtacgcgcgccacgcgcccgagcgcacgctgctgtacgcgttggtagaggcgcactacccggacttcattgcacggatcgaagcggagggccgctcgctgcccgggtatgtccgcgaggcgttcgatgcctacctgcgttgcggcgtactcgagcacggcttcctgcgggtggtgtgcgagcactgccgtgcagagaggctggtggccttctcctgcaagaagcgcgggttctgcccgagttgcggcgcgcgacgcatggccgagagtgcgcggcacctggtcgaggaggtgttcggcccgcggcctgtgcggcaatgggtgctgagctttccgtaccccttgcgtttcctgttcgccagcaagccagaagccattggcccggtgctgggcatcgtgcagcgcgtgatcgccggctggttggccgatcaagccggcatcgaccgcgccagcgcccagtgcggcgcggtgactctgatccagcgtttcggcagcgcgctgaacctgaacatccacttccacatgctgtggctcgacggcgtgtacgtggaagccaccgagctgccgcggcgcgaactgcgcctgcaccgcgcccgtgcgcccaccaccgcgcagttgacccagctggcagctaccatcgcgcaccgggtgtgtcggcacctgacgcgcaaaggctggctcgaaggggagggcgaatcggccttcctggcagacagcgctgcaggcgacgacagcatggatgggctgcggatgagttcgatcacctaccgcatcgccaccggccgcgacgctggctgcaaggtcgtcacgctgcaaacgctgcccggtga

SEQ ID NO: 314816 - DNA, 873 bp, Proteus mirabilis
atgcaatttgaaaccaccctgataggaaaatcacgcgcagagcaagaaaagcttaatgcccttcgtcagattgatgtgctgtatcagcaagccagtgtggatttaggtgagaaagagctggcgaacttacaacgtaatgttgaactcactaaacagcagattgaggaagaactgaggaagcgagaggccatgaaaggtgatccgatggtgggattaaaacaaggcttatcggatttcagtgagtcagccatggatgtgatggagaacgtcagaaacgtcactaccaatgcgcttaataatatgtctgatgcgttagccgattttgctttaacggggaaaggaagctttaaagattttgccaatgcggtgatctccgatatcactcgaatggtgatgaaaatgctggttttcaaagccattgaagcaggcgggcaggcaatgggctttgatatgggatggatgagcaaagggcatgcttatggtggctatacggggcatggcgggaaattcgaacctaaagggattgtacatggtggcgagtttgtttttaccaaagaagcgacggctaaattgggtgtcggcaatctctatcgcttaatgcatgcggcgcaaggttatgcttcggggggctttgtgggggcggtcgcagggcgaataccgattacaccgcaaccgacgttagcccgtgcaggcggggtgcaaatgacggtcgttaatcatattacggtgacaggaaatggtgacgctgtacttgcacaggcaatgaaggaagccgcacaacaagggacagaagctggtgcacagaaagctcacgcgatgatgttacaagactttcaaagtaatggcgcagcacgcagaacattaggagtttaa

SEQ ID NO: 314817 - DNA, 306 bp, Proteus mirabilis
atgaatacattgaattacatcatcagtaaaaaaataaaacaaaaaagaaaagaattaggggtgacagacattgaaatagcccattcattggaaataagtcaacagcactattcacgtatagagaatggacataccaaaataacagtagaacatttattctctatcgcgtttattttaggtgtcaaacctaaagaactattgcctaattataaattttcaaatgaaaaagaaatgattaaagcaaaacaatcattatcagcagaaagcattatgccaataaagaaaagcgacatgtatcccacataa

SEQ ID NO: 314818 - DNA, 246 bp, Proteus mirabilis
gtggccaacgtcaaggccggcgaaggcagctacggctacaacgccgccaccggcgagttcggcgacatgatcgccatgggcatcctggacccgaccaaggtgacccgctcggccctgcagcacgccgcttccgtcgccggccttgcgatcacgaccgaagtggtcgtggccgaagtgccgaagaaggaagagccggccatgccgggtgctggcggtatgggcggcatgggcggcatggatttctga

SEQ ID NO: 314819 - DNA, 5856 bp, Proteus mirabilis
atgaatatctttttattagaaaaactacgtaagaataaatttatttcttacctgttaatgatgatccaatttttgtttcctatggtattgtcattaacaccaacaatccatgcttatgcatctataacagaagataaaacaacaaatagtgaacgctggttagctcaacaggcaagtcaagctggcacaatattatcaaatgagaatagtaaagattctgcttcacaatatttatttaatcaagctaataataaaatcaatcaagaagttgaaaattggttaagtaaatatggtaaagcacagattaatttaggtgttgataaaaatttcacacttaaaaataccgaagcaaaagtcattattccattttatgaaacagaaaattatctgttatttaatcagaccgcattccatcgtagctatgatagaaaccaaggaaatataggctttggtattcgtaaattcgatgatactcaactttacggttttaatactcactttgatcatgactttactggtaataatagtcgtatgggtattggtcttgaatatcgccgagattatttttcaataagttcaaactattataatagattaacaggctggaaagattcgagtattaagaaaggatatgatgagcgcccagcaaatggttgggatattagaacgcaaagttatcttccggcctatcctcaattaggtttgaaagccaattttgaacagtactatggtgataatgttgacctattcaataacacatctaacctgacaaaagatccttttgcatttaccgctggccttaactatacacctttccctcttcttaccttcaatgccgaacataaattaggtaaaggaggcgataatgatacacaacttggcctatcattaaattaccaatttggtacaccaattaaagcgcagttagatccaagtaatattaagccactacgtttacttgagaatagcaaatatgattttgttgatagaaacaacaatatcgtttttgattatcaagaacaatcttacctgtctttaaaaacacctgatttaattgaaggttatagtaacgaacaaaaagcgataacgattagcgttgaatctagtgctgggcttgattatatcgacattgatgcgaacacttttatgcaacatggcggtaagatcactaaacaaggcccaaatagttacttgctgtatttaccttattatgatcaacaaaaaggcgcgacaaatacctataatatcgtggcaatcgcttacgataaaaaaggaagagcatcagcccctgaaaccaccaaaattgttgttctcaaaaataatataactgaaaaagccactatatcagcaaccccacaaaaaatcggtattgatcagacctctatcattacattaaattttaaaaatgatgacggtgagctaattgaaatggatgatgccagcattgtgcttgataatggtgcaaaaggtgtattatctcaaacgcagtacaatgataaagctaaagtttatcaggctaagtttaccagcactgcacctgagactgcgcagttctttgcctattttaatcaaactgttcattctgatatttcaacaacggttactgtagaaaatcgtaccgcaaattaccaccgactcacacttaaagcggacaaaaatgagatcacgttaggaaatgctaccgttttacggctgactttctttgataaaaacagtctccctgtcgaagtagaaaatgccaatatcttattgatgaatagtgataaaggtgaaatatccagcaccacatacgatgcggcaactaaacaatatattgccactttctccagtaaaaatattggtgatgcgatattccaaccggctatcaataatgaagtagtcaccgatacgaaagagacgataaaaatcacctcttttaaacaggttaatctaaccgttgcaaatgaaatgtatgtaggtgattcatccaaagtggtaatgacaatattggatgataatcatcaacctatagaagtcgataatgcaaaaatccaaattgtcgaaatagataaccaaaccggtcgcgggattatctccgaaacgacttaccatgctcaagataaaaattattcagccaactttaccgccacagaaataggtaaagtcactttctatccttatattgccaataccccccactcagagagtaaggccgaaaccactattttatctcattcagaaaagtataaggttgttgctttaaccgcttcgccggagcaaatcattcagaacaaaacctctcaaattattgctgaagtgcaagataaccagggccaacccgttaccgatatccccgttgaaatcgttttaacaacgaatatgggaagtctaagtaatacaacggcaatatcaggaaaaccgggcttttatcaagctatttatactggtacacaacccactacggcaacttttggcgtgaatgtagatggcacacaaaatagtcatgctaaagtcgatgtcgtcgtttggggcatgaatgatctaaaagcaacattaagtgccgacaaaccacaactagatttaaaaaacagtgaacacgatgccttgttaacattgatacttaccgacaaaaataataatccattgccaactaaagctgccatgatcttacaagaaacggcggaatatggtgaactatcggatactcaaagtaaaagcgatacacaatatacggcgaaatttgatgctaaagcagtaggaaccgctaaattttacgcgacattagaaggctttcgattaaatactacagcagagattactgtcattgatagcaactcttctattgatttaaataatgcctctattgagtccaatcctacccatctctatggaacacaagaagagcaaaacaatcattctcgtaatagtgatgcaaattggcgtaccgcgaagatcaccttagatattcgtgatcaatatggtgagttattccatccaaatgtgcctatcgatattgtgataaaaaatacagcaaatggacgcgtgagtgaagcgactgaaatcaaaccaggacaatatcaggttatttataccccaactgagaaaaatgaaccttttaccgcgactttctatgcggtaatcaacaacgtgcagcaggatcaaatttcagccaccgttgacgttgatccgttaactcataacgtaaaaactggagcgagtttaataccgctcccttcacatattactgtgggtaatacatcaacattaaacgtgattttctatcaggacaataaaccttatatccctaccgggccggttgaaattcgactcgcggatgattcgaaaacattaggccgcatggatgcaacaacacaaagtggtcatatttttaaagccaaatttactggtgaaaatgcaggcaaagctaactttaaaatatttgttaataatcaggaatatactgaaggtaatatcaaagcaaccgttaatgtaacagaatcttatcaaggagaattgaatgcggcgcctcattctattccggtaaaacaaacctctgtattgaccttacaaattaaaaaccaccttggtcagccagtaaaagtcagcgatgatgacgtacaaatcattatgttgcaaggtgatagcaataccgcagaaggtactatcagtaaaacaagttatgatgccaatacaaaatcatatcaagctactttcaccggcactaaacaaggccaagctaagtttatctcggtcattgatggacaaacctataatgacgtctcaactaatgtcacggtaaaacccgcctatagctcagccaatatggataaggaaacttcacctatcacgctgaatgaaacttctgatgtttatttaaccctactcgatgcaagtggtcagtcaattcaggttgataacaccaatatcaagttaaatacaccaagtttaggcactttaactgcgaccaaatgggacaatacaaataaacgttatgccgcgacatttacaggctcggcgataggtaatgctgactttagtgcttatgtcgacaatcaaaaaatagcaggtgttactacttctattcaggttaatgatagccctgatgcattttataaccctactttgacgccattaccaaacgtgatcgtggtaaacaatacatcagaaattactttaaccattgaagatattaacggtgcacttattgaaggccaaagtgccaatattgtattagaaacccctgctctaggcgtattatctgaaaccacttgggataagaaagcgaatgcctacaaagcaacgtttacaggctctcaagttggtaaagctaagttctctgcaacaattaacggaaaagtaggtcaagctaaaacctcaattcaaatcaatgaattgtatgattctgcaacattaacgccggatccagcaacgataatatcaggggatccatcagatttaacactgactttacttaatgaagcaggaaaacctatcagagttaaaaatgataatgttagcattaacttaacaacgccaaagctgggtacattaggcgcaacgacctttgataccaataagcaagtatataaagctaagtttaatagttttgacataggaacggcgcaatttaatgtttctatcaatggcgttgttcgttcagatataaaagcgaatgtcattatcaagaaagcctacgaaagcgcgtctctggtggcaactccgacaacgatctatacaggtaaaacctcgttattaaccctgtcttttaaagataattcaaataatcctattgccgtagaaggcgctaaaattgttttacgtgatggtgaattaggtcagctaagcgaaaccacttacgataaagtgaagaaagtatataccgctacatttacgggaatagaagcaggaacagctaactttaatgcctcagtcaataatcatattgatgagtccataaaaacaactgtcactgtaaacgagctctctttagagagttttaattatcaactaacgagtacacctaactctatctatattaacgatgaatcaatacttgaattcaccattactgatgataatggcgctaccgttaagctagatgacgtcagtattgctcaatcatcaaataatcaatatggcactctcggtaaaacgacctataacagcaaaacaggcacttatacagcaacctttaccggtaaaaatgtgggaacagaaaccttctatgcggttattcaacaaactgtgttaaacgaggtgaaaacaactgttacagtggataaagtcgtaccgatcaccgatattgcttatattaattccaaaaactacacatttgaattagatgaaggattccctacaacaggattccataacgcaacatttaattttgtgatgaagaatggcactaaagcgagtgactatacatggtcatcaagtcagccctgggctaccgtgagtaaaaatgggggggaggttaaattatcagcaaccccaacgaccgctaataaaacggtcactatcacagcaattcctttggttgaaggcaaaggaacggcatttagctacacattcactctctcatattggtttacattctatacagggcaaaatatgccagcaccgagtgcctggaaagtctgtgaagacaataatctcaacacctcaccagtaaacttacttagtctaggcataggtataagaggtataggaaccgtgttctctgaatggggtaaaggcggcggtgctttccaagcatggtcttcaaccactgaaggaacaagctcaaatataggttcagtgaacttctcgaatgggattattcaatatgtagcaggtcatcatcagtatgagccggtctgtaacacaaagctgtactaa

SEQ ID NO: 314820 - DNA, 207 bp, Proteus mirabilis
atgaagatcttcaatcgctataacccagaaaaaattgctctctacgttaagacgttatttcgtggacggttttatatcaaaggaatgggcgcatttgagttcgattacggtaaaattttattgccgaaaataaaagataagctgcattttaatgtgatgagtgaagttaaccagcaggttgttttactcaaagctgaaataggctaa

SEQ ID NO: 314821 - DNA, 243 bp, Proteus mirabilis
atgtttctttttgaaaagagagaaaatgatgcattaataaaatttttagtaagaggatttaaacatttagatttaaatggggcaatacacctaatagaaggagcaaatggtggtaaaggagaaaactcagggataaagggagctattctgcttctatctgatttttttgagtttttccaatcattagctaaccaaccattatctaaacaagcagttccaagtaatttacctttttttatgtag

SEQ ID NO: 314822 - DNA, 288 bp, Proteus mirabilis
gtgaaaactaagtcaacaaaaatggagttggtcaagtttgaaagaaacgaaaacctatttctcaaggagtataacgttactcacaataacgagactacaaagttagagcagaaaatatctattgccagagataactttggaaagtttgaggtagatattgaaatggatggattccctcgtattagtgatgaaaccgaagcactactcaaatacggagagtggctagagcgactaggtattgccattaaacgtgaagctaaacgtgcggtaaagcgaggcgttcaatga

SEQ ID NO: 314823 - DNA, 474 bp, Proteus mirabilis
atgtcactaaagacatactatctcagtagtaaaaacatcagacagaatgccatcgaagcaatacaaaacctaccaatagattcaaccaagccctacgaagtcaaactctccgaacccaaacgaaccaaagcacaaaatgaccgcatgtgggcaactcttactgatttgtctaggcaggttatgtggcaaggtcaacggtatgacaaagaggattggaaggacttaatcactgtattgaataaacaagtcaagggtgaggctcaacggtcggctgtcgggctaggtggcggcattgtttatttcggtgaacgtactagcaaaatgcgagtgagacaaatagccgatgttatcgaatgtgctcactggttcggctcacaaaatggcgtgaaattcactgatgacgcaagacgagaattagagtgggcgcaacgcatcggtgacaaacagaaaatcaaggataaacaaaatgagtaa

SEQ ID NO: 314824 - DNA, 204 bp, Proteus mirabilis
atgaacttactaacacatactgtcaccaaggtattaggtaatccggttcgtcacacttacaaatcggataatggaacagaaaatgaatattacctaactccagtagagtgtaattgttatggagtcatttctaatacggaagtgatgacctctacattagagcaagccaaggacattaaaattggctatgagtgggaagcctga

SEQ ID NO: 314825 - DNA, 171 bp, Proteus mirabilis
atgaaaattacagtaaaagtaacagatggtgaattgatggaaatggagctaacagctgagcaacttgagcactcgattgttgtcgcccttgatgctcatcgtgattacgcaggattcaatgtggaagtaaatattgtcgattgggatgataaagacgtgttcgtcagttaa

SEQ ID NO: 314826 - DNA, 336 bp, Proteus mirabilis
atgaaaaacagaacacaatacgcatgtaattatggaagtcatcgaacaggtaaatgtgttggcggtctattgtacatagataatcatagcgattattacgattattcagatgatgttatgccttgccctgcgtgtaacgcagaagaatggcttaaaaaatatcggggagaatacattgatgatggagttaattgcggtaagaaaagaaagcaactcaacacaaaagaatacgcatcatgtatccctaatgaaattaaaggcaatcaaggtgctgtaagaaaaatataccgctggttaaagcgtggctattactacggattaaagaaccgccactaa

SEQ ID NO: 314827 - DNA, 279 bp, Proteus mirabilis
atgagtgataaccataaatacacagcaattaaaatgcgtcccctttgcacagcttgtggtgatgattgcggtgagcacctaataacggttggtgaaaatattatcctttgttttaaatgtatcgataaaacaaaagaaaaagttgatttgtatcgaaaggaaatagctgaaaaggaaatcaaagaaattattcgattaattgaaaggtatgctatcaagacagacattgcagatattgccaacttgcttcatcaagctggatatagaaaggtggagtga

SEQ ID NO: 314828 - DNA, 1194 bp, Proteus mirabilis
atgatatatttaagtttgttcaacggcatatccgctggacgattggcgttgtctcgcgctggaattaaatttgataaatattacatagccgaaatagacaaattcgccaataaagtatctgagtttcattatccagataatatccaattaggtgacgttaataattggcgtgagtgggatatcgactggtcaagcgtggggttagttactgccggctttccatgtcagtcgtggagtttagctggcaagcaattaggtgataaagatgagcgaggtaaattattttggacaacattagaaataatgagccatgtgttagaaaataatccagacgctaaatttatgctcgaaaatgtaaaaatgaaaaaggagtttgaggaatatataacactgcatactgagcgcgctcttggttatgtaaataaaactcttattaatagctcgttattatcagcgcaaaatagacagcgttattactggactaattttgagattagccagccagcagataaaggtattttgctgaaagatattattgatgatgagttcaaccaagaacatgttacaggtggtcgtatttgtggtaggtatcttgtggatggagtgcgtcaagatcataaaatgaaaacagcaggccttaccactcaaaggttggaaccaagaaaagacgggagatgtggaacgcttaccactgttcagaaagataatgtcgttgtttatagaccatgcaaaccaagagagcgcattaagcaatctaaagacggactaattcatgttgctaatgcgtcggacattaagggtaacgagtctatactgcgcgtttattctgatactgggaaagccccaacattatctacgtgtcagggcgggcatagagagccgaaagtcgcaattagggataagagtaggacaattagatcatctgggcgtaactcgtatgatagacatgaatgggattctattagtaactgtcactatcgcaaattaactcctactgaatgcgcgcggttgcagactttccccgatggttggtgtgaagatatagtctcaaattcacagtcatataaatgctatggaaatgcttggactgttgatgttatcgctcacatatttaaatgtgcatatagagaaaataaacatgaagctattcgtcctactgttaattatgaacaatcatgcagtgccaatatctga

SEQ ID NO: 314829 - DNA, 156 bp, Proteus mirabilis
atgaagctattcgtcctactgttaattatgaacaatcatgcagtgccaatatctgagtatttatacacgcaatcggaatgcaataaacgtgctgaatatttaatgtcagtgaggaatgttaatgttgtttgtggtgaggtgtggaatgaaagataa

SEQ ID NO: 314830 - DNA, 330 bp, Proteus mirabilis
atgaataaatacaccgaactatctgacttcgagattaataaaagggttgcggagaaattagggattactcatgaatgcgatatggggactgtaattatatatagggattcagaacaccatgctttcgacccctgcaacaacccagcggatgcaatgccgattattattgagaatggtatcgcaataattccgtttattacatccacgccagttgcttttgactcaactaaagggttgtatcttggcgcatttgttgaaaatgaaaatatataccgcgccgctatggaggtgttcttaataatgaaagaggcggagaatgaagaagtatga

SEQ ID NO: 314831 - DNA, 1068 bp, Proteus mirabilis
gtgtacaagaatgaatgttggcaagtagttagcgtttctcatcatggtgtacagcctttaggagataacagtgaaggacaaggtactcaactttctaatcacgttacctttattccaggtatgcaagagtggcgaccaccatttcattataaaccattagctgacggtgatgaactagctacagttgttggtccagatggagaagaaatttataccaatgaacaaggtgctgtaaaagtttattttcattgggatagaagaggaacgcctgatcatagtggatcgtgttggcttcgagttgcacagggatggagtggtaatggttttggctttatggctatcccgcgagtaggacaggaagtgattgtttcctatttaaatggcgatattgacagacctattattacaggatgtacttacaatggtcgtaatacaccaccgcttgatttaccgaaagaaaaaaccagaactatatttcgtagtaaaactcataaaggtactggatttaatgaaataagatttgaagatgctggtggtcgtgaagaagtgtatttgcatgcacaaagtgatttaaatattcatgtgcaacatgatagtcattggcataccgaacatgatgttaggcaacggatagataatcaaagagtaactgaaatagctggtgatgagcattttattttgaagggaacacaaaagtcattaattgaaggtaatgtttcattacaaatcaaaggcgcgaagcattgcaaagttaatgatgcattaatagctgaaagcggtagggaaactcattttaaaagcggtggaaaaattattcttgaagctgtaagcgaaattaccttaaaagtaggaagtagctttatccgtcttaccccaaatgcaatctttacttctggaaatttagatattggatcaagtggaccaggaataggtcaagatcttaacattcaaccaccagatggtgttactccttttgaacaacccctttttgcgattaaaaaatattgtgttttaacagcaaatgaagctggtagtttattaataaaaccagctaaggacgaaaattaa

SEQ ID NO: 314832 - DNA, 1413 bp, Proteus mirabilis
atgtcctaccctcgttctttaataaattcgttgttgcttctatctttcttacctttttctttcgttcaagctgccgataagcctgaattggtagagaatgggattaatccattgtctgtaacccgaatagatgaccgtttgaattatatgttgtcggttaccaataataacggaaaaacagttcagcactggcgatctattgattgtaaacaaggcaaggctgagcttctatacaaagattttcttaatgatgatggagtaactagtgctcgttattatgggaaaagttatgcccgctatgcgcccgcacaaattgataagcagatgacagaagaggaaatccgtgctgtctgccagttacctataaaagagatgcggtgggaaaaattatcgacgacttctcaagatattataaccaatcttgttgatattaatagtgttcatgtgactggtgacactttatcggtacgaatgggatatgatatctcagagattacttgggagccgccttacgatgcaccactagaattaaaggttgagcactatttatataactgtaaaacacatcaaggtaatgctgtggctgcaatgaattttgatagcgagggtcgcgtgacagactcactgatcactgcggatattattcgccgcaaaagcagtttcaaaattgatactcaaatgacacagctcttcgatcaactttgcgagttaccagaaggaaaatcgttcacagcaaaagggctatttgtgcctgctaagaataagcctgcatcaacactgatgggcccttcaatgcctgacctgagtaataataatccgcagtggctgaataaatttccgctttcctctgcgattgagagccaagcgcagttattgatcaagcctttgatgcctcctcgttttaaacagattaactatacggaagtcagcgatttcggtaaggtcaatatacagcttgatgcacaaccggatggctatatacgcaagctagaagattatgacatttggacagtacaacgtttaacactggcaaatcagttacaattgaagttcgccatgtctatcagcaatgatacctcactgcttagcaagttacagacagatctgcattttccgttagcaataggtcaacgatatcaggcgcaatgggaagatattgacactaataagaaggtaacagcgtcatcattattctgtgatgttaccggagaaggagatgctcaaagtattgccgccaaatttagcgggaaatatttattagttgaatgtcgtatgacgactaaagggcagccgaatagcggtactaaactcgcttggttgcaagatttcaacatttttgtcccagtcgctatgcaagtgggcgataaacctgaaagtccagtcaaacttgaacatgttaatgtaatacgttaa

SEQ ID NO: 314833 - DNA, 1539 bp, Proteus mirabilis
atggaatcaggtgaaattcttgtgatagaccttttcgctgggccgggagggttaggagaaggagtatcttcggtaaaagatgaaaaaggcaactatccctttcaaataggtgtttccgttgaaaaagaaccgtcagctcatagaacattaacgacacgtgcttttttccgaaaaattagcaaggtgaaaggtgggttagataattactctcgatatgtacgtggtgatttaagtcgagatgagttttttgggttatatcctgatgaagctcaacatgcgatatcagaaacattaggagagcctagagcccttggtgttgataatgaacttattcatttgcgtatacgccagctgcttgattctcatcaaggacctaaagtattgataggagggcctccatgccaagcatactcattagcagggcgttcacggaacgctggaaataaaaattataaagctgaaaacgaccatagaaattttctttataaagaatatctaaaagttttaactatagctgagccggatatatttgtgatggagaatgtacggggtattttatcagctaaaattaatggtactgctatgtttccccaaatattagaagatttaagggatcctagtcgagtagagggtgaaggaaataatagaacagcaaaatataaaatttattcgcttgtcgtagcggctaaagatgaaaataatccaaactatgataaatcttcggattttttaatccgttctgaggattatggggtcccgcaagcaagacatagggttattttattaggggtgagagatgatataaatagagtgcctaatattataacgcccttaaaaagtattgtcacagtgggtgatgtactctttgatttgccgccattaagaagtggtttttcgaagaaaaaagatacccaagaagattgggaaagacaagttaatataaattcagaactcttaaaaaagatcctcaaaacaaggtttagcagtgaagatattgataaactagacttaaaacccctccttggtttacagcgtcaaagtagccaattgatggatattgaaagtaaaataccatcgcatttatatgattggtattatgaaaatcatcctggttgtgtattaaatcattctacacgtgggcatatgacatcagatttactccgttatgctttcagtgcagcatttacccaactaagtggaggtatttcaccaaaagctagagattttccagcagcattagcaccagaacatgaaaactgggatagcggttcttatgcggatcgttttagaacccaagctcgtaataaatatgcaactacaataactagtcatatttcaaaagatgggcattacttcattcattatgatcctaagcagtgtaggagtttaactgtcagagaagcggcacgcttacagacttttcctgataattatttttttgagggaaatcgaacgcaacaatatgttcaagtaggtaatgctgtacctccttatttagctaaacagataggagaaattgtcatgggtattttgcagtaa

SEQ ID NO: 314834 - DNA, 276 bp, Proteus mirabilis
atgatccagatgaatattgtgtcagctcccgatgggctacgtgaacaattacactacctcactagaatgcagttgatccacaccttagccgcatggcggccatatcgcaatgttcaggatgcctaccaccgtattgcactaaaatcgctagcccggagatatcttgagctacatgatgaaatagcggatttagacgttatgataacgtcaatagttgatgagctagcacctgaactaatcaagagtaaagtggtagaatatgaatgtgcgtcttag

SEQ ID NO: 314835 - DNA, 270 bp, Proteus mirabilis
atgaaaaaagtgcgttttactgagactcaaatcgtcaatatcttaaaactcgctgattcaggtatgaaaatcgatgatatctgtcggcaagatgggattaactgtgcgacttattataattggaaatcaaagtatggtggaatggaatttaatgatgttaaacgattaaaaaagcttgaagatgaaaatgccaagcttaagaaaatgtttgcagaagttagccttgaaaatcatgcaatgaaggaacttttcgcaaaaaagggttggtag

SEQ ID NO: 314836 - DNA, 1479 bp, Proteus mirabilis
atgactaataataaattacaaaaagattactcgtatttaatcattcagcgaaaattattcacccgtttagttcttacatacgaaataatattggattcgtggggctgtacagttaatgcgagtaacttatttaactcagagtttattcaatattttattgattctggaaaattttctgatgacttagttatcttagagttatttcagattcaagagaaaagagctgcttactcattttcttcactacgtcgagttatttttaactctgaaagttcttatcagtttttccgagagagaaattacgaaaactttgatgttagttcactaaattgttatgtgtttccttatcagaaaaccaatgaaattggcgctgaattagtattgaattatccatctaatcctaccaataaaaatgatttagtgtttagtgatggcataattgcactggttttcaatgaattatctttcggtgtgatcccagagttaaatttaagaaagtcgttaaccaattcaaatagtatagaatcactactttttttattattcaatgaaaatgaagttgaagaccccaatgatattaaagtgttaaatacatttatagttctttgtttggagaatagcctcgacagagggtggaatgctgaatttgtattgcattctttgagggagcaaattagcaaaaaaattagtgaatctgaaaaattttcagtctggaaagacaaaactaatgatttattatcaggtaggaaggttaccattccattggatgataatggctcagtagtccttagagctatcatgttagttttattaaacccagaactagataatttgcttacaattaaaaatacactaaccaataaaattggtgacaaagttttttgtatggcaaaaaaacttattttgctcagaactggctttagtttttttaattttgcagagagagcaaaattgggagagactcgcacatttgttagagatctaaatgcatccttatacaataaggagttctctaatctctgtcctttgccagaggttaatgaagaaaaaactgtagaaataatatcaaattctgttccaaaaaatgaaaaactagccctgtcgagtgtgacttttctcagtaggcttgatgataaatttgaaggaaacgacgtatattcaattaaaggaattgttcctaattcgggctttaacgcacatctaattgaaaaggtcagcggcgaagtttttatatggcttatcgatcggcgagcaactaaaaattctaaatataaagggaagatggctactgatttgttacagatacaatcttcattaccctgtgaacttagattcgaagtggatgaccaaggtgtttatctaaggttgtttgagtacatcaaaactgagtctgagctgttagaactactgaaacttgtttatcgggagttagtggtcattaaagctttcaatattcgcaagagtatattagttaaataa

SEQ ID NO: 314837 - DNA, 1245 bp, Proteus mirabilis
atgcgtatgcctaatgctcgtcaaatcagtgaggaacaacaggatatatttgaagatgccccaatgacagggcacatattgatcagtggtcctccaggaacaggtaaaacagtcattgcttttttacgcgcaaaagcgcttgcgaagaaaaagacggatgtgaccgtgctgatgtttaatcgagtattaagacgatatactgaaaatgttgcacacaatattccgggaaaagtggcgtcaaaaaccatgcatagttggttacctgcgtggtggaaaagacacaaaatattaagagaaaatcagacagctgctcaaagtaatagggcaattctatccaaaacatcaaagaaatcttcgagttacaagagtccttatggtccgccagagattgaaccttggttctatgattggaacttaatgcgtgagcaatacgttgaacttgaggataggcatgttattgattggggacatttgatcatcgatgaggctcaagattttccgtctaaaatgtttaaatttttgcgtactgcagccaagcctatgaagtatggaggaattactatcttagcggatgaaaaccagcgccttaatgaaaaaaataattcttctcttgaagagatacgtactaacctgaatataaaaaaggaagatgaattcaggttaacgaaaaattttcgaaacacgaaaccaattgctgaattagcaaaacatttttatgcagggctttctagtggaatccctgagttacccgaaaaatcaggtagtttacctaaattaatagcggttacagaacaaaacaaacaggtgagttttatttgtgattttcttgtcttacgcggtgctcaggaagtggcaattatagtagattcagatgttgatagaaaattttatgtggataatttaggtaaattattacctaaatatgtagtacagtcatactccagctccgagtccaaaagtagtgaaatgctcagatttgaccagcaaggagtgataactgttttgaatagaagaagttgcaaggggctggagtttgacactgtattcatcccagatttgcaaaacttatcttttaatgattctcaattaatggtctttaacatgaatatgtatgttatgtgctctcgtgcacgttctgaattattcttaatgtatgttaaaggaaggttattacaagcgcccattttaaatcacttgcctagtgcatcttcaggcttgatagaatatagagactacaatgactaa

SEQ ID NO: 314838 - DNA, 1800 bp, Proteus mirabilis
atgactgattctaatcgtagttatcgcagttcccagctcattagtccttttggacctggcgccatcattgatataggtgatgaatcattgatattaatggatattaagcactggccaaaaaatctcgaagagataaaactagaccgccttactagagaagcgggtgtctgggcactgaaaaaaccgcctgtgcttgaaaatcgctgggggaaagttaatcagcataactccttgttagcttatcggttccctgtttggatgttttgtccaaaatgtcggcatttgaaacgctggagtactgagagtcaagtaaaattacaaggtgttcctatttgtaataatcatcaatgtaataaaaaaactttggtgcctatgcgctttgttgctgcgtgtaatcacggccatttgcaagacataccttgggatagatgggcacatcaacatcaaaaagagagttgcccaatgccaacagaacagctctatttttattcaaatagtgaaatgggtagtggattggatgcgctagaagtgcattgtaaaaattgtggggcgaagaattcccttggaaatatcatgcatgaaggggcgttgaatattacttgttctgataaacagccatgggaatttaaatctagagacgatatgaactgtaaggaaccgctgcatgtcttgcaaagaggggcgagtaatctttactacccaatagttcgttccgctttggatatcccttatagtgctattcctagaggaattaagatccttgaggcgattcaacaacatgaagacgactataaaggcttaatgttggcattagggagtgaaaaagaaaaagtaataaatctatatgctaatgatttatgcgagaaaacaggtttttcttctgaggaaattattacagcggctcgttctggtagcgaagctaaaagagagtttaaaatccctgatgataaagagcttagactagctgagtgggaagtccttagtagaaggcaatatactgaaaataaatggattaatttcataactcgtgacgtgaagttttcaaatgtggagtctttaggatttaaaaagtacatcaagaagatcgtattggtagataaacttagagaagttagagcgttctgtggttttgaaagaataagacccgatgataatccagtattaatggaaccaaaaaaagggcaatgttcatggttacccgcgtgtgaggtttttggtgagggtatttttattgaatttgaccaaaaggcactagaagattgggagcatacagcatcaaagttcgttaagccaagaattgactcagtaagcaagcgttatgctgggatcacttcttcttacctacctgagccaacagctaagtttgtggttttgcacacgttcgctcaccttataatacggcaactgagttttgagagtgggtattcaagtggctctttgcgtgaacggatctatgcatatgaggggcaagcggggatattagtatatacagcggatggagattctgaggggagtttggggggattggtacaacaaggagagccaaagaggctgtttcctgcgattattgcggctcttgaaactgcgaactggtgctcaaacgatcccgtctgcagtgaattagaagctcaaggtgtaatggggttgaataaagcggcatgtcattcatgtactttagtctctgaaactagttgtgaaaataataacttattgcttgaccgaaaactattgataggcgatcaacatgaattagggctatttagtttgattatgaaggatctgaatgaggaattgaattaa

SEQ ID NO: 314839 - DNA, 3162 bp, Proteus mirabilis
atgtcatcctcaggatttgagtgtgcaagagcgcaattaattgagtatgttagaattcagttggttgggcctgctcagggtatgagagaagagatcaaagatgctccccacaagcgctatttattaggtacgctctttccaccgacagttgctttcgatgaatcagatgactcacaaggtgaagattcaataactgaagctcttagcaatgatttcaaaccatcttctatggcgatgtcttttgcggctcaaagtttgtcagaattcaaagtagaaatatcagctgcaaaatataccagagatcaattatccgtatggaggcgagaacctttagagttctccttcacattagatattggttgtagaaatgtgggacctatttcgattttcaataacaatgcacgtattgatatatccattcgttcttatatgacaggccaaattgttacaattgcactgtctaatcaaacaaagtcaggcgagcgattagacccaagagattgtttttttcaatgtaaattgcgtgctactattcagaaaggcgcattcttagaataccctaatagtgatcgattcaaacttgatgatgagcagaaagaattggctcttacatataggaatagggttgcttggggggtagggcatggtgtagctgttggctggaatataaatgagtcagcacgtattcctcatgaactttatactgatgtgatgccatgccatgaagttaaagggttcacaactgaactagatcataagaaaaatccagagctaaaagaaaatatgctcagtattcatcgtatcgctgatatggatgtagtttctgatcaaacattattatcggattttaaattacttgtagatgcttattcaaattgggccaaagaactggaacatgaaatattagatccgcgctataacaatgctaagaatagagtaatttccagaataaagaatgcggtacagcgtatgtattcaggaataagtttacttggtgaaaattcttactcaatgcaagcgttccggctcgcaaataaagcgatgttgatgcagatgctccattcgggttcaaaatttgctggttctgctaagcaaagagattgggggtatcaaaccccagaatatttttcaagtgactatgtcggtaagtttaattggcgaccttttcagttgacctttcagctacttgtcctagaatctcttatccccaacaaaagtgaaaagttttctgaatcacatgatgatgtagacctcttatggtttcctacaggtggtggaaaaacagaagcttacctcgccgtggctgcatgggagatgatttatcgtcgcttaaagtttggagctaatggcggtggaacagcggttattaaacgctatactttacgccttctcacatcacaacaatttcagcgtgctggtagtttaatttgtgctttagaaatactacgtaaaaaaaatatagaattactcggtaaggaaaaattcagtttaggactttgggttggttctgcaagtgcgccaaactcttacaaagatgcatatggagcttacaagaatgaaagggatgcggaagtgccagagaacccttttcagttacaggtatgcccttggtgtggtacatcgattttcccgaaaaagtactcagagagcgaaaaggattatggtgttcgatgtaatcaacattcagtgtttgagtttatttgcccatcctcaggttgtgaatttcatcagcatcttcctatacaggttatcgatgaagcactatacgaagtgccgccaagtttgctgataggaacgatagataagtttgctagattgacatggaaggctgaggcctctgctttctttgggggaaatgctaaaaggcctccaagtctaatcatccaagatgaacttcatttgatttccggcccgttaggcacgatagctagtatttatgaggctgggtttgacagcataatagaaagtctcgcttataagccgaaagttattgcagctactgcgactattagaagtgctagtcaacaagtgaaccggctatttggacgaaaggtatctgtttttcctccttctggtaccgacgaggcggattcttttttctcgaaagaggaccatagcaacccaggtcgtttgtatatcggggtcatgcctgctggtcatacaggccaaactggtctagtgcagcttggggctgcattacttcaggcacctcaacaacttggcttttcggatgttgttttagatagttactggacattacctgtttatcataattcacgaagagaactaggcaaaacgatgacattagctcgagacgacattccagctcgtattggtatcattgcgaacgaggcaaaatgtgctgatgcaagagatattaattctgttgaggaattgagtgcgaatgttaaaggcccgagaattcctgaaatcttagccaagctggaaaaagaactcggctcgggtgaggaggttgttgatgtactaccgtgtactaacatgatttcagtcggggtagatatcgggcgcttaggtatgatgctgattgttggacaacctaaaacaacagccgagtatatacaagcatcaagtcgagttggccgtaaaaaatctcgccccgcaggtattgtgtttaccttatattcagcgactaaacctagagaccgatcccactatgaatcgtttaaaaattatcatcaggctttataccgatacgttgaacccactagtgtgactccttgggctatgcctgctgttgagagggcgttgcatgcttctttaattgctctggttcgtatgacaggctatctgaaagataataaaagtgccaaagattttgataaaaatgatccgcagtttctaaaacttaaagagatattcaaacgtcgaattgaacaatcaatgtatggcatggatttaacggaaaaaacaaaggtgttcgattatctggatgaaattatagagaagtggcatttcaaagccaattgtagtaaggaacctcttggcttatatagttcggaaggggctggcaaacaattcaaaccactgataaagccattcaatgcgggcaacagtgaaagtgatgtttggaatacacttaactctatgcgtagtgtcgataccgaaacccatatcttagttcgaggagagaataatgactga

SEQ ID NO: 314840 - DNA, 1350 bp, Proteus mirabilis
atgagccagaacaataattctcttttatggtcgcagtttattcgtcaattacgtgaaggtgttaagccagcagtaggttgcactgagccgatttcattggcattagctgcggcaaaagcaaccgcattgttagcagagcctgtggttggtattgaagcgtgggtttcgcctaatttaatgaaaaacggaatgggcgtaacagtaccaggaacgggaatggcgggattacccatcgcggctgcattaggggcgacagggggcaatccggatgctggactcgaagtattgcttacagcatcaccacaagctatcgctcaggctaagacattggttgctgaaggaaaagtgacggttggcgtgaaaacaccatgtagtgatgtactttactctgaagcaaaagtatatagtcagtcaggttatgccattgtcagtattgctaaagagcatacccatgttgtgcgctgtgagtgtaatggcaaaattgtttttgaggatgataaaacgagtttgactcatgccggggatagcgtagaagaaaagccttttgcgaaggtttgtgctgaagatatttatcgttttgctctcaatgtacctatagatcaagtcgcctttatgctcgatgcggcttatctaaatggtgctttatcagaagaagggctaaaaaatagttatggattggcgatagggcggacgctggtttcacagcaagagaatggcttattaggtaaggatttactgagtgaaatcatgataagaacatctgccgcttcagatgcacgtatggggggcgctgtattacctgctatgagtaactcaggctcgggtaatcaaggtattgctgcaacattaccggtaatggtggttgctgaatttattcaagcagatgacgacactttattacgtgcattagttttatcacacttaatggcgatttatgttcatagccattttccacctctgtctgcattgtgtgcggcaaccactgcatcaatgggggctgctgcgggtatggcatggttactgacgaaagatttcaccaccgtaagtatgtcaatcaacagtatgattggtgatattagtggcattatctgtgatggtgcgtcgaatagctgtgcaatgaaggtatcaagtagtgcggcgagtgcgtataaagccgttttaatggcgatgcaaaatcaaagtgtagcgggtactgacgggattgtcagtgatgatgttgatagttcaattgcgaatctctgcgcattagccagtcgtgcaatgcaacatacagatattcaaattattgagatcatggaagaaaaagcacgccgtaatgccggggaaaagcagcaagctgtcaatgcataa

SEQ ID NO: 314841 - DNA, 489 bp, Proteus mirabilis
atggaatatttaaatacaaaaatgattattggcattttaattgccggtgtcgcaacactttatggaatggtttatttttttctatattatatcaagtgttggaaaacaaaagagcttttttctttcaaaaagatattgaagacatggctaattgtggtaattatcgcgcttgtgggagctgtaataatacaacttggtgataatcaaagaaaatcggaatttacatcagaagaaattcattttatgaatgaaaataaaccctacagccaatttactgaatcagataaaaagcttgcttcagcaataacacataagtgtatttataattcagataaaatatttgaacaatgtttacctaaagtattgccatgggaattgagctcatatcaacagaataatacccatcttcattattctgatagcgatgccagaaaatatgtagaaaataatttgcgtagcaaacataactattggatgaaccgaaaataa

SEQ ID NO: 314842 - DNA, 1125 bp, Proteus mirabilis
atgcaaaaaatttgtttttatgcgctttcttttgtccgcttagatactgcacccgatcccttggggccgtaccaccgtattctcgccggagataaagttttccgctttcgcgacagccagtttgaagatacttccgtactggaaaaactgacaaagggagagcaggtatttatcagcgcacgtcctctgcgctggttggcatccgaaaagcttggcgtgacagaaccagtaaaagacaaagccagtaacggggataatctgttgaaagtcggtatttcagcaggcgtactggcattatccgtatttggttttttccatatcgccagttttctggaggcgttgatcatatttatcctgttttccggtggatgctggtttttcatttccgctatgcaggcattattggtgtataacagtccgcggatgaaagcattactggcagtcttggagcgtgtaagagccggagatactggaatgtgtcgcacaccggagcagttgctgcctgataattctgctgaggataacagtaaatacaaacagatgcagactggtcatgatcttgattcagttcagccggaggatttccggtacggagagaaactggcactatgccggatgcggggagaggtcagcaatcttactgcccggcgggattttaccggtagtgggaaatcccgtcgtgattatattgagtatcagttcatctgcgacaatattccgtttatctggtgttatggagtgggaagtatggacggtcatattaatccgttatttttccgtaaagcaccgttttttcttgcggaaagtgatcctgtttatctagtagtcaaccagaaaaacggcatgataatcgggctttataatgaacgggataactgtgcctatctgagaccggaaggaatggttataacctcatcacagatgaaattcgggtacaaagtattattctgggcaggtgccggaatgtggtttctgatgttgctgtttacactaacagactggatgaaagcggacggcggagtagatcgatgggatattatttatggtgcggaaaccctatttaatacggggctactggtaaccatgattatcagtggtattaaaatatgctctgatttggattaa

SEQ ID NO: 314843 - DNA, 537 bp, Proteus mirabilis
atgctctatattattattttaattgtcattcttatcattagcatctcagtcataacgaaaaagaaatcaagcaatagtagtaacacaataaaccctgcaccattagacgcaaaggaagagacatatgctgtaaaattaatgaaagaaaacgaagattgctatttaaaaaaggcatttttaacagatagagaacgcgcatttcatagagagttaataaaagaaattggagataactattacataatggctcaagtaagagtagttgatattattaatcctaataaaaaatataagaaaacaagtaaagaattcaagtcgttatttagacaaatatctcaatggcattgtgattttgttatcattcaaaaagaaacatttgaaattattcatgctattgagttagatgattctacacataaaagaactgatagaataaaaagagacgaaatactcaatctagcaatgaaacaggcgggagtaacactgataacagttaataatatcaatgattacaaaaatgccataatatcaaaatag

SEQ ID NO: 314844 - DNA, 228 bp, Proteus mirabilis
atgtttattgaaaatgtattgattttttacggggtgattttggttgtcggtatgcttatttggggattttatgcgataggacatgcgatatatcgtcaccacttttattctcaaacgaaacgctggaaaaattcggaaatagtggatttatcagatgagcttgaagatactttttcatctatttatatgccgaagccagaatctaaggagagggaaaaatcaaaatga

SEQ ID NO: 314845 - DNA, 195 bp, Proteus mirabilis
atgaacaaaaagagaacagatacaacaattagaattaacgaagaaaggaaactagagttaaaaagaaggatcttagaaataggaaacaaaacaggtgaattattgaaacaatcagatttagtaaattatttaatagataactatttagatgatggggtaaaagatatcatagccaaacaacaacaaaaaaaataa

SEQ ID NO: 314846 - DNA, 738 bp, Proteus mirabilis
atgaaaatatatattgtaaatttagaaaaagatattgaaagaaaagcatctatcaaagcacagcttgatgctttaaatttagactatcaatttatttccgcagtttatggaaaagcactttctcaagaagaaattgctcaattaagcccagattttgagaaaactagtttaacattacctgaattaggttgtgccctaagccatattaatatatataaggaaatagtagaaaataatattagtattgctctaatattggaggatgatatcaagataaatagcgatcttattgaattactcgaatatatatcaaagcacaataatcccaataaagctgaggttattatattgggtaaggtcaacgagtatattgatagttttaaaaaaagaataaataagcagtattcaattgctaaagcgattgactcatctggtacctattgttattgcgtaaatcatttagctgcaaaaaaattactggaatttttacaacctgtttggcttgttgctgatgagtggaaactgttacgtgaaaaaaatattattagcctaaaagcagttgttccttctcctattacattcacggaacatgcacataactctactatctctaatgagaaaagaacagacaatacttattttgacattataaaacggaaaagaagcttaaaagaatcagtaagattaatattttggcgtatttttatacgaagctgggtaaaaaaaatacgcccatag

SEQ ID NO: 314847 - DNA, 276 bp, Proteus mirabilis
gtgttattttataaagatactccaatatgtatacaatttttaatatcaacacaatcaaagttagggttctttgttgacttttgtaatattggctatgatatggaaatgaaaaagcattcattaggtacaatagcaatgtggaataatatagttcaagctaataaagtagctaatgagcttaacttaccattatattattcatatggttttatgtctggtaaatataaacagcgttggtgtaatcctgcgactacaggaaaaataataatattataa

SEQ ID NO: 314848 - DNA, 273 bp, Proteus mirabilis
atgaataagcaagaactagaacaaatgttagctgatgaatatcattttctggctcaatatgaaagtaaattagtgactgctgaagctgagcttatggaagaatatagcagagatgaaaaatatggaaatggacatagtgagcaggaactggctcgctatcaacgtcaagacaaattacaacgaacagttcgccagtgcaagcagagcgtggctagccagaaagatgtgattgctaatttagagcaacaattaataacactcaatttgtattaa

SEQ ID NO: 314849 - DNA, 303 bp, Proteus mirabilis
atgaataaattatttaaacaaaaaacgaataataatattaatgttggagatacagtctcaggggataaactttataatttaatgaaagacactaatgatgaatattgcaaatactcaagacaaacgaataaaaatctcatttgtggagagcctaagtatactttgcaaaaaagaattacaggacaattaaaatatttacctacaaaagagttaaaagactacgattgttttgttgattctattacttatcctaatattggttctaatgtgtgttttttacgaaacattaaatatggaaaatag

SEQ ID NO: 314850 - DNA, 615 bp, Proteus mirabilis
gtgacgatacatcaagatattgtctggcatcctcatcaaatagggttaaaagagcgtgaagcacaacaggtacacaaaggatgtgtactttggtttactgggttatccggttcaggtaaatcaacactggctgatgcgctagagcaaaccttatatcaatactcgacaattcatgcgcctatccgcacctatttattagatggtgataatttacgccatggtttatgtcatgatctgggttttagtgaacaagataggcatgaaaatattcgtcgtgtaggggaagtggctaaactgatggtcgatgcgggattaattgtattaacagcatttatttctccttaccagcaagatagacaacaagtaagagaaaggtttgctcaagggcgatttattgagatctttgttgatacacctttagccctttgtgaagcacgtgatccaaaagggctgtatcaaaaagcacgacgaggggagatcaaacagttttccggtattgactcaccttatgaacgacccactgcgccagaaattcatttagacggctcactaccgattaatgagcttacacaacaaatcctcgcttatttacagcaacaacaaatttaccgctaa

SEQ ID NO: 314851 - DNA, 672 bp, Proteus mirabilis
atgcaataccccattaatgaagtgtttcaaaccttgcaaggtgaaggtgtttttactggcgttcctgcgctttttgttcgattacagggatgccctgtaggatgtagttggtgtgataccaaacatacttgggaaaaagaagagagcaagaaagtccctcttggagatattcccattaaaacacaagaaagtgatacttggggtatagccactgtcgaagatattttatcacttttccggcaacaacgttatagcgcaaagcatgtggttataacgggaggggaaccctgcctttatgacttacggcctttgacggaaggcttagaaaaggcagggtttgattgccaaatagaaaccagtggcacacatgacatcctctgtagtgaagcaacatgggtaacactttcgccgaaagtcggtatgcgaggtggattgaatgttttaccgagtgcgattaatcgtgccaatgaaattaaacacccggttgctcgtgaaaaagatatcgaagccctagatgatttattgcgattaagaactcaacaacctatggcggtcgttgccttacaaccaatcagttgtaaagagagtgcaacagcgttatgtattaaaacctgtattgagcgtaattggcgtttttcaatgcaaacacataaatatttaaatatcgcctag

SEQ ID NO: 314852 - DNA, 249 bp, Proteus mirabilis
ttgaaatataaaggacctgtaagtaaaggcccaaatcctcaaggtatgagtggcggtgccatgtattttttttctaaaggtcaagtattaaaggacgatatcaattcaacttttctttttgcaggtattggtttatctttccaaaaagatggaacaataacaggtataagtcgcgatagagttatcgaactacttaagcaatttaacaaagagtcaccacttgtctttgaaatccctcttcttaagtga

SEQ ID NO: 314853 - DNA, 201 bp, Proteus mirabilis
atgttaaaaggatcgtcccctcaacaatatcaattcgaaatcatcacactcgatgagttagcgactgaagaccatcttgttcgtcaagtcgatgcgattatggatttcgaatttattcgtgatgccgttgctcacctttattatcccaataatgggcgacctgcgattgaccttgttcgattggttaaaatgatgttgtaa

SEQ ID NO: 314854 - DNA, 471 bp, Proteus mirabilis
atgccaatccaaacggatcaatataaccccgtcggacaatgcacatacccatatggattaaacccactctatagccttatcgggtcagggaaagatactgccctatttccttatcataatagcggaagcgattataaagccactttcttcatcttcatattgccccgcaaagcgaaaaggacattcggtataattagggtcattctccgctttaccgtcgcggtaacgccaaaactacatttggccccacgtattcagtcgtcctgcccaactggcttgcccgccttcactgaatatctctcgcggggtgccttggtggtcggtgaccacataatgcagtttgccctgttgataacgcgccgtgggcgttatctctccgggttgatacagccattggatttgctgagacaccgcaagagtgccatcggcatatatcggcgtttcttctatcagttggtctcccgaccataa

SEQ ID NO: 314855 - DNA, 225 bp, Proteus mirabilis
atgaattatttaataaaaaaaaagacatcggtattagattttatctatatattaataataatggctactggaggggtatatttaacaatattcatatttggtgaaaaattcattattggttatttatttatatctcaaggtggaaataaagatattataatatggagtagccttctatttgtctttattcttgctgtgttttcatcacccaatataaaaaaataa

SEQ ID NO: 314856 - DNA, 300 bp, Proteus mirabilis
gtgaatatcgatgaattaattacccttcctgatttaaacaaattatcgggaaaagaaataggtaatttaagagctaatttagaattagctattgactcactcattacaggaatgaatatattcggtgagtttatgttttgggctgataataatgagaattactccgatggtaaggaacatcttggtgatgtgggattatttttaagccaagtgtcattattgatatcaatattaaatgacaaacttggtggagttgaatacgaaatatcaaatcgaaaaataaaagggatagaaaaatga

SEQ ID NO: 314857 - DNA, 705 bp, Proteus mirabilis
gtgagtgctaataactctccttatataactattgcaagccaatatcctcttaatgataaggagagtttaacacattattttaatatgttatttgataatgatataaatacagtttatgttctagcctcgaataatgatattgaagacgatcgctcaaaacctgatagtgaatatgataaaagcaatcctcagacgaaagggtttaaatactttagagagtatttagagttaggtgatataaagtctagtcatattgaaaagtgggcgttaaataaaaatgaaacatgtttagattgtaaggcatacattaaattagtaactaaagaaaacaataaggaaaagaaaacaataaactttgtccatatttataattggcctgatcatacagcaatagacgcacttaaattaagaaataccatcgatactgttggttataatttaaaaataaacccaacaaaagagaatattgttgtccattgtcttgcgggattaggaagaacaggggaatttatttctttaatggaaatgatgaaaatgatagaggcaggaaatacaaaaacaaaaagcttagaaagtattatctgtgacttaagggaaaaacgtagtatgcagttacttaaaaagagagaacaagttgatgagctgattaaatttgcaaggaataatgacattcctttgctcaataataatattaaaaagaaataa

SEQ ID NO: 314858 - DNA, 333 bp, Proteus mirabilis
atgagtaaatttttacctatcattgccttagcatctatttttatagcacaaccagctttagccgctaaaacagatacctataattgtgaggggcaagagattagagtttctttccctaatgagcagctagctgttatgtactacagtgatgagctcattgttttaaaagaggcagtttctgcaagtggcgcacgttatgttggtgaaaattttcagttatggtcgaatggaaaaaatgagtttaatttagccacaatatcagaagatgatattgtaaaaggaaaagtttctgacaacaaaggccgaatgtgtaaactggttaaacaaaactaa

SEQ ID NO: 314859 - DNA, 627 bp, Proteus mirabilis
atgaataatcaaatcaccagaaagcattatgacatgaatttatcgttagagaaatggttacctgtcgctctccctgatttcgaccaaagttatgaagtgagtagttttgggcgggttcgtagtgtagatcgctgtacatcaggcgttattaaggtaagaaaaataaaaggtaagctgttaaaaactagaatgcgaaaggatgggtatttaactgtaaatttccattttaaaggggttgcaaagcaatttgctgtacatcgtttaatagcgcttacattcattaaaaatccaaatgacgcaccctatgtgaatcataaaaatggagcgaaaacagataacaacgccaataatttagagtgggtcactcccttagaaaatattcaacacgcgataaaaactggcctgatgaaggtagcaagaggtgctgataatgagcaattcaaaggcaccataatcgctacaaataaaaaaacacttaaaacattaaactttaaaggcaaaaaatcactgattgaatttggttttgatcattcagcagtttacggatgtgtaactggacgaatgaaaagtcatcgaggttatacctttcgcagagtagaaaacaaagcagaggtgatgccatgttaa

SEQ ID NO: 314860 - DNA, 657 bp, Proteus mirabilis
atgaataaaatcaataacttaagtaccccaaaaatcccaccacacgggacgtttagtgtcatagctgggaatatcattaaaaacaagaagttacaaggagttttaagaatgggcaaatctgaggttggtaaacgtattgaatcattaaagctgcctaaaggcaagggattgagtttcattcaggcatacgattcaggcttagatttaatctcaaaacttgctgaagaaggaaatgtgagtgcgatacgactctatatccatttaatcaaaattatggatcgcagttcaggcgcagcaatgacagatatcaaatcaatcattgctgatacagggctttctcgtagtgctgtgtatcgttcaatcactgcgctaaaagaggcagggcatttgcgttgccgagttaagcaagtttatgaaattaatccagaaggcttttggggcggttatgccgatgggaaaaagaacgccttgtttatggctgagaatagcactgtaacgaaaggcgttcgctttagattgaatgcaggggcttcacacaagaaaggatcttttaccttacccgcaacatttgagccagttgaagacggcaaaaagccgagtagcacaactttagacgggaatgcagactcggcttctttggagggaaatgatgaataa

SEQ ID NO: 314861 - DNA, 462 bp, Proteus mirabilis
atgttaattacgttagggattagggctgaaccaaagcaaatatcatttgttgtttactcaaaaaatgaaaatacgcttttgtgtgtagataagatagttactcctaaagtacttacagttccagaaaaactaaaatatttaagaaatagcattttagatattctaagggagtattctattgatagagcagcattgcgagtagccgaaggttcagctgataataaaagtataccaagatattacattgaggccgttatacaggaagccttctccagtagttccataaaaagctattccattatgaggatgagcacagtcataaaaaaacttgggattgacaaggatgagtataataacattctaaaatcagcttcaagcttaaatgacatagataactctaaatttaataagaataccaacgaagctctgcttgttgctattgcggtggctaacaatgattga

SEQ ID NO: 314862 - DNA, 996 bp, Proteus mirabilis
atgattgaatcatcatatacaaacgcaacaatatcttttaaagagataaaagaacttgaagagcaaggtaaaaactctcgtgtttttaccgcgcacgataaaaatcttgattgtgaattagttataaaagagataaaaaaagatatttttgactttgataaatactttaatgaagccagaaaactttataactcatctcaccctaacgttgtccaaatacaatacgcggctcaagatgaaaaaaacatataccttggatttccatattatagaaatggttcattacataatttgatgaataataagccattagcagtgagtgacgtgcttagatttagcatccagtttcttagtgggctttatcatatccacacgaaaaaattgatgcactttgatataaagcccaacaacattatgctctctgataggggggaggctttactatctgattttgggctagctgagacaatcaacgatgatggcttcgcttctccagtaaaattatacaatatgcacagggcaccagaaacatttcatgaccaagagtatgactttacaacagatatttatcaggcaggaatgactatctacagaatgcttataggtcactctagattcgatctcgaatgtaatgaattgtttgaaaataccacacccgccaagctgattattgatggtgaatttcccaagaaaaaatacccgcaccacgtacctcgtagccttataaatattgtcaataagtgcttatccaccaataaaggcgataggtacccatcagtacagttgttattgaatgacttagcaaaaattgattcatcagacaatttgagttggaggatggtagttgattcagaaaccgtgatatggcatggaatcaaaaataatgctaaagttatatttagttatgatactaaaaataaagaaactcaaaaaatttcagcattttgcgccaaaaatgtgagcgacaaccaagttcgttcaatgttaactatatag

SEQ ID NO: 314863 - DNA, 627 bp, Proteus mirabilis
ttgaatgctggtgctgcctataataaaggctcttcgactaatgaaaagtattctattgatggtaatgtcaatattgccaatgatgtgtggcgtcataatctctctggagccatgttacgtaataaagatgatagtaatgttagcacctattattataatcttggttatgatcttgaccactttattacgcctgctttcttctggcgtagtactgtcaattatcagcatgactggattgaagatattaaagagaaaacagggattggcacaggacctggttggcaagtatggaatgatgagctaagtgcattatcatttacaactttgttaagttatcaaaatttaagatatcgtcacgatggtagtgcaaattacttacaaggtgctttagggtgggattacaaccaatatctttttgctaaaaaagtcagtgtttataccaaaggccatattggtcgtagttttgataatgatgtaagtctcgattttaatggaaaaattggtcttatgtataattttacagacagtattaatttaaatgccaatatagtgaaagaaaaaattaaaggggaaagaggagattccaataatactaattatactttcggtatgggatatcgttggtaa

SEQ ID NO: 314864 - DNA, 339 bp, Proteus mirabilis
atgaacggaaacggttggttcgatgacttacagaatgcacacgtttattgtgactctagcctgaacattattgatgtactacgtaatttgggcaattcaggtaatctaaatggatgggtcattcagccactaggaatttctggcagtcacacttggtgtttggcatctactaatggcataaaggttgcactttccactaccattagcaatatagcaatgacaagcaatgttattcctattgatgacttacaagacgccgctaaatccaatgagattacaaacgagctgtataaaatatttttaaataactatccaaccatccatgcaactatttcataa

SEQ ID NO: 314865 - DNA, 468 bp, Proteus mirabilis
atgaacatatatgaaggtatagtatcaaactcgttacttaagaagtttccatcgggttatcctacaaatgtaccattgactaattttgtggcgaattgtgttgatttagaaggggttcttgcctgtgctggtttattttgcccaacatttattgaaatagataatgtaatttataggaaagatggcactgatgaaaggtttaaaccatatgagggggatggtaaagataagaaaacattagaaatgactaataataatttttgtctttctgagttttttttaatggctgctaatgaagcaagtgaaagtgtagaattaatgttaaaattttctagtgtattagaatatttttggcgtcaaagattgaaagaactttttcctaaaaaaaattttgaatttatccattcagaaaatggattgtttgatgaagatggtttttgcatgacgttctatgaaattgaatactag

SEQ ID NO: 314866 - DNA, 1197 bp, Proteus mirabilis
atgaaaaaaaactcattatttactgtttcactgttatctgcgtttatttcattatcttgttatgctcatcaagatgttactttaaacgctgattcattatcagatgcacgcgtatctgttagtgatgacacaggaaaaacacaagttgaagtgataaatactaatcaagacaatatcgcccatatctattatgatcgttttgatgttaataaagatggtttatcattaaaaaatgataaagcagaattaattattaatgaggttgtttctaaaaagcgctcaatgctagagggtgaacttgagttacaaggaaaaaaggcgacagtggttatagctaatcctaatggaatatcttgtaataattgttctttttctggttttactgaggctaatgatattaagttaattattggtagcagtacagggaaattttctaagcaatttactttaacagatgagactattgattttagatttactgataaattaactaaaaatggattttcgcattttcatcgtcattataaagatatttcatctagaacgataaatattatatctaataatgtatcattggaagaaggtgattttaatgctgaatatattcgttttgatcttggtttaacaagatttaaccttaaagataaaaataaatataataaaagagcatctttacatataggcaaagaggctaaattaaatagtcggaatttaataatagcaggatatgattcctcagttattaataatggtgatattaatacgttatcattaattgcagcggttgattactgggagaacaatgatcgcgcatcgatatctataaatacagatgataatttatatagaacaccttatgatgatagaaaaaaatcaatgttaattgtatcaggctattatttgggtagtgataaatcatcatttgatattaaaaacagtaagttagatatttatgcagatactatgttttttgataaaaatgttactatcgttaatagcgatttaacagcatatggaaaatctttcgatatatcagacattatgttaatagatagctctcttaaaattaattcagatgatgagataaatattttgggtaaaatcaagggggagggtcgtgttgaattacaaggtaaatatggtaattttaatagcagcgataaagtagagttaacagaaaaagagctgctggattag

SEQ ID NO: 314867 - DNA, 219 bp, Proteus mirabilis
ttggcgcttaattatattgattgtttacataatgaattgaataaatttactaatgaaaaagaagttgatttaacacccacaatagaaacagtattacaaaatacaggaaaaaattttctaagcctgaatgatgtcgagcaaaccacatttaatcatgatgttaggaaaaaaatgatcatggatacacttttccgtattgttggatctagtgatgaatag

SEQ ID NO: 314868 - DNA, 303 bp, Proteus mirabilis
atgttaattattcataatgagctttgccatcgagctggcttttcgattgattggcatagaacgaataaaatggattacttgagagccttaagcgctgaaattaaatccccatcaaaagggcttttggataactacttatttcagtttataggtgatacccgagatcgaaatctttggggggagtctataaatggtattcgtggtttagatggtcaaagtatagaaaattccgtagatggtgagtacacggacatagcagttgctcaaaagtatcaatcattcaagatgaatagaggtctgtga

SEQ ID NO: 314869 - DNA, 333 bp, Proteus mirabilis
atgtatgtgaaacgtgatcattatggatacactttagtcactaaattagtaggaaaagaaatcttacattatgaagattttttgggtgttcatcggatattattcgaagcattctacccatgggcaggtcaagatcgtgccattaccgcgcctaattgtgcggtatctaaagctggtacgatgttttgccatcctcatcatgctcgattagctattgaggaggggctacgcctcggacagaatgtaaagtatatgcgtcagcatcttggtgaggtaatggtttttttgcgtatgggcatccatttcttgatggaaacggacgtactatgttaa

SEQ ID NO: 314870 - DNA, 1929 bp, Proteus mirabilis
atgagcaccaaggcatttcaaatcatccaagaaaagcgtctaaatccttggaaaggggaagaagaagttcgttacagttggatgatggctattgagtcagaaactggtcttagtcttaacgctgagagagggagaaaagactctagccttaaccatgttatcatcgaatttaaagcccctggcttgttcaaagggaaaaaagatagttccgcatttaaaaacgcgacagaagagcgcttactcccatacatacaacgtgaagctagaaatacaggcattccagaatcagactttattggtatagctatcgatggtgaacatatttgttttgcccaagtaaaaaatggaataatattaaccgaacacctaattccattttctgaatacgccgttgaacttgtcgttgatgcttttaattctgacactcgaagagcttttaccacagaaaacttactagctgatttcggccatggttctttaatggcaagaaacttcatgcaaacaatgtctaatggcctgttatgttatctcaacgcatcaggaaataataaagtaaaaatgctttttgaagagtggcgaactctttatggccaggtggcagatatgtccattctccaaaccgatgctattaataaagaaatagcatttaattggaatggagagaataaagattcacttcctgcccgattgtttgtcatacatacttataattcaattctaattaagttaatagcagcagaaattgtatcagctcacgggttaacttcaataaaacacccagcgcaaagtatgtctgctctttatggcgatattgaacttgtgggtatgatagaatcatctatagaacgttcggagatttttgaacaagcaggattaagcggatttatcgaagaggttatttttagctggtatattcaacttgctaaagacaacttatcgcctaatttattaccggctttgagacaaatcctatctcgcctgtctttataccggttggattatttagaaaaaacaagagacatattaagagatttatatcaaggattagttccaggaaaacttcgtcaaagcttgggggagttttatactccagattggttggtcgactttacagtagataaaatatctaatgaaggaatagtcagtaaaaaaatattagacccaacttgtggttcaggatcattccttcttgccattttacgaaaaaaaagagcactggctgaggagcaaagtctaaactataaagatacactaaaaatgctttgtgatactgtttggggattcgatttaaatcctcttgcggttcagactgctagagtaaactttttgattgaaatagcagacttgttagaaaaatgcccaggcactgaagtcgaagtgccaatattattagctgatgccatatattcaccagcatcctcaccagaaaacgatgatgatattgtcgaatataatattggaagtcaagtagcaaaacttaatattctattaccatctaagttagcaaacgacagagaacggctagaccttgtgttcaaaagaatggctcatgaagttgaatcgggtgccgaatttgacatagctagtgcacagctaattaaatttgggatacttactagtgaagaaattgaacgttgggaagcaccacttaaacatacttatgatcaagttttaaatctacacaagcagcaatggaatggcatttggttccgtatagttagaaattttttctggtcagctaccgctggtagttttgatattattgttggtaatccaccttgggtgagatggtctaagcttccagaactctataggtctcgagttaaacctacttgcgagcactatggcattttttccaaaacaaaaaggcatggcggtaatgagttagacatatcagcgatgataacttacacggttacagataaatag

SEQ ID NO: 314871 - DNA, 1134 bp, Proteus mirabilis
atgaaaccattgaagccatttgaagatgcttcaaatcatacatctattgccatatttgaaaaaatctctacttctcctaaataccctataccatattttgtttggaccccaaaaaagggatataaaaagacaattcctgcaactaattcaattcaaaacgttatggcaacactaaattctagtagaaatgaggcatttcctgttgctgatgaaggctcaccatgggcaattctcccacctgggcgattctccgctataaagcacctctccaagacatgtgagtggactaaaggccgtaaagggattactactgatttaaatggtgtttactttatatctgtaatacagagtaacggtgagctagtccaaattgaaagtagacctgaagcaggtaaaaaggatatagggcccaaacgagctttatgggttgaacctgatttactataccccttaattaaaggtgctggcgacttcgaagcctgttatctaaagataacaggaccaacatacaacaaagataaactttacacatttgttcctaatacaggtatatcgaataatgactaccaacttgctgagaataatcttttttctccaagattaaagagaactctgtcttggtttagaaattttgaaaatgtgttacttaagagatcaacatatagacgtcaaatgaaaggagcgcctttccatgctatatataatattggagattatacgtttaagccttggaaagttatctggcctgaaatgtcatcatcattttatgcagctgtagcaggttcagctgatgttccaattattggtgaaagagtctttatacctgaccataaagtttattatgcttcttttgacgacaaaaacactgcgtattatttatgcgggttgttaaactcaaatactgtcaaagaatggatagaaagccacaacatatctattcaggtcgcggatgtatttaagcatctgaatttaccagcatttgatattgaaaacatgctccatattaaactttgtggtttagttgaaacagcacaccaaacacatgagctaaagcaacgaaaagtaattatagataatatcaaaaatactgcagaatctatccttgagcaatgggcagaagactgtagagcctag

SEQ ID NO: 314872 - DNA, 798 bp, Proteus mirabilis
atgccttggggaactggtggtaatttaagttatagttcaaacattgataatgataataatatttcaaataccgttggtttcttcaatcgtgttgatgaaaatacttcatatagaataagtgcgggtaatcaacgtaaaggtggtcttgctaatgcttatatttatcatgaaatgaataatgctaagttaagcgcgtcagcagattatgttcataatcaatatactgcatttggtttgaatgtgcagggtggtttgactatgacaatgaatggtggggccatgcatagaagtaatttacctggtggtacacgtctgttagttgataccgacggtgttgcaaatatccctgttcaaggatatagcactcctgtctatacaaatgttttcggcaaggctgtcttacctgaagtaaatagttattataaaaataaaattaaaattgatattaataaccttccagaggatgcggaggttaatgacaacgtattattagcaacgttgactgaaggcgctattggttatcgtaaatttgaagttaattcaggtatgaaattaatggttgttattagattaagtgatggaaattatcctccttttgcagctcaaataacgaattcgaaagatagaaatactggtatagtaggtgaattcggtaatgcttatataacaggtattaatccaagtgaatcaatgactgttagctggggtggaaataaaaaatgccaaattaatttccctgataaaatagaaaacaatgggcaatctttaatactagcatgttccaatgttgtggaataa

SEQ ID NO: 314873 - DNA, 741 bp, Proteus mirabilis
atgactattctaaataaaaatttttgtatcgggttattatgtgttatttccacgagtgcacaagcagcactttccttagaccgtacacgagtgatatttgaaggagataaaaaatctgtttctttgaatgttgcaaatacaagtgaaaaactaccttatcttgctcaagcgtggattgaaaatgataaaggcgttaaaatccagtcaccctttgttgttgttcctcctgtacagcgagttgaacctggaaaaccgacacaagttaagatagaagctattaatgtcttacaaacattaccacaagacagagaaagtattttttattttaacctaagagagattccacctaagagtgaaaaagctaatgttttacaactagcgttacaaactaaaattaagcttttctatagaccagaaaagttaattatgagtggaacggatattattaataatccatggcaagaaaaagtagtgctacaagaaaatagtagtaactacactattgaaaatccaacgccgtattatgttactattgttaatatagcaaaggatgaaaaaagtaaaacagaccctaattttaatccagttatgctagcgccatttggtaaagatactataagtgttaatccatcagtattaggttctaaacctgtgattacgtatattaatgattatggtggacgttctcaggtatctttttcttgtgtaagcaataaatgcgctgtaaaagaaaaaggctga

SEQ ID NO: 314874 - DNA, 627 bp, Proteus mirabilis
atgaaactatcaaattttattttgtataaagttgttggattagttgttttctctttatctttaaatgcaatggcacaaaaagatcccaatcaaacactattccgaccgtacactagtactgaaggtattgatggtgctaaagggcaactttatgtttatggctctcttgttgaaagtccttgcaagttagcaatgacatctaaatatcaagaaattgatttaggtgttattggtactgctgaacttcaaagtattgggaagatcggtaaatcaatacctttttctattgaattaatagattgtattagaacaccagcaagtgcaacaaatgaaaagtcgggtacttctttttggagtcatattcaaccatctgttaaaattaaattttatgccaaaacagttcctttttaccctaatctagtttctgttactggtgcagaaggttttggtttagctattcttgataaagataagaaaacaatatcattgaatgaatatgcaacacctgagattttgcagcctgggcaaaatattttgacttacaatttagcaccagtacgaatctctcaagatttaaaagcgagcagctatacagcgattatttactttttactatcttatgaatag

SEQ ID NO: 314875 - DNA, 549 bp, Proteus mirabilis
atgaaaatgataaaagaaataattttagtaatatttgctcttatttttatacctaatatttcctattctgcttcttcacaaaataatcagactaatatttatgttcatggttcaatattaaatgctccttgtaaagtaagaaataagattataaatgtagaatttggcgatattattggcaaatatctttatatacacgatagaacacgtagtattcctttttctattgaattagatgattgtaaaactaatatagccaattctgttattgttacttttactggaagatcttcttccggtaagggactagatggttttcttgcattagatagcagtagtgtcgccactggggttgggattgggatagaaacggataatggaaaatttttacccctaaaccaaagtacaaaggctatgaatttaattagtggctataacgctttagcttttaaagcctttgttaaaggtgatgatagagtgttaaggaataagtcactcggttttggtgagtttttggcgacagcgacattcgtattggaatatccataa

SEQ ID NO: 314876 - DNA, 867 bp, Proteus mirabilis
atgagaagattatttgtattgctattatttttccctatgttctctattgctaataatgcttggtatgtaagtattcctaattatagaattaatccggctgctgagtggggtaaacagttcgaatatactgcggtattgtatctaagtgaggagggtttaaattcgaaagaacccttaaatgctaattgtttgaacggatgttggataggtgtaaatacacaaactttatctcatggcattgacgataagcgttatctcgatgttggacaaacaaagactttttttaaaggtacaactgttggtgacgctttaacagcactctatcagaatatcggtacctactattatgtacatcagtcatcagcaccaaatagaatagccgagggtaccgtatggtgtggtgcaattggtatatctgactcaggtagtggtgatggtatgtcatataaaataatggctggaggggagtgtggtagactacctaatccacctgatgtggaatgttctttagaaaccgcgggtatcgatttggatcacggcgaacttgttgtagatgaagtggcaggaaatactgtgtctggtgaatttatcgttcgctgtaactatgatgccaagatgtatttatcgttaatgagtcctaatgaagaaaatagcaatccttatataggcactagattaaaattaagacaaaatgaactatatagcttactcactcttaatgataaaccagccgtaaataggaccccgtttgatctaaacgccggtgataacagctttacagttacctccactcttttcactcctaccggccaagtagagcctggaccattctcaggttttgcttttgttattatgtcgtatatgtaa

SEQ ID NO: 314877 - DNA, 141 bp, Proteus mirabilis
atgcttaagctttctatttacgcaactgttttcgcattatttttaattttactgatcctttatgttgctattcgttggataaataacacctttatttttaacttaaaaactattaacaaatattttaaagtaaataggtaa

SEQ ID NO: 314878 - DNA, 1008 bp, Proteus mirabilis
ttggtttttttttcctctaaaaaatatcctgctcaatattgtgtagagcctaaagataggggatctgataaatattatccgttaacgttagatccgttaattacgccaccgatacaattatcaataacacactctcaaacgtcattacctgttaaggttggaaaaaatataaaacctttaccagcttattctcaaggtatttattttattccatcagtaacatataactgcacttatttacatgagcaatataatttagacaaagaactcattgtctcggaaattttgaattatgtttatcattcaccagaactatcccaagttattaaattatatcccgaaaaaaattacgttgattataatgcggtacaacctgacaaaaaagaaaaacgcttagaatggttaccgccgattcaggcatcacctgagttaatggatatttataaacagcgtgatttatcacctgcaaaattagcagaactttataaccaactctggcaacaagctgcttctcgtcctagttataaagggataccgtataatccttctcgtgttgctacggcgcaaatggttagcgatattcgtgacgttcgtaacctagatttgacggtggcgggtattttagcacaacctatcaatagcgcagggacaaaagaatgggatattccgatctataatgcgattacaaatacctatgtttctatggtgaccgtgcaacagaatgcagaaattgattggggcgaatatcctgatttacctttgccaccgttagatgcaatacttgatttatcgcctattttaaattcctttaaatggttatttgctattgatattaaatcgcgtaaagctgattgtcctatatttcctattaatattgattatcttgattaccatgatgtttattcatctcattgtgttgttttggacgataaccaagaaactattaatttattctttacattaatgtggggaatgttggggatatttattacatttaggcgtaaatag

SEQ ID NO: 314879 - DNA, 750 bp, Proteus mirabilis
atgcgcttatgtggttattttagggctaaaaggataatttcttattttatttgttttaatctgtgttttctttcttttcctcgtgttgcgtctgctaaccctttattattagcccccgttcttttagaagtgcctgctattgcggagttatttggcgttttaacatcttatttatatgtcggtgttgcaacaactgcggttacaacaacgacaattgcaattgccgttgaagtgagtcgaaacacaccgacaacaggggaagcaataagaacgaatgaaaaagaaaatgcggtcggttttttattatcagaatcggtgatcactttacaagatttaaatgttgataattataaaaaaggaaaagttactttagcgactgatgaaataacaggggctattgttgaatcggcaatatcacgttatggatttccgagtcgttataatcctattcctatttatgaatatatggcatctattaatgaaaataaatatcctgatccagaagcttctgtgacaggtcatggcttaatttctgatattattgcaccatatcaagtcgaagcgcgtgatataatagattatagtgataatccgcattatgaaacctatatttatgcaagtaatgataatgagctttttaattatattttaacgttcccttcttttatgaaagacgaatatcaaaagttatatgatgaatataattggtttttttttcctctaaaaaatatcctgctcaatattgtgtag

SEQ ID NO: 314880 - DNA, 243 bp, Proteus mirabilis
atgattaaaaaatgtaaacgtgttttattagcaggatcaattgcggttgcctcgattttatctgctccgcttgcgattgcggatacaaccacaacaacaaagccagattatactcaaatcacgggaagcgttgattttgctgatgtgggggttgccattatggcaattgcggttgcggttgcggggttatatgtgtgtgtgaatggtgttaagaaattaacggcgttcttacgttctgcttaa

SEQ ID NO: 314881 - DNA, 210 bp, Proteus mirabilis
atggcgacgttaacaggtgaaatatgcgataagacagcctcagtctgtcaaataatacaatttcgtcttgataatattcccattgaattaatttctaccatgccctttgatggggcgcaatattttgcttttagctttatagctattttatcgtgttggttatttagcttagggctagggcaattattaaattttattaaacgtgcttaa

SEQ ID NO: 314882 - DNA, 276 bp, Proteus mirabilis
atgattaaaattgaattaaatatcaatgactgcgctgttaaaaataaagaaattacatcaaagaaaacgggggaagttttaatttttcgtgagcaacgcgcttacatttataatggtggtatttatccaaaacaatttatgattagtttagataaagagcaattaccttatgaagcagggctttacaccttatcagaagattcttttgatgtcggtgattttggcgcattaaaaattattaacaatattaaattaattccattgaaagataaataa

SEQ ID NO: 314883 - DNA, 1125 bp, Proteus mirabilis
atgaataatcaatctctctgttctcataataatcttgaacatactgtttttattgactttttagcatttactacgccaatgtctgcttttaaagatctccatacatatcaagaggtaggctttcaatggcgtaaatatccttgcgtgccaaaccctctcttttattgctctcagcattacagttgcggtaataacggcaatcgtgcattaaccgatgaacaatcagcgcgttatttagccgatttaaatcaatgctattttgatcgtatgaaacttttctttgcggattttttcggcttatcaatgggcattccgcgcggtcgaggagggcatttttacgataattcagcggtgctttatagtgatatgggcggttatgaaccgatgggcacggtattctttggcggaaataaagacacggtttatgtgcaaatttcgggcaaagggtgtgcgcatgtgtttagttatacgacacctaagcgcatttacaacatattaaaccatttagatatcacagagttaaaacgtttagacttagcaaccgatgattataacggtatttatacttgtcagggcgctttacgtgattataaagatgatgcgttttatacaggcaaagggccgaagccttgcattgaaacagcttttgcgatcaatgccgatggcgagccaacaaaagagatcgtgacggtcggttcgcgccaatcgcgcacttactggcgtatttataataaagcattagagcaaaaagtttcgggtgtttggtatcgttcagaagtcgaattaaaatctgtaccgattgaaaatctattaaatatttcaaatgtttatacgggaatttgtgcttattctcagcaaatcaatattgctaaaccgataaaaattatgagaggaaaagggcgtaaagccgttgattctcttgaaaattcgttacgttggataagaaaacaaggctctcaaacactggcaaaagtatttcattttgtgcaaggcgatatgaatcaatttattgatttactgattcagccccaacatttagatgatttgaatttacagcttaatattccttatcaatatcaaaacttattacgagagaaattaacgatttctcaggctcctttttaa

SEQ ID NO: 314884 - DNA, 198 bp, Proteus mirabilis
gtgaatatcatttattttgactacatagaaaactacgggatcaatgctggcattggtgctgattgggatttctatcactcatttgatgagctggtcaaagaatgtgttcgcttatattccgataactttattcttgcttccgttgtcgtcaattccagccattttgtgggctactcagagagtcttaatcatgaataa

SEQ ID NO: 314885 - DNA, 219 bp, Proteus mirabilis
atgaaagagccgctaataaaaacgataagactcaaagactcagaagctactgatttaaaaaatatttcatatgaattaacaaagaaaaatattatgaatggattaaaagctatttatcgagagtcggatcttgtgcacttcatacttgaaagtaaaatgcacgaaattgatgtaaatgaaaaaggcgaactgatatttaaagaaccacaaaaaaaatag

SEQ ID NO: 314886 - DNA, 270 bp, Proteus mirabilis
atgctcgaaaagtatagatctatcgtttgttggcttaatttatggctaggcttctctctaataggctccgcacgagtttatagcttaattcatcaagttacttttatgaccatggaaaatggaatgatggatatttatttcccagaccctaccgtcgccctactcgtttcaatgggaattaccctgttggtaatgagtaatttttatttaatattccattttatccacgtagctataatcatctgctcaagaaaagctattagaatataa

SEQ ID NO: 314887 - DNA, 201 bp, Proteus mirabilis
atgcgtttatttaacggcatctccgacaaataccgttattcaattaaaattgctacattaattgcccctgtatatttattggctttgatattgccattagcacaaagattaaaaattatgttttgcgtaaaactcttcatattttattgcgctagtttattactaccgacgagtcgcaaggcctcttgtgcattggcttga

SEQ ID NO: 314888 - DNA, 693 bp, Proteus mirabilis
ttgccatatagagctgaagtgtatagagtattcatagcatcaccctccgatgtaaatgaagagcgtaatgttataacaaaagtaattcaagagtggaatgaccttaattcagcagaacgtcaagttgttttgcttcctcttagatgggaaactcattcatctcctgagtatggaaaaagacctcaatcggttataaataagcaagttcttgatagtagtgatttattgataggtacattttggacaagaattggtagtccaacagggattgcagacagcggtactattgaagagattacaagagtatcgaatagcggtaaacccataatgctctatttttcgaaggcaaaggcatctcctgatgatcttgatttagaacaattagataaattaagaaagtttaaaaaacaaacattaagtaatgctctaattgaaagttacgattcaataattgaatttagagataaactgtctagacaattagaaatacaaattagaactttaatgtcaaatggagtatcaacagggagtgtcgaaagtaaagctaatagtatttcattaggatttaaaaatgaaaatgatgaatttgtagattctataaacacaacttctaaaattctaaatgttactgatagtgaagatatcccagattatattgatacgcaagctgattttcgtgggtggcgattataa

SEQ ID NO: 314889 - DNA, 627 bp, Proteus mirabilis
atgagtggtatagaagatataagaatggagatgaaaaaagtcatggagtttggtagaggttgtttatttcctgcacatcaagagattcaatatatcacaatgcatactgaagttttgtttgaagatataaatcaaaatttacgaatacttaagaaggtgatgaagaaaagtgaaaataaacgatccattgttagtcgaaatgctattcgcagttcatgtgcttgtattgaaggtttttcatatgcacttaaaagtgcacttaagattacactcgataaatctagccaaaaaccatttagcaataaacagttacgttatattaatagctcatttataaatgaatctgggacggaaaatttcaaggcgtcattgaagtgttttgctagaaaatatggtgtcgatgtctcttatgtcttcggaactgaggagttcgataaactaaaaaaacttttcaatattcgtaatcgtttaatgcacccaaagaataaaaatgatttctctatatctagagaagaaaccatactattgcttgatgtgataatttggtttatgagttcttatcaaaaagtctttggggaaatattggaaaatataactacacaagcagatgaggcgctctttatatga

SEQ ID NO: 314890 - DNA, 705 bp, Proteus mirabilis
atggccattactgcatatattgggattaatgggtcagggaaaagttacgagtgcgtttctaatgtcattatcaatggcgttcttgcaggtcgtcgggtcgtaacaaacattgttggtattcaacctgatttaattcgtgaatattgtattaaagaaaaaaaagctgatgagtcaacgctaggctttgtcgtgagcgtgactgatgagcagtgccttgatgaggaatttttaccgtataaaggttctgatggtaaatgcactgttaacaccttttgtttagcaggggatttgattgtccttgatgaattatggcggttatttggttcagggaaaaagctcactcaaaaacaagagtcattttttgctgaacaccgtcatttttcccatgaacagacaggcgtatcgtgtgattttgcgtttatgacgcaagagctttcagggattagccgttttattcgcgaacgtattgataaaacgtttcgcatgaagaaattaaacgcgataggaatgaataagaattatcgtgttgatgtgtatgacgggcataagatttttaaatcggcgttaatttcgtcttatcatgcgaaatatcatgcaaaagtttttccattatacaagtcacatgacaacggtaacggcgttgaaatggtggttgataaacgccaatcgttactctcaaaacagttttttattttttgcacctga

SEQ ID NO: 314891 - DNA, 291 bp, Proteus mirabilis
atgtggggattattgagtagtgcttttaatggggcatttgctattttattgcgtgaattgaccattaaatttgtggtttttactgccttgacagtattaattgcgtctatcatgaatgttgtcattgattttatgccctcagaaacaaatattgtcgaacttttcgaattactgcccgattcggcatggtattttattaatttggctgaattaccgtttgctattcaaattatttttaccgctattgcgactcggtttatttttggcatgatccccgtggtaggacattaa

SEQ ID NO: 314892 - DNA, 789 bp, Proteus mirabilis
atgactgctagtgttcattattataattattatagcgttgattatgatttgattatatcagatgatgaaatagatcaaagagggctgattgttgatggttcgtcgggtgatatttttaaccaaggtgtgatgtgtgaaaatatcgattttcctcattcgcaatctttaacacatgaaattaatccttttattgatttacctgtaaaaggacgctttttaacggcattagcaaaaaataaaatagctttagggcaatttgttcaattccttaattccacatggaaatcgactagctcattaaagggttattcgggtattccttaccgtaaggagtaccaagtcactgagcaaatgttagaagattatttaagagaaaataaccttgaattcacgcaattagatttgtatgcgttaataactaatgaacgtattcaattatatcgttgggatgatacttataatatttatacgcaaagcgaaacaattgtaaaaggagaaaaaacaccgattgatgttggtcaatatccgatgattgccttagaggaattatcaccgccattgatggaagaatcattatttcctattttaaattcttttttatttttacatgatattaatttaaatattcacactcaaacttgcccaaatattacaattccttttttgggtgaatctatctcgaataatcaatattgcgacgtgattgaagaacagaaatcgttaattaaattgttttttacgttgatgtggtcattaactgggttaattattgtttttaggagccattaa

SEQ ID NO: 314893 - DNA, 969 bp, Proteus mirabilis
ttgcctccgattggtttagaggatttatatgaagggcaagcgcgttttaatcaaattttatatttaaacatagcctctgataacatgcttgactggaaagcatttcaagagacaggcatgttggaaggagtttattactctgcttttaatatatttttgaaaatccttgaggaacctagacctgaaaatgtaaatagcccgcttgtagcactgtacttattactgattgacattgctatcaatccattggaaggcttcccattcgacattgctaatcatgaaaaatttgtcttaaatactgatcctggttctcgttttatctatttatgtcgaactgtaaaggatttttatccacagtttaaaaatactattacagaatactctgcaaaaaattatttttatatatctaccgtattatgcaaaactttagggtatcatgttcccttggaatataaacagaaattatcagcttggtgcactaatcaagaaagtattaaagagttgctaaaagagaatgaagcatttaaatacaagaaaggcaatttgcttgttagattaatatttggcaggtttttaagcttccaactggataaatttcaaagtccagagtatttttgttggcctggcgtattcttacatggtcagcgaaactgtcgaaattttaatgtgctttataaaaaacaccaagcattatttaaagaaaatgaagatatggatataagcccagctatgctacctagcattgatgatgaaactcttagaaacactgccggagaattttattcaatgcttacattattcgaattatgtcgtcagtgggtgttctgtgatggggattttacatatgactttcaatggatatcggaaaaatatgataaggaagaagtaaaacaaatagtagttgaagtatttaggggtatttttggaatttcgccagaaaattttgaaatcgttaaacgtaaaccatag

SEQ ID NO: 314894 - DNA, 525 bp, Proteus mirabilis
atgaaaaatttgatatctcttttatcattattattagtcacttcatatacgtattcgtccacagaacaaggacatggtcgagttgatatgagggggactatagttgagacaccttgcttaattgatacgggaagtgcggatcaatctatagatttagggattattcctatttcatatatgtcacaatatggtgcatctccagaaaaagtattttcaattaaattgatagattgccagttggtgtcaacaacaaaagaaaactttcaatgggaaagtttcgatgtcacttttgatggagctaataatggtaattattataccgtcaatggagatgcaacaggcgttgttttacaaataaaagatacccgtgagcagttagctatccctggaaagagtatggataagatacaaatctcacctggggatatgtttttaaattataaattaagacttattgctgatggctctgatataagagcaggtaattttcatactattattatttatagaatcagttattactaa

SEQ ID NO: 314895 - DNA, 552 bp, Proteus mirabilis
atgaaaaaggttattgttgctactctaattactgctgctgtagctctaagctcatcggcatttgctgctggtggacaaggtcaaggttctggtgaagttaagttccacggttatattattgatgctccatgctcaatagaatcaaaaaacccaatcgaagttgatttcggccaaatatctcgtaaagtactggctgctaataaaaacacgggtgaaagtcatgttagaacatttaatattgaattagctgactgtgatatctctgacttaactgagaaacaagttactactacatttagcttcactgatgctggtcaagataccaacttagttggatttgatggcaaagagggaatgggtgctggtattgtaattacttctggtaacaacaaagtattgaacaacgttgccactaaaccacacaaattaagtactggtcctaacactctacaattcgcttcttatgtgaaaggtctaggtggtgcagatgaggactctattaaagtcggtgaattctacgcaacagctaactttactttagcataccaataa

SEQ ID NO: 314896 - DNA, 2517 bp, Proteus mirabilis
atgaataggaaaaaaattgtttcttttaaaattaatttattagtattctctgtattatcaacgctaaatatggcgactgtggtacaggctgatccgtctgctcatattgttgtgcaacaacagcaagaaaatagtaacgttgatattcttaatattgcagcggctattaatggctattccagtaattcattaaccagttttgatgtttctgaagcaggattaatattaaataatagtcctgatggtgctgatactcaattatcgggacatattgaaggtaatagtaatttatctagcggtgcggcaaaagagattactctagaggttaattctaaaaaagccattacattaaatggccctgttgaggtggccggaacaaaagcacgggttattttatctaatcctgctggaattatttgtagtagctgtaactttctgagtgctgaccgtgttgtgttgactactggcaaagtgaatatacaaaacgataccgttgatagttataaagtggaaaaagggaatattactgttaaaggtaatgccacttttgataaaagtgcgcaacagattgatttaattgcccgcaatgtttctattgaaacgcctcttgatgcatctggtattaatgtaaatgttataactggcgctaatgaagttaaagcacaagataatactgtggttgcacaaaagccaacaggtgttgtcagtaaatatagtttgcagatagtcaaaaatgcaggagtgagaagttcatcgctaaaatttataggtacagaagctaactcaccactgaaaaataatggtaacgttgaaactgctgggggaggaattgagcttattcatagcggtgcacttgataataataaaggtaacttcttatctgagggggatatttatcttgctttcgataaaggtgttacaaatagtacgggtgaaatacaaagtactaaaactatctcgatagaaactaaagaagcgaaagttgataatatctctggtggtaatatttctgctgatggaaatgtaacgatcaatagtggtgagttaaaaaataatgcctcctatattgcaagtaaagataaattagatattcaaacaaacggtaaaccaataacgaatagtgcaacggttggtgaaggcgtcggtatttctgctaccaatggcattaaaattaatagtggtttatttaataataaagaaggtgaaattaattctaaaagtgtcattgatattaatactaacctaaaagatttcaataatattgatgcttatattgatgcgtcaggggatattaatattaacagtggcgcaatgactaatacccatagtcgcctacgctcagtcacacgtgtagaaattgatactaatggtaaagcgctgaaaaataccggtatgaccgcagatactgctagcgatgattcattaggtattcttagtggtctagatggtatgacagtcaatattgctggactgaataatgaccaagggattattgcgaccgatggcgatatgaacttcactaacaaaggtgacattaccaataaatggggacatataaaatcagggggatacttaacatttaatagtgataagatcaaaaacctctatggtggcttagcatctaaaaccggtgctaatgtcactttctcccagacattagataataactttggtgttttttacttagaaggcgataacgtcaccatcagtgcgccttatataaataataataaaggtgttattaaaggggatgctgtttattttaaaacagataaatttaataacacatcaggatttgtgatcactgaacagaaattagagattgatacaccagaactgacgaataacagcagtttagatttcaaaaccgaaatgggcttttatctggggcaacccgatcagaaagggggattaattagtaaaggagaaatgaagttaagtggtaataaattagtgaccaataaaggacgtattgtaacagaaaatggggatatggagcttaaattcacctctgttgataataccagtggtactattgcatcacataaaaatgcctctgtagtgacaagcacttttaccaattcacaaggcacattattcggccagcataaattaacactgcaaaccgatacactgaaaaacaacagtacaggttcggttgaaagtaataccttaaaaggtgttattgcgtcgagtggtgatactgaagtaacagttaatcgtgattttgaaaacaatggcgtcatttctggcgtagaacatttacgtgtaaatataaatggtaaatataccaatgccagcaatagtattatgtcaggtaaaaatagtttcgaattaggtgtgacaggaaatattgttaatcgcggtattcttaactcaataaaagacacgactatttctggtgagaatattactaatgaaaaatcaggtattattgttggtagagaaagtattactattgataataaaggtacgtttactaataaaggtaaagttgtcggaccgttaaataaataa

SEQ ID NO: 314897 - DNA, 456 bp, Proteus mirabilis
atgggcattaaagcacaaagctcagcacatacaaagtggctgtgtaaataccatattgtcttttcgccgaaatatagacggaaagtgatttttaataaaattcgttcaagtataggtgagatccttcgagacctttgtaagtataaaggcgtagaaataatcgaaggacatctaatgccagatcatgttcatatgttagtgagtattccaccaaagatatgcgtatcaagcttcatgggatatttgaaaggtaaaagttcgttgatgatctttgatagacatgccaatctcaaatataaatttggcaacagaaagttttgggcggaagggttctatgtcacaacagttggactcaatgaagccacaattcaaaagtatatcagagagcaagaaaagtcggatttaatctcggataaattgagtagtaaagaatatgaaaaccccttcaaggggtaa

SEQ ID NO: 314898 - DNA, 1002 bp, Proteus mirabilis
atgaatatcagcgtgagccgtaaaaagggcgttgattatatttatacggtgacacctgatttacctaaagagcaattaatttcatacacttatacgccacgttatcgctctgtagactatctttatcaagcgctgtcggtctttttttctgcaccgcttccaaccagtcaacgtcaacaaacggctcaaggtggacaggtttttattcccgttcagcctatcacgcgttatttaagcccaaacggtgatacgttattatttcgcggtacggcgtcagaagtagctcagcttaagcaattgcttgttgatttagatgtgcgagcggaacaagtggaaatcatggcgtatgtgtttgaagttcagacacaagaaaagaacgggtcaggcatggcattagcggctaatttactctctaatcgttttaaattagggattgggacagccagcggttacagtaattttctgcaattttcgggcggttcgttagatgtactgtatgagctgtttagccaagatagccgttttaatgtcgtcagttcgccacatttgcgggtgtcgtcagggaatcaagggcgttttagtgtcggttctgatgtgcctgttttatcctcggtgacatacaaagataattcgcctgtacaatcggttgaatatcggagtagcggtgtcatttttacggtaaaaccgttgatcacccgtgaagttatcgcgcttgatgtgaatcaacaattgagcaattttgccaagacagaaacgggtgtcaataattcaccgaccttgatcaagcgtgaaattgcgaccaatgtcaatctgcaagatggcgatattattgtgctgggcggactggcggaaaataaagacagcgaagcgaacacgggattttcatttttgcctgatatgttcaaatcgaagtcagacgaaaaaagtaaaacggacattttaatcgcgctccaggttaaaaaggttcagccgatacaaaaccgattgttaactcaaccctag

SEQ ID NO: 314899 - DNA, 300 bp, Proteus mirabilis
atggcagatttttatatttcagcaatccgtatggatagcaaagggcagcatatcgagtgggtaaaaacccataaaaatattgataataaatcgcttgatagtaaaggttctattaactcaagaaagtttgttggtgagttgatcagttccggtaaaatcacctttaaaaccgtaatttggaaccaatccactaaaaaatgggatatcggcgctatcgttgaagttatggccagcgggtatattacgactgacccaaacagaactaaacttgataacttggggaatttgcccttgttctaa

SEQ ID NO: 314900 - DNA, 1185 bp, Proteus mirabilis
atgtcaacaattatgtttccaaccccacctccgataattagacagcatctgaacaatgcaatcttttattataagactttgtatgaaagtcgttattcgtcattaattaatgtggataaatttaattattttaatgcattattaaatgctaatattgatggcttatgttatgcaaaagaaaaaggtttagatgaagctcgaatcgcactattacgttggaaaggacatgaggaagcttttatctatactttactttttaatgagttagatagtgaaaaagagtttgatagttttgggttgatgataaaagaactaggatttaatgctgttattggttcattggaggcactgctccgtgttgagataaacgctagaactgcacaattagcgctactgaaagaacgagagcctgacatattcattgtcgctttattaaaaataaaagcacattatcaggagctaatccatcatgataaattattatattatttaaatcttccctcaaaagaaattaaaatcgcattatgttattatgtaaaaaaaatgaagctaataagcttttccgaaaatattagaatgttagtaaatagctcgacagatatcgctgtaaaatatgctgccatagatgcgatgtgttggctttcaaatgataatgaatataattatatagcgttatctcaacttttaccattatatttggaagagaatgcacctaaaggaaatcaaagcttaattcattctaaaaatatagaaagcttagtccgtttaatgggatgtatatcgtccactaataataaattaatagcacctccgagtttgtatcctgaatatttgaatattatttattatactcattcatgtcatgcagaatatcttcctgatcttatcaattatctagataaccccgaattatcgaggctggcttataagggaatttgtattcttacaggtattgatgtcaattcgcctaaattaacatactcttctcctgaaaaagttgaagtacaaggcagtgataaatttgattatcgctacgacggttttggtcgcatggtatcgcgctatgaaaaaggcagtagctcggggcaacgttatcactatgacagtgaccaccgtattatcgcggtggatattgaccaagggcccttaggtatcagcgagcggaataccgctatgatatcttag

SEQ ID NO: 314901 - DNA, 777 bp, Proteus mirabilis
atgaacatcaaacaccttgccatagcaacttgtatcggcattgccgtgccgacaattgctcacgccaatacaaatgaattatcgatagaacaacgtttagctcggctagaagagagaacattagccgctgaaaaaagagctgaattagcagaacagcgggccgctaagttagaaaatgcgttaaaacaaaatcaggcgcttaataacaatctatcacaaactagcgaaactataactgcgccaccgtcatcgctaatagaaacaaataccggttatggaaaactcaagttatatggtgatgttgaatttaatacagatattgccagtaaaaaaggccagctaacctcaattaatatgcgctcaggtaaagaaaaagactatggcgattatgataaatgggggatcaatggacgtattttaattggcttagacggagagcgtctattagataataaaaattatgcaggcttcactgttcaaccactggcaaatattgatggtaaggtatctctcgacgacgctgctttttattttggtaaaaaagagcgttggcaatttaagttaggccgttacgaagcttatgacatgttcccgcttaatcaagatacttttgttgaatattcaggcaatactgcaaatgatacttacagtgatggctttggctatatctacatgatgaaagaaggtcgagggagaagcaatagcggtggtagcatgatgtttaatagccaatataataattggtatttttgccaacaaggaatatcacggaaataa

SEQ ID NO: 314902 - DNA, 1002 bp, Proteus mirabilis
atgaatatcaacgtgagccgtaaaaagggcgttgattatatttatacggtgatacctgatttaccgaaagagcaattaatttcatatacttatacaccacgttatcgctctgttgactatctttatcaagcgctctcagcctttttttctgcaccgctaccaaccagtcaacgccaacaaaccgcacaaggcgggcaggtttttattcccgttcagcctatcaatcgctatttaagcccgaacggcgatacgttgttatttcgcggaacggcgtcagaagtggcgcagcttaagcaattactgattgatttagatgtgcgagcggaacaagtggaaattatggcgtatgtgtttgaagttcaaacacaagaaaagaacggatcaggtatggcattagccgctaatttgctctctaatcgttttaaattaggggttggcacagccagcggttacagtaattttctgcaattttccggcggttcgttagatgtgctttacgagctatttagccaagatagccgttttaatgtggtcagttcgccacatttgcgggtgtcatcagggaatcaggggcgctttagtgtgggttctgatgtgcctgttttatcctcggtgacgtacaaagataatgcgccagtgcaatccgttgaatatcggagtagcggtgtcatttttacagtaaaaccgctgatcactcgtgaaattatcgcgctcgatgtgacgcaacaattaagtaattttgccaaaacagaaacgggcgttaataattcaccgaccttgattaagcgtgaaatttcgaccaatgttaatttgcaagatggcgatattattgtgttgggcggactggcggaaaataaagacagcgaagccaacacaggattttcatttttaccggatatgttcaaatcgaagtcagacgagaaaagtaaaacggacattttaatcgcgcttcaagttaaaaaggttcagccgatacaaaaccgattgttaacacaaccctag

SEQ ID NO: 314903 - DNA, 783 bp, Proteus mirabilis
atgtctgtatattatttaatgacaccaacagagttacataactatcgcaagctagacaaagcatctggtactgttgaagatctacagtctattattggagatgcgagcttagaaaaagtaacttacgtctatcttgatgaaaaattaccaattattggtatagcagcttctcatggaggagccacagaagaagacgtcgagtattatttaaatcaagtacttaatgggttaattccttcacctgaatacactttagagcttaaaccaattaactctggagttgctaagagtgatattaaaaatattcagatgctatctgaagcgaaattactgttgagaaataattctagtcagtttagtaagttaaaatctttttttaatgcatctagtaatactgacaaccttgaaattgaaatccgagttaaacgtaaagctaatagtagagtagacattaagcagcaaatagatcctctattagatataataagaaatgattctaatgataaggcctttgctgaagtttacttaagaggtaaagctcactcagcacaagagactattaaagatattttgctggataaagaaatgattgtatttgatattatttatccaaaatctggaaatacaattgaagcccaaattcaggataaaaggtatgctaataaacaagttaatgtattggcaaatcaagagtttaaccgctatggtttgaagctaaagaacgaaattccttgtttacaatgggctagtttgaagaatcagaattcttataaagagaaataa

SEQ ID NO: 314904 - DNA, 741 bp, Proteus mirabilis
atggaatggctacaaataaatcgatataacgataaaggatgctttttaaccgttgaagatcctgttgaatattatatttatggtactaaacaaagctctgtattagatgtcagtggaggcggatttcatgccgcaattaaatcagcattaaggcgagatcccgatgttttgatgataggtgaaatcagagatacggtttcttctaatgcattagcgggtgccgttgaaagtggacactattgttttacaacagtacatgcaggcagtatcgtgaccttgttacagcgtcttagtgcgttaagtattacgggggataagctatcaacgcctggatttatagcaggtttacaatgccagaagttaatgccgttagtttgtcctgtttgcagtcatgaaaaaaatgtagttattaataataggaacgttgctgttcgggttaaaaatcatgatgggtgtgaaaattgtaaatttaccggtattaaaggacggaaattaattgctgaatatatgcttcctaaacaagatgagctaatcgcgatatctaaaagtaattggcttgatgcttatattcattggcgaaaaaaaagattttcacgaccagggatcagcgaaggattctcaatcaaagaaaaaacaatgtactttgtgctacagggtatgatttgttacgactggtttatgcatgaatttggtaaggttgaagatgaagatatggaggtaatttttgaaaaaattaactaa

SEQ ID NO: 314905 - DNA, 480 bp, Proteus mirabilis
atggcaaatatcatctatatgtctataacaggaaataaacaggggttaatttctcgaggggcttcaactgttgattcgatcgggaataaatatcaggcaggccatgaagatgaaattatgatatttgaattatcttcaaatatttctatgaatcaaaatgtttgctttcaacctatcgacattcgtaagccaattgataaatcatctccactacttgcacaagcattaacaaacaatgaaatattaacatgcaactttttattctatcgcacagctatgtctggtgggattgagctatattataaaattaaacttactgaggcttctattgttaatctaaatttcttttatcctaactcaatcacacataacgattctcaaccagaagaaagtgtttctattcgttttaagtctgttacttgggaacatgttatggctggaacaagttcttatagcatttgggatgaaaggagtttttga

SEQ ID NO: 314906 - DNA, 210 bp, Proteus mirabilis
gtgtctcatatgcgggcattgtttaattttggaatggaacaagaattattacctcataaaaaaaatccttttaatggttcagtggttcgtgctggagctaaaaagaaaaaggttctgactaaatcgcagatggatgatatgtatcgtcgaatggcacattatctagaacttgaagaaaagcaaggttatggctatgtgtgtgacggatga

SEQ ID NO: 314907 - DNA, 501 bp, Proteus mirabilis
atgaatgtgtttcgttataccgctattcgtcaagggcaacttctgcatattaggttgagtgatattaatcttgaagagaagtggatacatttatgtgaggagggtgctaaaaatcaccgtgaacatcgagtgccgattgtttctgcattatatccttcattagctcatttactgaaacaagcagagaaagcaggagcagagccgaatgatcaggcatttaatgttgggtggtttgatttaatgaaaagaaagaaacatccaaaaaagatgggagaatattcattacgctcattttttaaacgtttatcaacagaatgtaattttattatctcacctcaccgttttcgacatactgtcgcaacacatatgatgcaatcaccagagcgtaatctgtatgttgtgaaaaggctattagggcatgccagtattacatcgacattagaatacattgatgaaagtgttgataacttgcgagatatacttgaagcggaattgatgtga

SEQ ID NO: 314908 - DNA, 195 bp, Proteus mirabilis
atgtttaaacgactaaaaagcaagccaaaatcaactcaattcattattgctggatacctagcgctaggccttgcttgccttcgctggtttttaattcccgaagaagctatgcatgacacattcataacattagctgccttagggattatcggccacggatatagtttgagtgaaaaagataaaaaaaataaataa

SEQ ID NO: 314909 - DNA, 252 bp, Proteus mirabilis
atgaaagcttatactttaaaagaacataaagattcaggagaacttcatctctttgaaggggatatgaacccagaaggctcagaatataagtgtagttcaggttcaaaatccatatgcaaaaaaatgaacactgctgacaataagggaaaccgatttgcatgtgctacagctcaagaagcaagggagaaaattgctaaaattggacgaaaagtttgtgggacttgtgtcagccatttatacgaatcatattaa

SEQ ID NO: 314910 - DNA, 936 bp, Proteus mirabilis
gtgtgtgattcgcatcaatggttatccgaaacatttacccgtattcgtaagcgtttagataaattaaatattcgtttgccaggtctgcgaaccgttgaacctcatgctgatgggtgcgtgcattggaacgttttgttttatgcgcaaccgcaagatattgatacggttttatcggtttatcgtgaagaagccttacgcgattgtcctgatgaaaaaggggcacaaaaacggcgtgtcaaaatcaaattaatcgacaaagaaaagggtgacgggttttcttatgtcattaaatacattactaaaatggcgggttttgatgggtcaaaagggattgagaatttaacggataatgcctcatctgccacgttttccaatgcggtcaatcgggtgtctgtttggtcgcgtatttcaggcttgcgcctttttcaatttttcggctgtccgagtgtcacggtgtatcgccaactccgccagttccgtcatgcgtttcgtcaaggggatattgccttaacccattttaccgaggatgaacgccacgccttagagtcgttacgttttgcgtgtgatgagggcgattttttacgttatatcgagctaaacggcggtttttttaatgcgcccgttgtccgtccttattacgtcacgttaacgattaacggtgactataaacgcaatggttatgacgaaatttgtaataaagccgtttacggtttttatttccatcaacatttaattattacccgctttaatacctgtgaggttcgcaaaatgaccgaagccgaccgtttagccttggcgcttgttcgtacgccagaacgtgagtttgaccctgatttcttagactgtttatcgaatcaatcaggatttgatgattatgaagatgaatttgaacacggcaggcgaacgccgagtttattagaacaagggagcttttag

SEQ ID NO: 314911 - DNA, 189 bp, Proteus mirabilis
atggaacaggggataagcgcatctaaaatttgccgtttacgttcaaccgctgtttttttacgcacggtgatgatgttacacggtcacttttccccgctgttttccttttttgatggccttttgaaattaaagggcactcaaggcgacggcaggagccttgcgcgccctttaatttccttggactcgtga

SEQ ID NO: 314912 - DNA, 378 bp, Proteus mirabilis
gtgcattgtccgacggggtgggttgatccgttaggacttgcaggtgactgttgtgataaactgttaaatccagattggactaaccatggttttaaacatttccctcagaaaaatatgtcttggaaagatattgtcggatcaactaaaactggtcctgcgaaatataagccagagataaatattgaagcattagaacgttctgtttatcaaacaggtcaacctgttacgaatggtaagccttggaaggttcaagatatggggaaaattattggagcaagtgaaggtaagccaagtcaatggatgagggttgaatatagcggaggcactatccatgggcacccaatctctctcaatgaatttaggaagctaactaagtga

SEQ ID NO: 314913 - DNA, 423 bp, Proteus mirabilis
gtggttgccattcctaatgaagcaagtatgaaagggcgagctttattgttacttgcagaaaatcatctcatttctttaaaagaaggggtcggttttttaccttccgttgaagacattattgataatcctaatgccttgatatttcatgaagttgaaacccccatgttagttgaagcccttgatgatcccgaggttacgatggcggttatcaacaataatttttcttctcaaattggcttacttgctacccgcgacggtttaattatggagaataaacattcgccttatgccaatgttgttgtcactcgtatagataatatgaatgatgagaaaataaagaaattaattactgttttacattcaagacaagtcgaattaaaggtacaagaaatgtataaaggggacgcggttaaagcgtggtag

SEQ ID NO: 314914 - DNA, 645 bp, Proteus mirabilis
atgaatgttgataataatacatcgaatatgattgaatatttagattccattgatggaaatactcattccaccaataagaatatcctcgcttcaaatacgcaattaaaaaaactcaattcaacaactgaacaaatattaaaaacgttaaaaaataataattcaggtaataccggttctggcggtaattatcatggcgatattgaaaaactcaataacgatatgaatcaaaatcatgaagcattaatgaccgcactaggcggaacgggtgagggtgagcctgatttatcgggattggaggggcaatataatgcgtctgccgatgaatacggacaatcttcattaactgccatcggtgattttatgtcgggattatttgatgatattcccgattttaatgtgaagtttgagttaccgcctgaattttacggacgttcccagcgttcaattgggtcgtgtattccgtataaaaaacaattgaaaatagaattaccttacggctattcgtatgacattaaattggatttcaccacgatgtgtgattattacgatggctattttcgcggggttgccacctttattctctattttatgactgcgttagcgtgttatcgattatataaccgctttatgttaagtcgcttttaa

SEQ ID NO: 314915 - DNA, 540 bp, Proteus mirabilis
atgcattctgcttctagctctaatttgccttttcaatctcacttagatagagatgtgttgaacagtcaattattgaatgcctaccatgattattctcatgcttcctctcgccaacaccaacctttacagttacaaccgcaatatcaaaaaaataaagaaaaagtttgccaatcaaaacgcgtctttgaggttatttctgcccattatcgcgcccgttttagtgatgttgccgactttttacctgttttagattctcgtgttcatcagattatttttaattttgcacctgataatctcgcgttttccgttgaatggcgcatgtatattgcgcatctcgtctcgtcctttggttcgttttccttttccgttgctcatgcggtttgtcatttagtcaatggcttaggcgttgaaaaagcggtgactcgattagaaacggcgtacggtttggcgttcgtgtcacccgagggaaaaggcaagggtattaatctgttttgtaccgatgaagatttacagcatatcgcggtcgattttacgcaatag

SEQ ID NO: 314916 - DNA, 237 bp, Proteus mirabilis
atggatactgaaccagaaaattatttagaattgcaagcattgcagccaaagagaataatagcacatccagatgtattcgagatcggagcggataaagattgtagtgtagaaatagaagcaaccatatatgcagatatattatctgaacctataattaaaaaactaatggttaatatagaagttaaaaatcttgatgtatcatatcaaacattattagacataacagaagatgattaa

SEQ ID NO: 314917 - DNA, 270 bp, Proteus mirabilis
atgaaaatgttctctgttgtgaaatcaaaagttagccatgcgtgtttagctgtgggattgatggccgtttctgcggtgtcaatggcggatacaaaagtgcctgatattagcgattatatcaatgcagaaacgcttgcgccgatcactaaatctattttagatgtggcagggttagcgattggggcgggttttactattatggctgtggttgtagctgctaaggcgggcatgggattagtaaaaggctttatgtctcgcgcatcaagttaa

SEQ ID NO: 314918 - DNA, 612 bp, Proteus mirabilis
ttggggattatcggaacaattgctgcgggtgttgtggtattagcacaacgtgcctttgatagtcgcgctgtgtctgaagttgtcagtaatgcgaatacaatccgtattgcaatgaaagatgcttatcaacgttcggccgaataccctgcaactgaagctaaatcattaggctatacagtggagaccatcaaagatggtaactctgacgaagcgattgcacaattagttaaactaggtaaattatcaattgatgaagcgcgtaatggtatctcgaatgacttctttaatgtcggtggggcaaaaacatcatcaggtacagacgctaaacgaaaaggctttttcgttgaagtgaatggcttaaatagagatcaatgccgtaatattttgatccaagttggtaatcagtgggattatgttgaagttgctcaagcagctgcgggtgattataacaagaaagcaactattgatatggctgcacaagttgcaatagcaaacgacgtaggaattgtgcgttcattaaatgctaatggtaatacaattatctcagcagacactgcaacaaatgtatgtaccgatactgcttctaactcaatcattttaggtagccgttaa

SEQ ID NO: 314919 - DNA, 600 bp, Proteus mirabilis
atgcaggttcagggactaaaatctattgtaagacctaaaaaatatcgttcttataaaggcctattaggtcgaattgctgataatcatctcgaaagaaattttaatgccagcaggcccaacgaaaaatgggttactgatgtcaccgaatttaaggtaaaaggtgaaaagctttatctttcgcctattcttgacttatttaatcaagaaattatttcctaccaaatagctagacgttctcattacaatatgattgagcagatgcttacccaagccttttcgaaattgactcagggaggtgagcttatactgcattcagatcaaggatggcaataccaaatgagtcgttatcacaatagccttaagaaacaaggtattattcaaagtatgtcacgaaaaggaaattgtttagataatgcagtaatagagaatttttttggcatattaaaaacagaatgtttttatacaaagcaatttagagatttggatgaactagaagaagaacttcatgaatatatcaagtattacaatactgaaaggatcaagataaaattaaaaggactgagtccagttcaataccgaactcagtctttacctaactaa

SEQ ID NO: 314920 - DNA, 495 bp, Proteus mirabilis
atggctaaatattctcttgattttaaactaaatgtgattaatttttatctcgaaggcaatggttttctatcaacggctaagcatttttctattgatacctctcaggttcgtgactggtgctccgcttatcaattgcatggtattgaggggattaagcctcgaaaatccaaagtaatctattctcttgagctaaaaatacatatattgtctcacatgacaaaacattcgctttctaccagagaaacagccgctctttttaatattccaacctttacaaccgtacgaaaatggaaaaatattatggatactcatggtattgaggcattagctcccaagaaaaaaggaagacctacattgactaaaaagaaaacagaattacctaagaatgacaaagataaatcgcttaaagaacttttaaaggaacttgagtatttacgtgctgagaatgcttgcttaaaaaagttacaagaattgcaggaaacaaaacgacggtaa

SEQ ID NO: 314921 - DNA, 456 bp, Proteus mirabilis; identical to SEQ ID NO: 314897

SEQ ID NO: 314922 - DNA, 189 bp, Proteus mirabilis; identical to SEQ ID NO: 299239

SEQ ID NO: 314923 - DNA, 282 bp, Proteus mirabilis
atgccagatcatgttcatatgttagtgagtattccaccaaagatatgcgtatcaagcttcatgggatatttgaaaggtaaaagttcgttgatgatctttgatagacatgccaatctcaaatataaatttggcaacagaaagttttgggcggaagggttctatgtcacaacagttggactcaatgaagccacaattcaaaagtatatcagagagcaagaaaagtcggatttaatctcggataaattgagtagtaaagaatatgaaaaccccttcaaggggtaa

SEQ ID NO: 314924 - DNA, 447 bp, Proteus mirabilis
gtggatattcatgttcgctttacacaaggtcaaagcattcgaaaaattgcccgtgaactgggtatttctcgcaatatggttaaacaccatatacagcagcaacagatgccaacgtatactcgacgcgtactcaaacagaccaaattagcaccatttgagccgtacctaatccaacgcattcaactggctaaacccggctggatccctgcaactgttttgtttgatgaattttgtcaaagaggctatcaaggcgggattgcgcaattgcgtcgtttcgtttgccagtttaaacccattattgcacctaagccgattgtgcggtttgaaacgcctcccggtcagcagatgcagattgatttcaccactattcggtcgaagtcaacagatgctaaaagcgttcgtggcgacactgagctattcccgagcttgttacgtcaagttctttga

SEQ ID NO: 314925 - DNA, 1332 bp, Proteus mirabilis
atgatgaagatttctgaaatgccgaaatatgaggtttataaagattcaggtgttgaatggctaggggatattcctgcgtcttggagcttattagctaataagcacatctttcgcttaaagaaaaaacaggttggaaaacgctcaagcgaatatgatttgctatcgcttactctcagaggtgtgattaagcgtgatatggaaaacccagagggtaagttcccagcagagttcgatacttatcaagaagtgcggtgtggagatttcattttctgcttgttcgacgtggaagaaacacccagaactgttggattgtcgccatttaatgggatgattactggtgcatataccgtttttgaactaaatgacaattttgataataggtttttatactatttttatatgaaccttgatgcaaaaaagatgcttaaaccgctttatcgtggcctgagaaatacaattcctaaagattcatttctgagttttaagacgtttgttcctccccatgagcaacaaacccgtatcgccaactttctagacaagaaaaccgctctaatcgacgaagcaatttcgatcaaagaaaagcaaattagcctgctgaaagagcgtaagcagatcatcatccaacaggcggtgacccaagggcttgatcccaatgtgccaatgaaagactccggtgtggattggattggtaagattcctgagcattgggaagtgaaacgaatcaagcatgttggaaagataatcaatggttatgcctttcctagcgatgcgttcattcaggaaggcgcgagggtgatgaagatctccaatattcaaaccatgcgtttggattggtcggatagctcttacgtagacgcattatggttggataagaccgctcaatttcgaatttacaaaggggacttggtttttgctttaacacgccccgtgatatcaacaggaattaaggctgcattagtagatactgacgagccaattctattaaaccaaagaaatgcggtatttaggccaaatgatacttgcgacaagaactggatatactttgttttactcactaaaggttttattaatgattttgagatgcaaatagacatcactggtcagcaaccgaatatatcaacagtggctattggtaatctgccttttccgttgcctccagaattagagcaaaaggtgattgtttcagaccttagtagaagatgtgctttattagatatggcagtagatgaccaaatagcacaaatcgaaagactcaaagaatacaaaacctccctgatcaacagcgccgtaacaggaaaaataaaaatcaccccagaaatggttgagcaatag

SEQ ID NO: 314926 - DNA, 234 bp, Proteus mirabilis
atgtggaaacaacacgaaaggataggtgagctaaacactaagaatgccgaattacttgttgagctgaccgaacaagtcaaaatcaatgcagattatcaagaacgcgtccaatccctccatcaactcgatacaaaacatactcaggaattagctaatgcaaaaattcaaattgataagttgcgtaacccgatgatatttttttgctctataatattcctctctgtcatcaagtag

SEQ ID NO: 314927 - DNA, 213 bp, Proteus mirabilis
atgtgtaatggtaaaataaaatggataagcgttgaggataggctgccagaaagtgcaaaagatacgtggtctgaagaggtgatagcacttagcgacactggggatgttttcaagctgacatgtattggaacttactggcaaagaactcaggcatttatagattcagggtcaagcaaggtaacacactggattccgatggaatacccagaataa

SEQ ID NO: 314928 - DNA, 228 bp, Proteus mirabilis
atgaaaggaacaacgctaacagagttgatgtggatatacgcggcagaaagaatgagccgcaaattaaaatatgtgaaaagtggcagaggtaaagttgattacaatagaacgttacataaaacatatcgcagcgaacgagtcttgtatcgcctaatgaaattagatgcagatgtgttttttaaatcgattaaatccagccatcaggaggcatctaatgcagggaactaa

SEQ ID NO: 314929 - DNA, 321 bp, Proteus mirabilis
atgaacagttttacacattatgggcaatttatgaaatttacatttccagagccagaccctaagaatgtttgcaatctttgcggtggcaatgtcggtaaagacaatttaatccaaggtcagacggcaaatatttgttttgagtgttctgatttagcgaaagaaattgcagatgaaaagcgtaaggaaatagctgaaaaggaaattcagcaaatggcaactgacttatcaactggtgatgttggtttggttgatatgggaatagctacagccagagcacatgccgagcgtttatataaagctggatatagaaaggtggagtga

SEQ ID NO: 314930 - DNA, 375 bp, Proteus mirabilis
atgaataaatacaccgaactatctgacttcgagattaatttagctgttgctcacattgtgcttggcaagggtagctatgattggcgccctgataaaaaagaagtttactttgcaggtattgatggtggtgaatttttacatcatggatacttcgacccatgcaacaccccatccgacgcaatgccgattattattgagaataaaatttcattgcgcgccccaaccataactgatagatggaaagcggagtttgtagatgagtacggcaactatgttggatatatcagggctctcaataaaaacccactacgcgccgctatggaagtttttttaatgatgaaggatgaggaggatgaggagaatgaaaaagtatga

SEQ ID NO: 314931 - DNA, 507 bp, Proteus mirabilis; identical to SEQ ID NO: 299798

SEQ ID NO: 314932 - DNA, 276 bp, Proteus mirabilis
atggtttattacttgttgatatatgccaatggaactatgaaaaaagaagaaatggattcatacacagacgatttcaagatatatccagagccaacgatgatgacatccataaatcaagtcccaactcatgaccgtgtcagatccttttcttcaaaaattatctacgataatactggtaaatcatttgcaatagcatatgagcatggagctaaccacattgatgcaaaagaaattatcaagcatatagaacggctaaatataccatccttaaaataa

SEQ ID NO: 314933 - DNA, 432 bp, Proteus mirabilis
atgggtaactttgctatttttattgtcatcttactcagtgcaatgatgaatgagcgagtatattggcgatactgtatcttttctgaaaaattttatttaaaaactaataacgaaagagagattaaaagaacgataatatcacgctattttactgttttttcattaagctatataattggggttgtaatagttttttttgtcacctcttatttaatagagattatttttaacagtcaaatatatatcattatttttcttggttttttcttgtcaccattaatgatatggttttttatgtattttttgaccaaattttatgtcaattattcaattcattatttgaataacttttctttatatagccgcaagaagaaaaaaattaaaatatcctatcttatcgttaatgaaggcattaatcattcttttatatag

SEQ ID NO: 314934 - DNA, 141 bp, Proteus mirabilis
atgttgaataataacaattttacaataatgtctgttgaacaatttcccattattaccatgcaggttttcccagaaacgttagagcatgctaataactggattgctgaaatggacttacccacctatcaacaagaaaaatga

SEQ ID NO: 314935 - DNA, 1332 bp, Proteus mirabilis
  misc_feature (1303)..(1312): n is a, c, g, or t
ttgggaaactatgtcgctcaaagagtatctaaaaatattagccaagaagaagctgaaaaaatcgctgcgatgtcctatcaccttcgtgctgagaaaacagagtataaatattatgttcccaaggagcctattccaacagatgaaatcttgatttttgatatggatttttatgttaatcgattaaatcgttatacgattaattttgcatttgaaaatgataatcctgtatatgaggatgaagttgatatcactttttttgataaaatcaaaacaacaaaagaaaaagcgctaaagagcttatcttcagagaaattagctgatggtttaatcaaagcaacagcaagaaaacaatattttaaacctacatggaatgaaaatgagcttttttattttaatacttataatggggatgatattattgccgctccattaataacaaaaaatatatttgatatttataacgggacaaaacgattaagcggtggaaagaaagacgatatatttaatgtatttacgtctgaatcacctcgctatgcgagtcgtttttatggtagagaagggaatgatactcttcgtgtcgttaagacaacgaataaatatatcggatacgaaattaacctatctaaaaattatattagatttagaaactctgaaaataaaaccaatagtcaaaattttcatgatagactttttatctttagacaccaaggtcaaatttatacacataaattagccgataaaatgcccagtatcgagttgcagcaggatgaggtgattgcctatttagatagtatagagaatgtaatagggtgtaaaacgggtgatgatattatttatggtaatgatgaagataattatttatcaggtatgggaggggttgacttattatatgggcaagcaggaaatgataccttgatcttgcaagaaggctatgcagaaggaggagaaggtcatgataactatcttattctacgtgcctctttagaagaacgttacagtgttctatttcagacaataattaatgaaatgagtcattcagaatctagtcttgttcgtttaaattatacttttgatgaaattgctgctattcatcggcgtgggaaagatattacttttgacttaaaagtaaatgatggaaataaggataatcaattaatctatcatttagtaactttaagaaatgtttatgctgatgctgatggtgatatgccttcattagcgcatcggtatactattgtgactatggatggctttatgcttactccggctgataataaagataaaaataacaatgtattgtatnnnnnnnnnngtatcactttagttatttag

SEQ ID NO: 314936 - DNA, 180 bp, Proteus mirabilis
atgaaaaattcaataaatgcaactttaaaacaagatgctagaatttttggcgcttcttttaataccctcgtatcaagagttgaggaaagatctgttagaatgccttctgggttaactagggagcaaagaagacagtgggcggcgaaaactctacatcaaaaacaagcactatcgctgtaa

SEQ ID NO: 314937 - DNA, 450 bp, Proteus mirabilis
atgagttctacacttgaaagcaaatggggtaaaggggcgttatctctgggttggacagccatacctacagtattgttctttatacaaggagaacgcaggctatcgccaacagcctttaatactctactaaatctaatagtgcactggtgggatattgatgaatggccacatccatccattgaaagtctagctataagaatgggattatcgacaagaacaatacaaagagccttaaacgaactagaaaaagccaatttgatagatcgaaagccaacacaaaaaaacaacaaaaaatatagagggcggaatatatatgatctgacgaaactaattgattacttgaatgttataggtccttctgttgctgatagagtaagggctcccaaaatacatcataatgtaatctatagacggcacgataaaagtaatgatgatggctatatactctaa

SEQ ID NO: 314938 - DNA, 180 bp, Proteus mirabilis
atgaagtggattacacataaagaattacatgatgaatttctcaaaaatccggagtacagagttgcttatgaaagagagcttaaaagtccggatcctgattatcagattattttccatcatgatgatggtacggaagagttagtttttgatacccgagagagtaaatatattgaggaataa

SEQ ID NO: 314939 - DNA, 399 bp, Proteus mirabilis
atgtgtataagagacatctattatagtagccggtattcagatactacggttgataaaatagataatttcattgagcattttgaacgttatggcttatttggaaatccagctaaaggtgagcctgcgtggattggtaaagtatctccatcttggaatcttcctgctaattatgtgggtgaagataaagaacacataattagttatgcaagacagaataaactatggcatgcccatattggcgatccggaatttactgtaacgtatcatggtaaataccaaacatcagattgggttattcactttcaaaagattgatgataatcatattaagcttcttgagcttgggtaccacaatcctatgagcctgccaacgaaagaaataatagacgaaaaaccctaa

SEQ ID NO: 314940 - DNA, 840 bp, Proteus mirabilis
ttgtttttttacgatcaaaaaaataaatcaaagctatatgccaataccgttttgcatttaattagtagtatgtttacatccccacttatggatatgtgggctaaaaagagaattcattacctaattgctagtcttactttaaagtatcatgatagaaacttccctgcggagtatattgattgcctttcaaaatcgccaactcgtagagagttctattcggaatatttctatgaaagtcataataagaaaaaagactataactccattgaggcctatgaagaaatcgctaccctttttagtatacttaaagcctacccgggtgattactatgaacattatgttcaggatagtcttaagttctttaatcaaacagttttcactcactccagctttattctagaagaatatttggaattttttgctaaagaggatgtagcaaaaccaatcgagctccatagagtaatatatgaatactataaacttcaagtcgctcaacgttacaggattaacttgaattactccgaatattatgagattcccgaggtggttacactccctatcaagaaatatgatgtttacgccactatattaaagcatgaaagaaattctaataggttcatgacggacactattatagaatctgttaagaaatatctattggttattgaagatactaatttatcgaaggtcttaaaagatattgaaaaagtggatagaaaacagactccgagatttccgattccatacaatttgattgttgagatggtaaaaagtccggagtcagtaaatgttaatcacctaaaggctttaagagtatcaggggtagacgcaacgatttaa

SEQ ID NO: 314941 - DNA, 162 bp, Proteus mirabilis
atgattgggaagattaattgtcgaaaagtcacattttgcccagcggttaaacaaagcactgaagtcacatttgatagaggaaccaaggttgctaatatcaaagccgctattcctaaaccttcaacgccaaataaatcagcgacaatcgctaaacctaaataa

SEQ ID NO: 314942 - DNA, 528 bp, Proteus mirabilis; identical to SEQ ID NO: 299658

SEQ ID NO: 314943 - DNA, 528 bp, Proteus mirabilis
atgatttatgattctgtatattggaaagatgagttaataaaattagcagataagctagaaatgagagtaattcaaagaagatggtgggataaatcttattacaccttagaaaaagaaatattcttgggtttttattctattagaaagctaattgaatcgcagaaaatttctaaaactgttgttgataagacattcaatgttcttgagtttaagtctaacgatcagcctgaatctataattaaagatttaagtttaagtgcttacgattttaataaagctaaaaaaacagacatgtctattttaaaactatgtaatcaatttattcatagttattatttttctccgcttattgtaaatcgatccttaataggtttttttatttgttcagattataaaagaaaatctgggatatattttattaccctgtttgaagttgtagatatttatcgaatagttggaggaaacaatcccaaaagttacgtagcaataagacaagataatggaaaaatagcgactcatatagaataa

SEQ ID NO: 314944 - DNA, 684 bp, Proteus mirabilis
atgaaaaatcgattaaaaaatgtatcagagcgcatgttaaaactagggcttgccgctttagcacatgcaaattggcacgcaaattattatagttttactggatatatgtggtcagaattatctgtgttacaggctgcacatgctgctgaaattttgataaaagcaagaataactcaagaacatcctttattaatttttgaacaattacctcgctcaaatcaaacaaatgaggaatttctttcttacaatcagttaatagaaaaaggaaagactattcaatatttcgatttacctgaaagattatgggcatcaactggaattaggattagtaatttagaactttatcagagatttggaaagctcagaaatagtattcaacactttgctaatcctattgaatacaattgttgtggagaagccagaaattttatttatgaagtaattgatccatttataaatgagtgctggggattatgtgctattgattttaatgaagatacggagccatatatctacctcattgaaactctatttgcaaatcaaactaaatttctagtatctgaacaagctgcaatttcttgtgatggtcatatatttgataatcctgataattctagctacaaaaaaattatgttagaaagattcaaattagcaggaggaactatattatttaatgaaaaataa

SEQ ID NO: 314945 - DNA, 741 bp, Proteus mirabilis
atgagcactatctatacattaaatgcaagaggatatttaatgcttgaagtcatgactgattacttcaagcttactcacgagcaagtattttcgcaaataaatcttatgcaccaagagcttgtgagtgttttaaaacataaatcagtcaagtatgaggatttacgatcggctctggtaccctctgtggataggtttgaggcaatctttgtttttgatagtttacaaatttcaagtaattggtatggtaacgaagttttcaaaaggataatccctttatttgacaaaagaagtaaccacagtatcctcgctggggactatattggttctagaaatagagaacaagatcagttcctttacaacgaactgacctcaaacttagaacctagaaatccatttgaatataaacattgtagccaattttattttgtttatataaataacctgtcacaggaaatgctagaaaaatttgatgtaggtctatctaactataaaccctatattggacatgtagatgtaactttttcaagtgtattaaaacagtattgttcaagaatattatgccattgtggaattaagcataaatcagtagttattatgtcccacgaagacgatagggataatgatgaaaatgtcaatatgttaggttatccatttgaaaaatacggatataaatgtctcagccttcaagataccctctttggaaatctcctttcttataaaattgaatgcccgggaaaataa

SEQ ID NO: 314946 - DNA, 231 bp, Proteus mirabilis
atgaagaagtcagagatgatatatttagataaatcagagatagaatattttatcagagaaaggctagcatctaactatatttataacatgacctatcttgaagaatatggaacatcaaaattcaatattatgcttgaaaaagaactttctgatgggcaaaaaattcgattaatgttagcgttagaatatatgccacaagataagaaattgcgcttaataacgatgatataa

SEQ ID NO: 314947 - DNA, 3333 bp, Proteus mirabilis
atggctactacactagatgatctattaggcgatgggcgactggtacgccttttttctaacgaaaatcgcgcttgtgcgcttcagctatgggtcttgcagattaaatctgaacaacagactgaattgcgcttagtctacggtcgcttactcccatacagtcattccagcaacggatggtccttcagcaacaacgacaactatcatgtcttgggaaacattaagataaaaatcactcgccttaacctatatatagacagcatccattgtgcggaacttttaaggcaattaactgctgggcaatctatctcagcaataaatgaggaactagggcttgaatgtccaaaaaacttaaggaagcagtttggatctactactcttgtaaccgataacttggtctatcgacctgttgcttatctactcaatcgagatgcacacgagcgcgggtcactttctagtccacataatgcagctggtgcactcagcgcttccattacccaaactaataagaaatcattatttctgttacatggggaatacagtactaacttaactgcattattagttgaacagctcgatgcggaaactggtttagattttggtggagcagatgccacgagatttggtgacctcgaattattggtgtttcctacactgaacgaccttgagcagaatttactaagtgtaaagtggactgactcaccgcgtgctttttgcactcgctttgatccagtgcaagtgccgttctttgatagatttcagtttcgcttaagcatcgaaaatgatggacaaatcgtctcctcggcaattgcttcagcagattgtaacgaggagggagtgtttacatatgtgtttcaagtgagcgaggagttacgggagagggcagatagcacagagttggaggtttttggcttttcaaatgatagtcctcttgagggagtgctctgttgtcggtggcgtgtcggatatgttcgagagattacttttcaggggcacgtgatgagaacaggaagtagtcccgtaaagttcgactggcttgaaaaagcaactaggccggttatgaccgatcgcgtaaaggctgcccttacggttaaccgtagcaacttagagtttggtaaccgtatcggcgggcggaaggcggatccttgggttacggcgaatctcgaactttcttctctttttgcgcggcttaatccgcctaagtcagaaggaaagtttttccagagatggaccatgggggatggtgaagggaggctgcaattcgtggaatggtttagatctctattgaccaagtatcagcagcatcaaattgtgattttcgatccttatttcgagactgctggattggggcttgtattgatttgtgcggcaacgaattcagattatattgtttttacgtcgctaccaaagccatcaaaggggggggaagatgcacaagacgaatgtgaacatcctatctcggggcgagttaacaatctgatagcaagctgtgagcataatcgtcatttactaagtcgcattaaattttgtatctatggcctgaaagaagggcgattacatgatcgttacattttagtcatgggggaagatgatcttccggtcgctgggtttcatttgtctaattcctttcaaaaagcggcagaaaattttcccttgctgatcacaccgatcccagcagatgttctgcttcaagtagagcaatataaatccgcgctagtgagggaggcaaagactactcaatctatccgtgaggctggaaatcccgctatgcggcttctcttcgattctacagcatcgccttcggcgcctcgacgctacgagcctctaagctttatcgaaaagcctgaggctggcagcgtactcagcgtttggtctggagaaaactcactaaagggtctgagtggtgaccagctaagaattcagatgacggcgttaggattacttagaaataattcccttatattgaaagatggattgaaaaactgcatcaatatgcaagaggtaaatattagggagtttatttcagcatgggaaatattaggggaaatactcgcacattcttctataggtgacatgaaattaagatatcttgaatccgaatgcgattttctggagtttttgaagcaatttcttaaaacttcgttcaagcgcgtgcatgacaatacgaacaaggagctggccacggtgaatgtgcagttctttcatatgtcatttgaagcattgctacgcagctcttattgcacaaaccatctattccatgcgacaaaatatgcagctttaacttggtccgaatactttgctatcagatttctatggtggtacgagccagattttctgctgaaaattgccgaagaacagatttcgattctaccagttgagcctgatgagagcgaagctgttagattgtctttattaagccagattgtcagcgaaatttcgttatcgatagaatttgatatcaacaaaattcaacttgatacccttgttcatagtggccagggcttgctgtgctggttggggcttaacgcagtcgagcggcagttatatacgcaggacggacttatctcggtactatcgttgctggaagttttttccaaccaagaacgagtgcgtgtactaggttggatgattaaccatgcagccaaggattcaaataaagagaaaatttataaagatttggtagaagcgctgcatgaggaactaccagagaaaatatctatgaaggaattacagtacttggtcgattccatgcgaggacatatgaaacaattagcatgggctgagccttggttgtaccaagatgtaatcttaccgctattgcagaatgcccgtgcctccactgaagatgcctgtgacatatggatgcaggagctggctagcatgttgggaccactattgaacaaccagtctcgtttgtttaatctagcccgtgaagggcaaacgactaacattgcttcgttacttttcgcttacagtagccctgaacagcgggaggccagcctgacgataatgaacaatatcttgaagcagcaacgtcggattctgcaacaacccctcgccagcacctcaggctggacacagtgggacgatgcactcagagtgtcgctgtggatattggccttcggtagatggagtgagttttatttgtgtgaacgcggcgagccagatcaaaaattggtgcagttatcccaggatgcattcggacttgcaatgcttaggcctatagaggaatggcaatcaaagcgcggaggtaggcaggatgaactcgttgttttccttgatcatgtggaggggcttttgaacttagatggtgagccgaaagatgctccaaaataa

SEQ ID NO: 314948 - DNA, 627 bp, Proteus mirabilis; identical to SEQ ID NO: 312361

SEQ ID NO: 314949 - DNA, 1053 bp, Proteus mirabilis
atgagtgatttaccagaacttcattggctacatggcaaaccgacagcgacagggcgattaaaatcgacaccagaagattttaaggtcagcgaagatctcggctttaccttagatggtgaaggcgaacacgtgatggttagagtcagaaaaacaggttgtaatacggcttttgtggctgaaaagttagctaaatttgccggtattcatcctcgagatgctagttatgctgggcttaaagacagaaatgcggtaacggaacaatggttttgtttacgtatgccgggtaaagagatgcccgactttagtcaatttacgttagaaggttgcgaaatattaacaaccgcccgccagcaacgtaagctacgaattggtacattaaaaggcaaccatttcaccttagtattacgtgatatctccgatgtgacatcggtggaaactcgtctagtagagatacaaaaacaaggggttcctaactattttggtgtgcaacgctttggtcgtaatggcgacaatttacgccaagcatggcgttgggcaaccaatgaaattcgggtaaaagagcgtagcaaacgtagcttttatctctcagcagcacgtagtgcgatgtttaatcatctggtgagccaacgacttgagcgtcatatttatactcaagtgctttgtggtgatgcgatgcaattgcacggtaaaagaagttggtttgtggcagaagaagcggaacttgcccaaacacaaacacgctatgaagagcatgatatacatattaccgctccattgccgggtaaaggtgacttaggtacacaagctcaagcactgatatttgaaaccgacaacttagctggctacgaagcattatggtcattagcacaacaagagcgagttgataccactcgccgtgcgattaatttgctaccagaaaatatgtcatggcattggttagatgatactacggtttctttatcgttctttttgccagcaggaagttttgccactagcgttgtccgtgaattgatattattagggaatattgatgctgaaaatattagtgagtaa

SEQ ID NO: 314950 - DNA, 321 bp, Proteus mirabilis
atgattagcccattcattttgggggtggtaatggggaaattaacagtcttacttctgatgttacttggttttctacaatattcattgtggttaggtaaaaatggtattcatgattacaacaaagtaagtcaagaagttgaatctgcattagcgcaaaacgcacaattaaagtcgcgtaatgatcgcttatttgcggagattgatgacctcaatggcgggcaagaagcattagatgagcgtgctcgtagtgaacttggcatgataaagcctaatgaaagcttttatcgtattgttaatgataaatcccaaccacgtcgttaa

SEQ ID NO: 314951 - DNA, 909 bp, Proteus mirabilis
atgaatgaaacacaattaactcatcttcagcaattagaagcagaaagcatttatatattgcgtgaagttgtcgctgaatttgaaaatcccgtcatgctttactcaataggcaaagattcttcggtgatgttgcatctagcacgtaaggctttttatccggcgaaattaccttttcctcttttacatgttgatacgggttggaaatttcgtgagatgtatgagtttcgtgataaaacggccaaagagtatggttttgatctcaaagtttatcgtaatccccaaggggcacaattggggatcaatccctttattcatggtagcgccaagcatacagatatcatgaaaacagaaggtcttaagcaagctctggataaatatggttttgatgccgcatttggtggggcgcgtcgtgatgaagaaaaatcgcgtgctaaagagcgtatttactcatttagagatagatctcatcgttgggatccgaaaaatcaacgtccagaattatggcaaaactacaacggccaaattaataaaggggaaagtattcgcgtttttccattatcaaattggacggagctagatatttggcaatatatctatttagaaaatatcgatattgtgccgctctatttcgctaaacaccgtccagttattgagcgggatggtaccttgattatggttgacgatgatcgaatagacctaaaagctggagaggtgatcacacaacaaaaagtacgctttagaacattaggttgctggccattaacgggtgctattccttcacaagcagacacattacccgccattattgaagagatgttaatttccaccagtagcgagcgacaagggcgtttaattgacagtgatcagtctgcttcaatggaacttaaaaaacgtcagggttatttttaa

SEQ ID NO: 314952 - DNA, 363 bp, Proteus mirabilis
atgataaccaccatctttaaagattttcagtttgaagctgcgcaccacttaccccatgttcccaaaggccataaatgtggacgtttacatgggcattcatttttagtgagattagaaatcactggtgaagtagatgcgcagtcaggttggctaattgattttgctgatgtgaaagccgcatttaaaccgactcttgataggctcgaccactattatcttaatgacattgaaggtttagaaaatccaaccagcgaagtactggcaaaatggatttggcaacaagttaaaccatcactccccttgttatctgccgtgatggttaaagagacatgtaccgcaggatgtatttatcgtggtgagtaa

SEQ ID NO: 314953 - DNA, 672 bp, Proteus mirabilis
atgcaataccccattaatgaagtgtttcaaaccttgcaaggtgaaggtgtttttactggcgttcctgcgctttttgttcgattacagggatgccctgtaggatgtagttggtgtgataccaaacatacttgggaaaaagaagagagcaagaaagtccctcttggagatattcccattaaaacacaagaaagtgatacttggggtatagccactgtcgaagatattttatcacttttccggcaacaacgttatagcgcaaagcatgtggtgataacgggaggggaaccctgcctttatgacttacggcctttgacggaaggcttagaaaaagcaggttttgattgccaaatagaaaccagtggcacgcatgacattctctgtagtgaagcaacatgggtaacactttcgccgaaagtcggtatgcgaggtggattgagtgttttatctagtgcgattaatcgtgccaatgaaattaaacaccctgttgctcgtgaaaaagatatcgaagcactggatgatttactgcgattaagaactcaacaacctatggcgatcgttgccttacaaccaatcagttgtaaagagagtgcaacagcgttatgtattaaaacctgtattgagcgtaattggcgtttttcaatgcaaacacataaatatttaaatatcgcctag

SEQ ID NO: 314954 - DNA, 1182 bp, Proteus mirabilis
atgacgcaaagtaataagtgttttaatactcaagcaatacattatggctactctccgttagattatcagggggcattggtgcctcctgtttttcaaacgtccacttttgcatttcccacggctcaatatggtgctgattgttttgctgggaaagaaaaagggcatttttatactcgtatatctaaccctacattggatttattagaaaaacgattagctcagttagagcaaggagacgcttctattgttttttcttccggtatgggggctatcacttcaacatgttggtcattattgcagccaggagatgaactcattgctgatatgaccgtttatggttgtacttttactttctttaatcatgggctggctaaatttggtatcactatcaaacatgttgatttaaccgatcctgaaaaattagcagaagcaattacagatagaacaaagcttattttctttgaaacaccggctaatcctaatatgcgggttagtgatattgaaaagatcgctaatattgcgcatcaacatgatgttttagtcatggttgatagtacttactgttcgccttatttacaaaagccactaaccttaggcgcggatattgtcgtacattctatgactaaatatttatcaggtcatggtgatgtgatggcgggcgcaattatcactaattatcaattagcagataaaattcgcgttgagggcttaaaagatatgacgggggcttgtttatcacctcatgatgcagcactcgtcttaagagggataaaaacgcttagcattagaatggaaaaaatttgccagaatgcgcagcttattgcgcaatttcttgaaaatcatcctaaggtggcaacgatttcatatcccggattaaattcttttcctcaatatgaacttgccaaaaagcagatggcgttacctggtggcatgataagtatggagttgaatggtggaataaaagctggcagagaatttcttaatcgcttaatgctttttactcgagcggtgagtttaggtgattgtgaatcattagctcagcatcctgcgactatgactcatgcgacatacagtgcacaagagcgtcaacgccatggtattagtgatggattaattcgtttatcaatcggtcttgaagacgttgatgatttaattgctgatttaacccaagcgctcgcttaa

SEQ ID NO: 314955 - DNA, 279 bp, Proteus mirabilis
atggaactaggtaaattagaatggaaagaaatatatactttaatttctcttctgaaagagatagaactaggtaaattaagagggaaaggaatatataatttagcttatattcagggagaaacagaactagatgaagataatataaataagggtaatttaaaagaagataatataaaatatgctaatattgttgaattaatggaagatcaagtatttacacaattaaatgtagatggatttaacataacagatagcgactatgcgttctcatctgaataa

SEQ ID NO: 314956 - DNA, 1005 bp, Proteus mirabilis
atgaaaactaaagatgaacgagaatgggatgtactagacagtgtctttgaattagatgaaaaaatcgtcgatgtcgtcaaatcagaacaaccagactttattcttgattatcaaggcacaaaaacaggagttgaaataactgagctatactacaatgactcaatggcccgtttccacaatcagaagaactatttaggagatattcttctaaataataagattcataaggatgatagaactattttaaaacccatggatataatttattatggaaaatcaaatggttatattccattcgaaaccaaaatattacctaaaccaaaatataacttagacgactttagaaaatcattttcactctcattagaaaaaaaagaagttagtaaaatcaaatataaccaagaactagaacaatgcagtttgattatttttgataaagaagatgccttcaaagaaattgatgcagataacttccatgcttcatttattgatgatggtattttcaattcagtaatatcgtcatcttttgatgaaatttttcttctagtacagctcaaaaataaccaaatgggctttacccaactaaaactcgcctgtctattattcgaaataaatcgacttttcgattacattgcagaaaatcaggataaattcaataatgaaatattatctaaagcaacccaccaaattgtttttgcagaggttcttctcagaagaaatatagaaaatattttcatatttaatatttacgagaagtttgtcaccagcactcaacaatatggtataggtttcactcatgaccctaataatactaacgaaataagtatttttgaccatttccctagattatataaagaaagtacaccagttacacttgaaagtttaccttataatctattcgatgatgatacattcaaacactattgtgaagaagttaagaataaaagaatgtcttgtggtattccttttttaaataagaaatatggttatcaatttaaaccgtaa

SEQ ID NO: 314957 - DNA, 249 bp, Proteus mirabilis
atggcgttcaattgtccaaagtgtggcgctgtgacttataccaaaaccagtaaatccatgagtagtgaaacccgcagaagttaccaccaatgccaaaatttgttgtgtggttgttcttttacgacaataacctcagtggagatctatctaacaaaaacaatcccccaagagctgccagaaggctttgaaatcccgatggataagttacctagatcgcatcggggagagaaacagatggagatgttttga

SEQ ID NO: 314958 - DNA, 540 bp, Proteus mirabilis
atggccgtatatcatcacggtgttgaagtccatgagaccaccgacctcagcacccttattcgagatatcgacacctctgtaattggtattgtctgcaccgcagaagatgccgaccccgaggcgttcccactcgatacccccgtattagtcacgcgcattaaaaccgtactcagcaaagcgggtaaaaccggtacgctttacaccacattgaaagccattgatgaccaatgcagcccaaaagtagtggttgttcgtgttgctgaagcgaaaggcgatgaaaagacacaagatcaattagtgattggcggcacgggtgacgatgggcgttacactggcctttatgccttgctgaccgctgaagccaatattggtgagcgtccgcgtattttggcggtaccgaaattggacaccaagccggttgctatgcagcttgcgatttttgccgagcaaatcaaagcctttgcctatatcagcgccaacggctgtaaactatcgccgaagccaagaaataccgagaggatttcaatcagcgcgaagtga

SEQ ID NO: 314959 - DNA, 150 bp, Proteus mirabilis
atgatcatctaccctgaatttatcgcctacaacaaagaaagtggccaaaatgaagttattcccgccaccgcttactccattggtttgcgtgccaagattgatgctgaacaaggctggcataagtcgatttctaacgtacctgtttgttaa

SEQ ID NO: 314960 - DNA, 1005 bp, Proteus mirabilis
atggaaaccataaccaaagtccgacgtctttttcataaagataggttctctcaacgagagattgctaagaaattacaacttgaccgacgtactgttcgtaaatatttaaattcaacagaaatctctcgttatcagcgtgaaaattatctttcacctaaattaggccatttcaaagcttgcctcattgaccgtttagaagcacaaatgttattgcctaagcatcagcggctctctgctgtccggcattttgagtggctatgtagtcttggttttgaaggaaaatatccttgtgtatcacgttttattaaaaggttttatcaagaatgtcagcctattaaacctgttttcattcctcagtcctttccatgtggagagtcttatcaatttgattggagtcatgaaaaagtttgtattcaaggtgaagtcattaaacttaatgtggctcattttagactttgccattcccaagcgtattttgtcagagcttatccacggcaaacggttgaaatgcttattgatgcacataatcacgcctttcaatttttcggtggaacaccccaactaggtatttacgataaccccaaaacgattgtgaaaaaaattggccaagggaaagaacgcatttttaatgacgcttttcttgctatggtgaaccactttttaatcgaacctgtcgcttgcacacctgttgctggctgggaaaaaggtcaagttgagcgtcaagttcaaacgttacaaaaacgcttttttacccatgtatttgattctcatcggtatagtgtgccttgtcatttggtagggaaagccgtgaccgctcaaatcacaacggatacgttacgtgctttttatgggcatgaggaggtgactcagcatccacgaagtttcttaaaaaatcaaacgacctataacccttatcattatttatctgcgttagctaaaaagccaggtgcattacgtcatggtgaatcctttatcgcgccaaaaacacctcatgtcacagcttaa

SEQ ID NO: 314961 - DNA, 297 bp, Proteus mirabilis
atggtgaatcctttatcgcgccaaaaacacctcatgtcacagcttaaaggcgataaagcgatagtcaagttgttaagtttaatagcagattttggtgagagcatcggtattactgcaactgaaatcgctttagaacaaggcatttccacggtagaagccgttctgaatattattcttcgactgactgaaccggcgatccctgagcttgaatctcagcatatcccgttaacctgcccaccggtagcaacgttaactcactttgaccaattattggcaaggaaattagtcttattgtga

SEQ ID NO: 314962 - DNA, 564 bp, Proteus mirabilis
atgtttcttctaacaaaaatagcgttaccttggagaacattgtacgctttatactcaggaatattaggtaaaagcctacttattatatcattatcaacaccggtggcactaatatataatactatgtcccttatccctccaagctatcctgtaatcttatttggagctttactatccttaattggctatatttttactgaaatttctgtacctgctttggtcagggactttaagaacagtcatcattattcaactgaaatactgaaaaattcagttaacatcgaatgggtatccgaattcaaaatattagaaagtgatattgaaaatttaagtaaggtccatgatggctactgtatcgtcccccttgatttcaaatcaatcgaaaacactaagacattattaggagaagataaagcaatccgtagcctttgtttaatcaaatataactattgtaatattcgagatcctattaagcggttagtttctacattgacacttactgtgtctttactcgttattttttcatcaacgatagctaatgtttttaaaataatcataggttaa

SEQ ID NO: 314963 - DNA, 1422 bp, Proteus mirabilis
atgtttaataatgctccctcaataagagattggttttcagttttaaattggtcacacttacctaatttaggtagttgtcatactgtaacaaattatgatgactttgaaaaaaattattttataaatcaagatataaacactttatatctaaatttatgtaccacacttggcgacaacggaattggaagtcaaaatattagaatactgggtaatccaggagcaggaaaaacatcttttttatatgcattaaaacaaatgagcgaaaataatcaagactcaattttaaataaattttacttttacatttatcatataaataaatcagatggtttaactgaagaagattcttataaaaatgaaattaataaaaacatcatttcagcatggaaggagttttataacgttaatggtttttcagatgactacatgcggattgagtcacaaaaacttacatttaaagaaaccataaatttagcaacccaatattataaagaaaataaaaaactcttctccaagataatgatatttgcagtagatgacgttgatttattacccgatgaagacgttataaaagttgtagaccatatattaagaagcttagagattaactctgtaaaaaaatggttatgcattcgtaaagtaacaatagaaagttatgcagctgcaaccaaaagaagagttgaagaattttttcctgacccttatacttttcctaaaatttcgttatttgatttagttaattatagaattgataaagcttttgatgataatagaaatattaagcatccatttagtaagatactatgtgaagacactattgtgcctatatgtgagggtaatatgcgtgaaggattggccctcttgaagacaattctagaaaacgtactcccaaaaggatttgcaaaaaaggaaactaatgaactagtcatacaaaattatatagcaaagtctgctgttgaaactttatgcagctctcaaaaactccttgatttacattcgataacatttaaaagatgctcatttcctcttgcagttgatattttagcttgcattaggcatcacgccagtgaatcaataatttatggttcattgacagattgttgcattagaagagatcacttatccggtaatatcattggggaagataatagaatagcgcaagttagatcaagtgattttaatgctatattaaataaattaatagaatttcaattagttttaaaacatgataaagatagctatcacctaacagataaaggtaaagtcttaagtagtttctcaaccagagatttttatttcaactattttaaaaatagtaatcaaatgaaaattgatgatgactattattggtctttatcagaacatcaaataaattatccaagcatcgttgccatgtatttaagcacatcaaaattaaaataa

SEQ ID NO: 314964 - DNA, 642 bp, Proteus mirabilis
gtgcaatctgacgttgatgtctctattcatgtggcatctgatttaggggtatcccctgatagtagagtgaaagttttagtttgcgttgaaggacaaaccgatattattgcattaaaagctttaagtgcagcattacatcaaaatgatcctacgctccctaatctttcggataataatcaagtagcctttgttgtgttaggtggcggaaacttgaaacattgggtaaattatgattatttaaaacacttagggcgacctgaaatacatatatatgattctgatgtaccaagttatgcaccttcaattgatgctataaatgcccgcaatgatggttcaaaaggatttttaactcaaaagtatgaaattgaaagttatcttcattcagatgctatttttgaagcttttggtattagaatgacagttccagaccatttgaatagtgagggaaaagcaactcctaaaatatttgctgagatgtattccgtacaacaaaactatgatggaattatgaaagataacaatgcaaagattcgtttagctgaatcggcatttcctttaatgacccatgcaatgattcaggaaagagacccaactggagaagtaactggatggcttcgggaaatttcatatcacttagattaa

SEQ ID NO: 314965 - DNA, 513 bp, Proteus mirabilis
  misc_feature (487)..(496): n is a, c, g, or t
atgaaatattcgccatttgataacaattgtaaagagcagactttcataattgaggcattcgttgaggctgtgcgttattctgcctgtacacagagttctattactcaagttatatcaatagagcaacttacagatattaactgtaatgaggatgagcaaactgatgaagactcatctactgttgcttccggtttagaaggtaatcccataacgaagttacaccagtctcgggagagagatcccaaaatcattaagcagaagaaagagcagacacttaaattaacaggtaaacttgagtgcgaaatttgttcaatggattttgaggaaacatatggtaaaattggccacggttttgcagaatgtcaccacaaaaacccactaaatcttcgagataaaaatgaagaaactgccctttgtgatcttgcaattgtctgttcaaattgtcacaggatgcttcatagagaacgcccagtttgttcataccggnnnnnnnnnngaaaacgccatggctaa

SEQ ID NO: 314966 - DNA, 942 bp, Proteus mirabilis
  misc_feature (901)..(910): n is a, c, g, or t
atgaatgttcaaacaagaaatgataaagctaagcaattcattttagaccaactatcaacggtagctcaactaaatgaaagtgattttgaagatttacctgatttccaaaggcttaaatctatcactcaagatttaatttatgttaaggctatggggttcagaggaattgttgctacggctttaacaggcaagtttcttgatgatagctatgattatttgaatgatttctacaaatgtaatccgcggtctatctttgaaaatggaatattttacgcatttcaggaaatgaaaataccctgtggcaaatcagatccattaaatgtagcaaaaaataataatgttttagacgaaaattgggctaaagggagaaggccccagaaaactgcaatggctgcagtttatttattaagaatcattagcagcgaaggtgatgatgctattcggcaaaaaattgtaaattatttctttttccgattgttatcttattcacaggaatgtggttcagtagttattcacactcttaatgaaactttcctttcaaatcagattgttgcttcaaagttaattagcttcacccttaattatcctgagtctggaacaataccgcagtttgttgtttctaaaatattatcttctctatatagccaatcatcaattgatgttattggtggggatgaaagtgtttttggaactaatactacctcgaaaaaacctgctgatgtatggctagaaaatgaaggtgtaatattaaatctctatgaaataactgttaaaaaaatcgattataaaagattggacgacagtattcagtcccttgctgataccgactctctggaaaaaccaattatattcatatgccgactaccggatgatacaaatactttgaacgggtatcaagacnnnnnnnnnnggatatatcagggtttattaaaaacactatag

SEQ ID NO: 314967 - DNA, 264 bp, Proteus mirabilis
atgaatactaaaaaatctatccacagcccggtttatagcgagttaatagacaaacttgctgaagagcgtaagcgccttggtctatctcaattggaagtagcgactgcgcttaatcttactcaagctgatatatccaaagtagagcataaagagcgccgcttagacattttagaattaaagaaaatgttggaagtttatagaatatctgaaaataaaaaactccgtgaaacaataatcaaatttttcattatggataaacaatga

SEQ ID NO: 314968 - DNA, 1089 bp, Proteus mirabilis
atgaaggctgtatctctcttttgtggtgcgggtggtatggatgttggcgtccaaaacgcaggttttgaaattgttgcggctaatgaactagatccctacgcttgcaaaacctatagagaaaatcataaagaaacagttctatatgaaggagatatagaaaagaatcttgatgcgatagggacgcataaaggtgtcgatttagtaatcggagggccaccgtgccaagggttttcagttgctggtaaaatggatccgaatgatccacgctcaaaactggtgttctcatattgcgacgtcattgaacgagtcatgcctaaagcttttataatggaaaatgtcaaagctttaggagcactagaaaagtttaaaggaattagagaagagatatttagaagaatgtcagcattaggatatacactttcaatggtgatccttaatgcaaaagattttggtgtccctcaatccagagaacgtgtttttattataggtttatttggtaaaaataaacaaataacatacactgacttcgaacctaaaaaagagaaagccatatctttacgtgaagctataatacatcttggccccgcaggtggtgaaaaaaactcaagaattaccaaggcgaaaattactcttgctgaaaaacctgtgctgagaaagtctccatatgctggtatgctttttaatggtcagggcaggcctttaaatcctgatgcatggtcaagcacactgcctgcaagtatgggtggaaacagaacgcccataattgatgaagggcatttatatgacgatatgccaagctgggttgaagaacatcacaaggctttacttgaaggtacaaaaaaagcggaatatggagatgcacccaaaagattacgaagattgacgattgatgaagcaatcatactacaaacattccctgatgattatattttcattggtcctcaatcaaaagtatttagccaaataggcaatgcggtaccttgtaaattagctcaagttgttgctgaagtagtcaaaagcaaactatcaaaaaaaacagactatcaagaaaatgatagtactcgtcaactacccttagagattatatag

SEQ ID NO: 314969 - DNA, 336 bp, Proteus mirabilis
gtgacattagatgctatcgttgaaaatagtgaagaaaatgaagaggatgagcaaaacgatgccataatagaagatagcattgatttagctcaatcacttgatttaaattcaattggtgctattccgattacaatatcttttcttttagccaataaaacattatcaattgatcaacttgaagaattagcaccagggaagaaatttattttacctgataatgccattcgtcatattaatattttagcaaatggtaaagctattgcccaaggagaattaataaaaattaaagatatgttagcggtagaaattaataaattatctataaaatgcgaataa

SEQ ID NO: 314970 - DNA, 249 bp, Proteus mirabilis
  misc_feature (183)..(192): n is a, c, g, or t
atgtatccagttgatttacatgcacataccattgcgagtacacatgcttatagtacggttagcgaatatttccaacaagctaaaaataaagggattaagctatttgcgattacagatcatggtcccgatatggatgacgctcctcatgaatggcatttttcaaatttgccggtgatccccagnnnnnnnnnngaatggtcgatggtgttggtattctttatggcatcgaagcaaatatcaaaaatataa

SEQ ID NO: 314971 - DNA, 627 bp, Proteus mirabilis
gtgaattttataggtcatagccaagggccattagcttgtcgttacgttgcggctaattatcctgatagtgttgcttcggtaacttcaattaatggtgtaaatcatggttcagaaatagccgacttatatcgacgcattatgcgtaaagacagtatcccagaatatattgtcgaaaaagtattaaatgcatttggtactattatctcaacattttctggccatagaggcgatcctcaagatgctattgccgcattagagtctttaacaacagagcaagtcacagaatttaataacaaatacccacaggcattacctaaaacccctggtggtgaaggtgatgaaatcgtcaatggggttcattactactgttttggtagctatattcagggattaattgctggggaaaaggggaatctactggatcctactcatgcggcaatgcgtgtgttaaatacattctttactgaaaaacaaaatgacggcttagttggtcgctcgagtatgcgattaggtaaattgataaaagatgattatgcgcaagatcatattgatatggttaaccaagttgcagggttagtgggttatactttaatcatgataagtaagcatactttgtatactctatag

SEQ ID NO: 314972 - DNA, 243 bp, Proteus mirabilis
  misc_feature (181)..(190): n is a, c, g, or t
atgtcaacgaaatatcctatcgttttagttcatggtttagctggttttaatgaaattgttggttttccctacttttatggtattgcagatgccttaaggcaagatgggcatcaagtttttaccgcttctctttctgcctttaattcaaatgaagtgcgtggcaagcagttgtggcaatttnnnnnnnnnncagactctcttacaagagacacaagcgaaaaaagtgaattttataggtcatag

SEQ ID NO: 314973 - DNA, 564 bp, Proteus mirabilis
atgatgatcaaagaaagtggccaaactcacaagtttttatacgaaagcttattatttatagctcctatcggttcttttgccttaaacaaggatttgatcattttatctaatcctgtacctattgattcaaataatgttttagcttggcttggggctacaccaaatagaaagtctttttttgaaatgctaggaatgactgaagatgatggttcccgtatctctatgggcactcatttccctcggcataatattaatacgtttttagccattgccgaggtaactgatcacttacaagcgatgttaatggggagaatagacataacacagaacatccattaccaacatgtggctgaatcgcaaagttttcgtgctgcatccttatcagcaatgatgttagaggaccgttctaataaaagccaaaccggcattgatcatcaattgtcaatttatcgtagagaaaacacttcagttcaagcaccagacttgaatcactcaaattcgttccttaaagaaactgggatgatgctgattttaaaacaaacttgcaaccttcttttttattag

SEQ ID NO: 314974 - DNA, 183 bp, Proteus mirabilis
atgtcacatagtatcttccatacgcgcataaatgaagcgcaaaataatgttattgtcttgtttgctttaatttcctgcaatttgacctcgcgtcagaggttaaaaatcatcaattctattaatgtaccgattgtggtattgggcttatattctgctttttacctgaaagggacgtcattatga

SEQ ID NO: 314975 - DNA, 201 bp, Proteus mirabilis; identical to SEQ ID NO: 314612

SEQ ID NO: 314976 - DNA, 303 bp, Proteus mirabilis
  misc_feature (261)..(270): n is a, c, g, or t
atgttaaagttcattcttattttcttgactctgtttgtatccacagtggctcaagccagtgtggttattatggggacccgcgttgtttatcccgcaacgcaaaaaagcattaatgttcaattaaataataacgatgaatcccccgcattaattcagtcttggttagataccggaaacgcagctgcagcaccagattcaattcacgttccttttatcattactcctcccatatttcgtatggagccgaaatcagggcaaacnnnnnnnnnncctctgagttttccgaattttcttccactttag

SEQ ID NO: 314977 - DNA, 822 bp, Proteus mirabilis
  misc_feature (700)..(709): n is a, c, g, or t
atgttaatattaatgaatatttggtggtcattaccgctaacacttattattttctacttagcacgtaaactggctgctcgatttaaatggcctattttaaatccgttattgattgctattgttgttattattcctattttattagtgacacacaccgcctatgaggattattttgccggaagtcgtatccttaacgacttgttgcaacctgctgttgttgctttagctatccctttatatcaacaattacaccaaatacgcgcacaatggaaatcgttaattagtatctgctttattggcagtatcgccgccatggctagtggtacagcgattgcattatgggctggcgctactcctgaaattgccgcctccattttgcctaaatcggtaacaacccctatcgcaatggctgttgcggattccataggtggtattcctgcaatcagtgctgcatgtgttattgcagtaggtattttaggtgccatttttggtcatacgctatttaaaatattacgtattccaactcacgcttctcgtggtttagcgatggggacagtctctcacgcagtgggtaccgcaagagcagctgaaatcgattatattgaaggggcatatagttcattagcattaatgacttgcggtattattacttcacttactgcaccctttatttttccttttattttgcacctttttagcnnnnnnnnnnttactattccatgcccaaataacgaaaataaccataaagatcagcaatattgtgatcatcataaaacttttatgatgtttttcattctgaagtgctgcatgcaagtcatttag

SEQ ID NO: 314978 - DNA, 294 bp, Proteus mirabilis
atgacttatgcattggagttaaccgagttaacgaaaacttaccataatggtgtcaaagcgcttaaaggaattaatttaaccgtagaagcgggggatttttatgcgttattaggccctaatggtgcaggaaaatcgaccaccatagggattatcagctctttggtgaataagagcagtggtaaagtcaaagtatttggctatgacaccgataccgatatggttaatgctaaaagacaactcggattagtgccacaagaattcaatttcaaccctttgaaaccgtattacaaatag

SEQ ID NO: 314979 - DNA, 930 bp, Proteus mirabilis
gtggttaaagtttatgcaccggcgtcaattggcaatgtgagtgtcggttttgatgtgttaggagccgcagtttcgcctattgatggtcaattattaggagattgcgtaaccgttgaagcggcgcaagaatttcaacttcacagcaaaggacgctttgttagcaaattaccttctgatgctaagcaaaatattgtttatcaatgttgggagctattttgtgaaaaattaggtaaacaattacctgtctcgatgacacttgaaaaaaacatgccgataggctcaggattaggatcaagtgcttgttctgttgtggctgcactcgttgcattaaacgaatttgctcacaaaccatttagtgaaagccacttattattaatgatgggagagctggaaggccgtatttccggtagtgtgcattacgataatgtcgcgccatgttatttaggtggtctacaacttattttggaacaaaacgacattatttgtcagcctgtgccggcttttgacgattggtattgggtgatggcttatccggggatcaaagtctcaacggcacaagcaagggctatcctccctaaacaatacgataaagctgatattattaaccatggtcgttatttatctggatttattcatgcttgtcatacacaacaaccaaaacttgccgcaagcttaatgaaagatgtgattgcagagccctatcgaacacagttgctccctggttttgataaagcgagagaggctgcattacaaaaaggcgcgcttgcatgcggtatttcaggctcagggccaacgctgttttctattactgattcattggctattgcccaagatgtggcgcaatggttacaacaacattatgtacaaaacgatgaaggctttgtacacatctgccgtttagatactcgtggcgcaagagagatagggtaa

SEQ ID NO: 314980 - DNA, 468 bp, Proteus mirabilis
atggaactaggtaaattagaatggaacgaaatatataatttaatttctattctgaaagggatggaactaggtaatttagaatggaaagaaatatataatttaatttctattctgaaagagatagaactaggtaaattaggattgaaagaaatatatactttaattcctattctgaaagggttagaactaggtaatttagaatcgaaagaaatatatgctttaattcctcttctgaaagagatagaacgaggtaaattaatagggaaaggaatatataatttaacttatattcaggatgaactagatgaagataatataaataatggtgatttaaacgaagataatataaacaaagataatttaaattatgctactattcttgaattaatggaagaagaggaagttacacaattcaatgtagatggattcaacataacagatagcaagtatgcgttctcatctgaataa

SEQ ID NO: 314981 - DNA, 483 bp, Proteus mirabilis
atgagtgattttaaattttggggatggaataaaaaaccacgaacgatgctgagatatgtaaaacccggagatatcttttgttttcaattaaataatgaaacatatgggtttggacgcatcatttcaaaaatcatgacaggccatgtagtagagattttcgatttcgtttcttctagtccatccataaccgaagacgacataaaaaaatctaacagaaaaatcacaccagttgtaatcgatacttacgggttatttgatagaaaaggatatcccaatagtgactggaggatcattggacatcagaataactatacgcctatgaatatggacgacatatacttttcttacggagttgaaaactcatgctataaagttgacatattcaacaatgattttcctataacagaaaaagaggcgactaaatatccccgcctaatccctcattctgattatcatattaaagaattattaggagctatctaa

SEQ ID NO: 314982 - DNA, 465 bp, Proteus mirabilis
atgcctgacccaattggattattgggtgggattaatctgtatcagtatgcgcctaatccgttgggatggattgatccgtggggactagcaggtaatccggcaacagcaacgcatattacttatcaaggtatagataaggcgacgggtaaaccttatgttggatatgccagtatgcaaggtaatcaaacagctcaggatgtcttaaagtaccgttatgctaatgattttagccgttttggtggcactccccctgtcatactttatgatggttatggacagaaggggaaagacattgcacgaggtctggagcaacgccgttttgaacaattaggcggtttagaaggcactgccaataagcaaaatccggtagggcaaggcaatgcgagaagaacggaatacttgaatgcagcagatgagcatctaaatagtaaacaaactggcactcaaaagggaggcaaatgctaa

SEQ ID NO: 314983 - DNA, 267 bp, Proteus mirabilis
atgtattttcagtatggtgaaaaagagatctcttttttaaaacaaaaagataagcgtctagccgcggtgatggaaagaataggggaaattaaacgtccacttactcctgatttatttaccgcattaattaaaaatattattgaacaacaaatttctgttgcggctgccaccacggttcaccaacgcttgctaccctatgtgatggtatttatactcctgtacatattgctagtttatcagagcaagatattcagcaatgtggtatga

SEQ ID NO: 314984 - DNA, 1131 bp, Proteus mirabilis
atggcaacaattgaaattaaaaatgtcattatccatgagtttataaaggaagcaaagaaacccgttgataagagcaagatgtttaattttagggatagcgtactagatcctaaaaatcaaaatgtctcaggattagtatcaacgattactggtttatatggaaaaaaaggcaactcggcatattacggtatctttaaagaagatacgaccaaacgaggtcctattcctaataaatttgaagaatatttcgtatatggcgataaaaatacacaaaatttcatcgactttacagtatctataacaaaacaaatagcagaggaagctgaaaaggaaatttggtcttctggcggttttttaatttatgccgactatttatctgatgcaacaagatatttcattataacaatggtaaaaaataagcctggaatgcgaattagctctaaattagagcccgaagagttagaacaattagatctatcaaaaattcatcaagccgcaagaatcaacttttcacgttatgaacagtaccaaaattcagctaaagtagaaaaatcagatctaaattaccttagttttataagcaaaacaccatacactaacgctgctagctattttattacagcattaggatgtgataaaggtatatcatcaacaaaagccacgcaacaattaccttatgaaataaagaaattttttgagtcacatgaggaattaaaaccatcatccttaaactttagaaaaaaagttatagattatttaggtgataaaatatccaataatcaaccagccaagttatcagatattgaggacatggcaaaaacacatatgactaatatagatgatgaacgaaaagaaactcttgttagtcttctaattgaaagattaaatagcgatgaagtacaaattccttcagaatttaatgtgaataaagccgcttatgaaaaaatgaaaaatatttcatataaatcagtggggtttggttatacttttgagaaaggtatgttgggaattaataagagtgctagtgtttgttataaccaaaaagagaaatcgcttactttcactagcttgcctgagtccgcgcagttggatattatcaaagctctaaaagaacaaggattaattcaataa

SEQ ID NO: 314985 - DNA, 396 bp, Proteus mirabilis
  misc_feature (5)..(14): n is a, c, g, or t
atgtnnnnnnnnnngccttcgtcggcagcgtcagatgtgtataagagacagccattagccaatggtggtttcatatgctatggcgaatatccaaacttacaacataacctaaaagcattagaagacgtttgggattatagctacacccgtgtcccttactacggcacaaacacccctattgatgaatgttatgactgtggttataccggcgaattttcttgtaccagtaaaggttttacctgccctcgatgcggtaatcacaaccctgcgagagtgtcggtgatacgccgtgtatgtggctatttaggcagtcctgattcgcgtccatttaatgccggtaaacaagaagaagttaaacgtcgagttaaacatctggctaatggtcagttaggttaa

SEQ ID NO: 314986 - DNA, 162 bp, Proteus mirabilis
gtgagatataacgcattgtctatcgccggcaccgatccgagtggtggggcggggatacaggctgatctgaaaacattttccgcactgggtgtatatggcacaacagtcatgactgcactggtagcgcaaaatacctgtggtgtacactctgtctataattag

SEQ ID NO: 314987 - DNA, 1353 bp, Proteus mirabilis
  misc_feature (20)..(29): n is a, c, g, or t
ttggtattgaagcgtgggtnnnnnnnnnnagtcacttcattagttgaatggcctgtggtgttaacggcaaaatttgaggaaaaattccttgaagttccggctgaagcactggtttacaccatgaaaggcgatcagaaatattttcctgtttacgataaacaaggtgcgctattacctcactttattttcgtttctaacattgaatcctctgatcctcaacagataatcagtggtaacgaaaaagtggttcgccctcgtttagcggatgcggaattcttctttaaaactgaccgaaaacagcgtttagaagataacttaccacgccttgaaactgttcttttccaaaaaaatttaggctctctacgcgacaaaacagaccgtattcaagctctcgccggttttattgctgagaaaatgggtgctgatgtcaataaagcaacacgtgctggtttattatcaaaatgtgacttaatgaccaatatggtgtttgaattcaccgatacccaaggggttatggggatgcattatgctcgccatgatggtgaagatgaagaagttgctgtcgcattaaaagagcaatatcaaccacgttttgcaggtgatgcactaccatctaatccagtagcaagtgctgttgctatagcagaaaaaatggacacgctggcaggtatctttggtattggtcaacatcctaaaggggataaagatcctttcgctttacgtcgtgctgcccttggtgtgctacgtattattgttgaacaagatttaccattagatattgaagaattaacccaagaagcggctcgcctatatggtgacaaactgacgaacaaaaatgtcgtcagtgatgtcgtagagtttatgctaggtcgtttccgtgcttggtatcaagagctgggttatagtattgatactattcaagcggtattagcgcgccgcccaacacaacctgctgactttaacgctcgtgtaaaagccgttacttacttccgaaccttagaagaagcagctgcattagccgaagccaataaacgtgtttctaatatcttagcaaaatcagcagatgttaagctcaacgataaagtattagcctcggtgctaaaagcgcctgaagaagttcagctagcggctaatctttctgtgctacaagataagctagcccctctatttgctgaacgtaaataccaagaagcattagttgaactcgcctctttacgtgatgttgtgaataacttctttgataaagtgatggtaatggataaagacgaagaaattcgtatcaaccgtttaaccatgctacatgaattacgcgagttgttcttaaaagtcgctgatatttctgttttacaataa

SEQ ID NO: 314988 - DNA, 408 bp, Proteus mirabilis
atggatgttaaaactggttttaaatacaacaagagcagggatatctctggattattcaagaagattacggaagaaaaaaataagagtttagcaacctctaatgaagtaaataaaacagaaaaaaaaataaacgaaacttatcaacaagatgataaggctagaaatacactgacatttcactttttgtgggggttttttattcttattggtggttgttttttattcgtgcttatttataacttcgctgctgtccgttggcttcagtcactaacagaaaatggggttccagacgctgcatctcatgtaaaattgttggagttagataaagttctagccgtggtgattggcgcgcttggcacatcactaggcttcattattgggtattattttaaagaaaagaagagctag

SEQ ID NO: 314989 - DNA, 315 bp, Proteus mirabilis
atgactaaagatataatggaaatagttgatggattaaagctatataggaaatcaagtgatgatttgagtgatgagctattccatattatggaagggtctgttcgccttatggaggctttagtggagacgctagaaaaagcctcatttgataatgatagcgatatctctaatattgagaaaaatctttctgttgttgaaaatatgcagtccttggttacatctgcattaaataaaattgatgcttacaatacatcattggagaaaaactatataccatcagtaaaaaaaatatcgaatattaaggtagagcgataa

SEQ ID NO: 314990 - DNA, 276 bp, Proteus mirabilis
atgtcaaacacgcccattgagttaaaaggcagtaattttaccctctcggtactacatttaaatgatggatcaccgaaggttattcgtcaggctatttcagataaaattgcccaagcgcctcaatttctgaaaaatgcgcctgttgttatcaatgtctctgctatcgcagatcaaacgattgattttaaaaaactgaggcgaatagtagaagatgctggcttacgtgttgtgggaattagtggtagtcatgacgctcaacaaaaagactaccactaa

SEQ ID NO: 314991 - DNA, 294 bp, Proteus mirabilis
atgcttactattacggcactactagaaaataagacaagcgatcccgctcttagccattatcctggcctttcactgctattagaagacactgaaagcgaaagtaaaattttatttgatactggtaaagatctcacttttatcaataatgctaaaaaaatggcgattgatttgacattaagccacatattattgcccatcctgatttattttcagtacgttattcagcactttttatggggcgccagtctattaaatttaagcgccttactccattttttaaccgacagcagctag

SEQ ID NO: 314992 - DNA, 837 bp, Proteus mirabilis
  misc_feature (789)..(798): n is a, c, g, or t
atgccgttaattagtttgactggggcttatttagcgtttagtgatgcccctttattagataatacagacttgtttattgatgaaaatgaacgcgtttgtttagtcggtcgcaatggtgccggaaaatcgaccctattaagagtgttagccaaagagcagcccttagatgatgggcaagtggtgtatgaacaagatctggtgactgcacgtttacaacaagatccccccagagatatcgaaggcactatttttgattttgtagcgcaaggcgttgcagaagatgcgcaatatattaccgaatatcatcgtgtttcaaaggtaatagaaacggacccttctgaaaaaaatcttaatcgattagctcagttacaagaagtactcgataaccgtaatctctggttattagatagccgtattgctgaagtactggaaaaattagggttaaatggcgaagctgagctttcctcactttctggaggatggttaagaaaagccgcattagggcgcgcattagtgagcgcaccgaaagtgctctttttggatgagcccaccaaccatctagatatagaaactatcttatggttagagaaattcttaaaggatttccaaggtagcattgtctttatttcccatgaccgatcatttattcgtaatatggcaacccgcattattgatttagatcgcggaaaactatcctcatggccgggaaattacgataaatatctggaaagtaaagaagaagcattgcgtgttgaagagcaacaaaatgctgagtttgaccggaaattnnnnnnnnnnatggatacgtcaagggatcaaagctcgccggactcgtaa

SEQ ID NO: 314993 - DNA, 243 bp, Proteus mirabilis
atggcctcacaattagctgcattctttactgagcacggttttgatttcttagcaccaccagaatctaaccaagtgtttgtcattttacctaatgatattgcagaaaagctaacgcagcagtttgtttttcatcgcatattacttgacgatccacagctaagctgtttgcgcctttgtacttcttgggcaacaacacaacaagatattgatgattttaaagttaaatttcttaaacttatttaa

SEQ ID NO: 314994 - DNA, 279 bp, Proteus mirabilis
atgaatatagaacttcgccatttacgttattttattgctgttgctgaagaattacattttggtaaggcagctgagagattaaatatttcccaacctcctttaagtcagcaaatacaagccttagaaagtgagataggggctcgtttactcgaaagaaccaatcgttctgtttcgttaaccccggcaggacaaatgtttttaaaaggatcctatcaaattatggcacaagttaaggcggttttacctcaacaacaccttttatgcatttggttacgttaa

SEQ ID NO: 314995 - DNA, 600 bp, Proteus mirabilis
atgcatttggttacgttaagtttgcgtcaatttagggaaaattatcctgaagtcggtattcatatgcatcaaatgaataccaaacagcagatatcaccattattaactggccacattgatttgggaattatgcgtaatacggtgttacctgataatttgcaccaccagctcctatttcgtgaaccttttattttggcagtttatgaagggcatcctttacttgaatacaaagaaacaggcgtaaatattcaagatattgggcaatatccttttgtattttttgagcgagatgtaggaacggcgctttatgatgaaattattcaattgcttagccttgcgggaattacaccaacgatagcacaggaagccggagaggcgatgaccatcttggggcttgttgctgccggattaggtatttctattgtgacaaaatcatttacccgcatgaaagttgatggtgtgcattatctgcattttgctaattcgaatgctttctctgaagtatggttagtttctcataacaaacgaacgatccccgctgcggccaacaggttgactcaattattgctaaaaaatatcttagaagatcaaaaatcttga

SEQ ID NO: 314996 - DNA, 261 bp, Proteus mirabilis
  misc_feature (173)..(182): n is a, c, g, or t
atgggttatcatgttgtcgggatagataatctcaatgattattatgatgtgcgcttaaaagaagcacgattagctaaacttaatcagttggataacttccaatttgataaaattgatattacagattcagtgagtattgcgcaattatttgctgatcaccgttttgatcgagnnnnnnnnnngttattcacttggcggctcagcctggcgttcgttattcaattgaaaacccaatggcatatatcgatgctaatattgtag

SEQ ID NO: 314997 - DNA, 255 bp, Proteus mirabilis
atgcaaaataattatgtgttacgcagtgtgcgttatatgttagatcttagcgatggtcatattgttgatataatgaaactggcggatttcaccgcgactaaagagcaagtcaatcagtggttaaaaaaagacgatgatcctgcctttgttgagtgtgatgatatggccttgggacattttttaaatgggcttatcttttatcgtcgtggtaaagatgaaaaatatcctactccagaagtcgaatgttgcctttga

SEQ ID NO: 314998 - DNA, 204 bp, Proteus mirabilis
atgaagtatgatctaaatgacctctattattttgttaaagtggtggagtttggcggtttttcacaagcggccgaaacgttaggtattcctaaatcaaaacttagtcgtcgtattgctgatttagaagagagactaaaggtctcgctgatctatcgttcaactcgtcaatttcatgtcactaagatagggcaaactttttactaa

SEQ ID NO: 314999 - DNA, 663 bp, Proteus mirabilis
atgtcatcaacattaagtaaagaggcgcaatgggtacatgccgcgttagtggagcgtggtttggaaacgcctcttcgtgagccaaaactttcacccagtgagagtaaacaacaaattaaacatcacatgacggaagtgatgaaattgttaaacctagatttgagtgatgacagtttagcggaaacgccacatcgcattgcgaaaatgtatgttgatgaaattttttcaggcttggattatcacaactttcctaaaatcaccctgattgaaaataaaatgcaggttgatgaaatggtcactgttcgtgacatcacattaaccagtacttgtgagcaccattttgtcactattgatggtaaagcaacggttgcttatattcctaaagataaagtgattggtttatcaaaaattaaccgtattgtgcagttcttcgcacaacgccctcaagtgcaagagcgtttaacgcaacaaatattgattgccttacaaacgctattggggacgaaaaacgttgctgtctctattgatgccgttcactattgtgtaaaagcaagaggcattcgtgatgcaaccagtgcaaccaccacaacttcattaggtggactatttaaatctagccaaaatactcgccaagagtttttgcgtgctgtacgccatctttga

SEQ ID NO: 315000 - DNA, 1242 bp, Proteus mirabilis
atgagtcaatgtcaggttagcggtttgttatcccttgatgaggcgctagaaaaattacttgaaaaaccggtggcaatcacagatacccttagtatccctttgcataaggcagcaggttatatcttaagtgagcacatcacttcaccactcaatgtacctcctttcgataattctgccatggatggttacggtgtacgttatacggatctaaacactcaatctcctttacctattgcaggcaaagcgtttgctggagtcccttttgaaggtgaattaccacaaggacaatgtgttcgtatcatgaccggagccatgatacccgcaggtgtcgataccgttattatgcaagaagaaacacaagtgactgacaacggtattctttttccacatccggccaaacttggacaaaatattcgtcgtattggtgaggatataaaacaaaatgatatcgtcttagccgcaggaacaaaactttctacagcacagttacctcttattgcttcactcggtattgccaatattaatgtttaccgcaaattaaaagtggccgtattttcaacgggtgatgagttgcaaactattggccaaccattaaaagcggggcaaatctatgatactaaccgctttgccgtacgcttaatgttggaaaaattagattgtgatgtgcttgatttaggcgttattccagattcgccagaaaaactgcgagaaacttttaaaaccgctgatgcacaagcggatttagtgattagcagtggcggagtttctgtgggtgaagcggactatactaaacaaattttagatgaaataggcgaaattggtttttggaaattagccattaagccaggtaaaccttttgcttttggtcgcttacataatgcttggttctgcggattaccgggtaatcctgtctcagcaacagtgacattctaccaattagtacagcctttaattgcccgtttatctggttttagtcagtggcgatcaccacagcgtttccatgctaaaacctgttcaccattaaaaaaatctgccggtcgtctggatttccaacgcggtatcgccagtattaatgaaaatggtgaatggcaagtaacaacatcgggacatcaaggctctcacgtatatagctcctttagtgtggcaaactgttttatcgtcttagagcgagagcgtggtaaagttgcagcgggtgaaaccgtcactattgagctatttaatcctctgctaaaaagcgaatag

SEQ ID NO: 315001 - DNA, 768 bp, Proteus mirabilis
atgagtatagaattaaccgatgaagaaacgctgcgttataatcgccaaattgtgttaagaggctttgattttgacggtcaagaagcactgaaaagtgcttctgtattgattgtcggtgttgggggattaggctgtagtgtatcgcaatatctcactgcagcaggtgttggcaaactgacactattagattttgataccgtttcactgtccaatcttcaacgccagatcctgcatcgcgatagcaccattggtcagccgaaagttttatcagctaaaacaacattaaacgcgattaatccccatgtacagatagatacggttgatgcactacttgaagataaagcactggctgaattaatcagccaacatcatctggtaatggattgcacagataatgtcactatccgcgaacaactaaatcgactgtgttttgtgcagaaaaaacccttagtatctggtgcagcaattcgtatggaaggccaaattagcgtctttacctatcaagatgatgaaccttgctatcgctgtttaagtcatctttttggtgataatgcactcacttgtgttgaagcgggtattatggcccctgttgtgggtactattggcactttacaggccattgaagccatcaaattactcactggttatggtgaaactttacatggcaaagtattaatatttgacgctatgcggatgcaatttcgtgaatttaagttacctaaaaatccacactgtgatgtatgtgcggctaatttgcccgataattaa

SEQ ID NO: 315002 - DNA, 1701 bp, Proteus mirabilis
atgacatttcaaattgcagacacactctattataacggcctaatctataccgctgataatagtaacaatttcgtcgaagctatcgctatttcccaaggcattattattgctacaggcacaaaatcgaatttacttgcttactgtaatgaaaaaacacagcatatcgatttacagaagaaaatggtgatgcccggcattattgatgctcatatgcatccattttgggggggagccacattagcaggttgtcaccttgattatctctccttaacaatcgatgaaattctatcgcgtatccaacgctatcttgatgctgatcccatcgatagtgatacagcttggttgaaagtgtcagcatggtatcgtgaagggatgcaaccggaagggatacaaatgacgcgttatcaccttgatagcttaaatacgtctcgccctatcttacttttttctagtgattgtcatagcgtattagcaaattcccgcgcactagaattattaaatattacggctgaaacccccgatccccctgatggcaatattgaacgtgatggtgatagaacacctattggtattcttgaagatgcaccagctatgcaggctattgatagtctaccgcctttaacggcagagcaaaatctacaaatcgcacgccatgtacaaaagttactcaatcaacaaggggtaacgactatcatggatgcacgtgttggtgagccacaattacgtgcctttaataccttgcgagaagcgggtgaattaacggttcgtgttgagaatgcggttgaaattacccctgatgatgtggctgatattgcagctattcctcatgctgtacaacaagcaataacacgattctctcactggcatcaaatcagtcaaggcgcgcaacccagtgtcgctattcgccatattaagctttttcttgatggtgtattacaagcgccgattatgacagcacgtttacacgccccttatcgtattaatgtcggtacggatgaaacgcctcattggcaagattcagagcatgttggcgatctctatttttcacctgaaatcttgacgccattagtcactgagattagccgtgcaggttatcatcctcatattcataccgtcgctgaaggggctattagtgtcgcacttgacgccattagtgaaatgcgcaaagccttgccagaaaaagatattcgccccggccttgcgcataacgaattaatgtgtgaaaaagattatgcgcgctttgcccaattaaatacctacccttttctctcctttcaatgggctggcgtagagcaacataatattgataaagatcttgaaatgttaggcaaagcacgttgccaatatctagaaaccgccggtaaatttattgatgcgggagtgactgtcgcatttggcagtgattggccgattgatccattaaatgagtggtatgactttaaagttgccatgactcgacaaaaagatccctctcagccacgtttagataatgatcgcaatctcaccttaatcgaagtattacgagctgccaccatcaatgccgcttatgcactagatatggataaacagattggttcattagaagtaggaaaattcgccgattttattgtcttagatagaaacttgtttgaaatatcggcagaagatattgaaaatgtcagggtattgtgtacgataattgcggggaaacccacaatttag

SEQ ID NO: 315003 - DNA, 465 bp, Proteus mirabilis; identical to SEQ ID NO: 302505

SEQ ID NO: 315004 - DNA, 555 bp, Proteus mirabilis
gtgtattgtggttcaagtttaggtgcttcaccaatttataaacaacaagcgattctttttgctaaagagctggttaaacgtaatatcactttagtttatggtggtgccagtgtaggaattatgggcacgctcgcggataccgttttacaggaagggggtaaagttattggtgtgatcccaacgctattagaagggcgtgaaatttcacataaaaatctgacagagctccatgtcgttgaaactatgcaccaacgtaaaagtaaaatgattgaactcgcggacggctttgtggcactgccggggggttttggcacattagaagagttcagtgaagtgtttacttggagccaaattggccttcatcaaaagccattaggtatatttaatattaatgatttttatcagccattactggctatgatagataaaatggtagatgaaaaattcttacatgaaaaatatcgtcatatggcgattgttgagcaatcacctatccagttattagataaatttgaaagttatattgccccttcgattaaaacctacgataaataa

SEQ ID NO: 315005 - DNA, 768 bp, Proteus mirabilis
atgatagccgcattaaacttcaccccaaaaaattggtatcaacaaattaacggttcatcaagtagcaatatatcatttgattctaatggtaatgcaattataaaaagcgttgaaaaagaggctgcatatatttatatgcctgttgaaataggttctggagagacaattacagttagtgtgagtgcgcttgtgaaatctgggaagggagttatttatacaaatgagtcaacttttggtggagatttgcataataaattaacattaacatcaggtgttcttaaaacatttcatcttactcacacttcaaaattatacgcaaattctcaaattctatatattaaaatcggaagtgactcatcaatgaattcagatcttataattagcaacatatcggtgagtagaaactcatcaaagtatgggtgcttaagagatttggcgtttgggtttttctcaataaattcaggttctgcttctttgcatgaaaaatacccatctttaaatataaagaccgttaacttagataatgaatctgttaaaatagaaatggataatacttatgtcgtttcgtcagcagagttgcataaaaatctacttcctctaatgtttgtcagcgactttacctctctttccaacatagtaccaaagataactaattacgatcagtatacaaatatagtaacagtaagatttataagcataaccaatggagaatatattaatccattaacagcaaacattaggtttatttttaaagcacaagtgccttag

SEQ ID NO: 315006 - DNA, 174 bp, Proteus mirabilis
atgaaattaacaggcaagcaaattaaaacactggatattgtgagagataagtttggcgctggaattgatggtagaacacttaagtcttttgagaaaaaaggtttaattagacagacaatcattggctggacattaacaaagttagggtttgatatattgaataaggtggagtga

SEQ ID NO: 315007 - DNA, 186 bp, Proteus mirabilis
atgaataaattaaaagagaaaataattaatcttctaaaatacaacaaattgacaaatgctgaattatattacttatgtagtcctgaatactctaaaagtcaggttagttgtgtaattggtcatttagaagcaggtggaattatcaggaaaggagtttgcgaatattgggagttgatcaatgaataa

SEQ ID NO: 315008 - DNA, 369 bp, Proteus mirabilis
atgaataaatacaccgaactctctgatttcgagattaataaaaaggttgctgacttaattggcgccactccatttccattcggatcaacagattatcgtcgctccgctgtttctggttgtgaaagtgcaataattattagatcacctcgcaaggttggctcattcgacgcctgcaacaaccctgccgatgcaatgcctattattattgagaataaaataggaatgaattttattggtaatatcgttggctggtctgcgagccatatttgtgaaagcaaaggtgaacttgaggtttacgataaaaactattatcgagcagctatgatgtgctttttgattatgaaggatgcggagaatgaaaaagtatga

SEQ ID NO: 315009 - DNA, 198 bp, Proteus mirabilis
atgagattaataattcgtggtgaagttacacccacagaaaggattgctattaatgaggcactggaagcccataaaaagaaatataatcgaacaggaataatcgttagccacaaaataaagataggaaagaatatttatcccgtcgaaatagaaaactgccgtaaatcatatatagccactttgcgtaataaaaggtaa

SEQ ID NO: 315010 - DNA, 189 bp, Proteus mirabilis
atgaataaaaaaacgccaagttatagttcactcgatgatgtttatgcatcggttgatttatcacaatccttaccgaaaacacattttccgcaacaagagagccatcctcgtcatgtttttgatgctgtaagggatgagctgatgctagatggcaaatctggccacattttgtcaaacctgggtagatga

SEQ ID NO: 315011 - DNA, 180 bp, Proteus mirabilis
gtgggctcggagatgtgtataagagacagattctctatcgcgtttattttaggtgtcaaacctaaagaactattgcctaattataaattttcaaatgaaaaagaaatgattaaagcaaaacaatcattatcagcagaaagcattatgccaataaagaaaagcgacatgtatcccacataa

SEQ ID NO: 315012 - DNA, 366 bp, Proteus mirabilis
atgtatgccacacatcgtgcttctgcaggctcgctagatgatacgacttatatttatacaacagcagtaagtaaagaacaattaacaagctctgctaatatttccactatgtctaaagtagaattacccaatgggaaatatttagttattacttttgagatggataatattttagattccctcaccgggtatgatgatattatttatactgtctataccaaagtattaccaaagatgaatttgctacgtcgatctggtcctgatattgagcgctataccttaaaacaatcggttagctatgataagttaatcggccatagtgagcagcatctacaagaaattagttactatattcctgttctttag

SEQ ID NO: 315013 - DNA, 504 bp, Proteus mirabilis
  misc_feature (438)..(447): n is a, c, g, or t
atgcttcaagaaaatgtagttaaagatatcattgtttggatcgagcaaaacttagattcacgtttatcattagatattattgctgaaaaatcaggctataccaagtggcacttccagcgcttatttaaagcatatacaggaatatctttaggcaaatatgtcctagcacgccgtttatcttgtggcgcttatgcattgaggatcactcgtagtagccttttagatatttctttaaaataccattttgattcgcaacaaacgttttgtcgtgcgtttaaaaaacaatttaatatcaccccttctgaatacaggaaaaagcaaggttgggatattagtgagcttatctttccagcattagaaactgttgaacttaaagcaaaatatgaagtaatgaccttaccttctaaagagttgataggtatggctcatcaatacaannnnnnnnnntacataccatccctacagaaatgtatgccacacatcgtgcttctgcaggctcgctag

SEQ ID NO: 315014 - DNA, 255 bp, Proteus mirabilis
  misc_feature (9)..(18): n is a, c, g, or t
ttgaacttnnnnnnnnnngttgaacttatttcgggttatcgttcactcgcgactaataatcatctacgtcaacacaccagcggtgttgcgaaaaaaagctatcatacccgtggtcaagcaatggatttccgtttagtaggtactgatttatctaaagtacgccaagtcgcactaagaatgaaagcgggaggagtgggttattatccacgaagtaattttgttcatatcgatacaggacccgtgcgctcatggtaa

SEQ ID NO: 315015 - DNA, 234 bp, Proteus mirabilis
atgtcattttcaacaggtataaatagcttaagcggcataaaaataaataacgtaaaattatttatttttatacttgcgctactattttcagttgactcaaagtctgaggaggagttttattataacccctatttcttatcagataacccggagtctgtcgctgatctatcttcttttgagaaaggattagaagtacctgaaggtaattatctggttgatagtttgtattcataa

SEQ ID NO: 315016 - DNA, 1770 bp, Proteus mirabilis
atgagtgaagagtggattctccagactaaggaaacccgcagggtattttctaacgcggcgtgggttcctttgagagcatctgttgagagtaagaaaggggagctaaaagaagtaggctatgtcagtgaatatttcggctgtggctctgttgcattcccgccagagcatcggcagctagttgaggaacgtcttggatggaacaatataggcattgggtactcagccgtgcctcatgcatacgaagatggatattatgcgtccattgaccaatatcaatacaatgataaagagccaataggtgtcaatctagtttatgtacacccgcaacctgttgttggtggtaaaaaatggatactgagccctgatttggtagtcgcgttgcgcttgatcaaagagggggacaactgggtcagacctgaagaaaatttcgttgtggtagctcgcgagacagtgagtgaagatggcgagtatcgtcagatagaaataaaaagagaatttttactcgattatctagcagccagaaatttatcgctccgtctttcatattaccgacagagggtagaaaacgtccctgtatttgaggacagcgtatattcaaatctgcagtctcacaatgaggaacgagataatggtaaattcaccctaaccattcgcaaacttgatgacgtctttgggggaagctgggtgatgtttagagcctggagaacggatgtagatgaggatgaagacgcccctatgatgggccctgagaatgactcgaacactgactatgaaagatctgaggggcatagtggaggctataaaggtgtacgggtagaaggagagttttggcgtgaggaatggatagaccaccaatcaaaaagcctacgtgtccgtggcgatacagatccgagtctaccacaattcatcgtggaaactgatggaacgcgaatgagatcagcagagcttgataacgaggacataggccgctggctatggtttcgggtcagcgtcgtgaatgagcttctcaatagtcgaggatttaagttggagtggtatacggctgaaactggagctattaattccacatcaggatgtaaaacgcatttcgggataaacaattcggatcttattaccgtatatgcttatgatatcgctcgactcgccccatgggagcagcatgtttgggcggggcataatgtagctcctgaaggaaaggtttcaagtgaactactggacgctcaggtgatggtgaaaccagcatccacatatgcggttgaagaaatgttttttggaagcatgaggcttttggaagacggcttcaggcataaatacggaatatcgctgttcacccataatattgatgactctgaagtagggcagcaaatatcaaggtttgcaagcaaagacagagtgacactactcagactagccaaggatattattcgcgtgttctcggacaggctcaacgtaaccgagctacgcaagctttctacacaccaagagaaagccaagctcggttcaaacaagttgctccaaagtattttggctgagaaaattggagacgacaaagccaagagagtatttgctgaaattgccggtgcttatgatatgcgagtaggagatgcacaccctacaagctcaaagataacagacgcgatcaaacttgcaggcatcgatgaagaaaactcgccattgcggcagggagagcaactcattcacaacgttgggcgatcgatttggtacataggaaaatttttgttcggtgagactgataagtcggacgagtag

SEQ ID NO: 315017 - DNA, 1155 bp, Proteus mirabilis
atgaaaaaaaaactgcaattggcactcaacaagtacaagccgatccctcctaagcttcaaggggagagcgaagagagtccgaaaacgattattgatctggaccttgccgctctatatcaccacttttacttggatacctacggcactcagcccccgaatccggatcctacccagtttgagcacatgagattcctagtgcctgacgatgagtttcgatttcaaggtgagggagtgggcgcttcaaccaatgccaagcgagccaaatccagcgagatggggcaggcgttctgtcgctggttcctgcatgagcatttggggattaaatacttcgcacatttggatcgtttgatcgatgacacaagcgagaatttgcatggatttactttacagcgtaccgcgccaggcgatatgcctgactacctgtgcagtgacggggcaggctccgtcgtacttgcagaggccaagggacgctatacttcggtggggttcaacacgaaagaatttggagattggcggaaacagttcacgcgggttcgggtgttggacgacaaaggcgaggctgtttgggttaaaggtcatatcgtggccactcgctttgcaaccgaatccaaacccaaggttcagaccaagttgtttgcagaagacccaatcacagagggccgggagccgttatcgggagaaactgcaagcagtctctccggacaaataatctgtagccattacggtaatgtgctgatgaaaatcgaacaacctcgtttgggtctcgccatcagaagatcatggcgtttggagtcgcaaagcagaattcgagtaaccctctggaagttagcttttgatgaccaacagcgacacttcgttgggggctactacgcaaatgataccagtgaatcgttaattaacttagaacatgggcaggccatacaccgcagccataatcccttcaggttaggtgtgcactcgggaacgtttgtgggtgttgagctttcggtcttcgagcatctagtaaaggttgctcgaggtgatgcgcgtctgttggatggcctaccggaggtcgagcccattagggagatttacagcggaataagcatgttgcgagacggctcaattgttggacccttgtcaatgttcatacctgtcagcttagataactattaa

SEQ ID NO: 315018 - DNA, 888 bp, Proteus mirabilis
atgacacatattgcagtaagaaagataattggcagccaaaataggtatgccaatcgcaactggtggtacgagttccaggagatacctagcttcgctgaggagtcagatgttcaggtacgttcaagcgagctattgcagcagttttcaaccataacgaagaaatggagctcagaactaaattcggaatggacggtaagaatattttttgcagcaaagatggttttggcctcttccgttatggcacagagtttgaagtacgctgaggagaataacctgcgacctgtggtctcgtatctcagttattatacggtcatgcatgcattgcgcgctattcttttgacaagcccacaagttaaatggaacaacggagaaattctccaaacgacccacacaaaaacgatcaacatcgcttgtgatgcattagcgcattttaatagggagcttgcgaatcaggtaaagagttcaacgattcatctaaaagccttcagagagcttatttcttaccgcgcaccatccagtggcgacaactttgaaaaacctgactttgatgtgtacagattctgccgactttttcttgaggtggcacagcttcagtctgagttacttgaagcatccatcggaaagcatgtaactaactcattcgaacttgaacaagactttactcaacatgtatacgacattgagattgatggaatacacttccatgacaaggaggattggtatcggattgggtatttagctagaaagcatcctgcaccaacaaacattcttcacataatgtcagaagggcatgtggaagacttttttggctcgtggtgcccagaggaggaaactcctaatgcttttaaccccgatgacgattggcacatactcttcgatgtcccctaa

SEQ ID NO: 315019 - DNA, 222 bp, Proteus mirabilis
atgctgaccgatacaaaactaagaagtttaaagccacaagacaagctttataaagtgtctgacagagatggtttatacgttgcagtgacaaaaagtggtgttatttcatttagatatgattatcgttttaatggaaggagagaaacggttacttttggtcgatacagtgctgacggtatctattgttttattacttatcggatagttgatagaccacattga

SEQ ID NO: 315020 - DNA, 288 bp, Proteus mirabilis
atgaacagactcaatgtattaaaaaaatataaaagatacctatataccttaattattgttgctttattcggttggataggctggtttgtctggttagttttatgggagccacctcaaggtggagtgtcattggttattcatactcaaattgacagacctatacgtggatttagtgttaacggtgtagcaggaggaaatgcttttgcttatggtggaggtgcaacgacctgctgtggttcaattagtggtgatactgccgagattatttggacagtggattatacctaa

SEQ ID NO: 315021 - DNA, 1113 bp, Proteus mirabilis
atggcacaagtcattaataccaactatctatccctggtaactcaaaacaacctgaacaaatctcagggaactttaggaagtgcaatcgagcgtctgtcttctggtctacgtatcaacagtgcaaaagacgatgcagcgggtcaagcaattgctaaccgtttcacttcaaacgtaaatggtttaactcaagcttcacgtaatgcgaacgatggtatctctatcgctcaaacaactgaaggtgcattaaacgaaatcaacaataacttacaacgtatccgtgagttaactgttcaagcgaaaaacgggactaactctaattcagatatcacttctatccaaaacgaagtgaaagaacgtttagacgaaatcaaccgtatttctgaacaaactcagtttaacggcgttaaagtactgagcggtgagaaatcagaaatggttatccaagttggtactaacgataatgaaactatcaaatttaacttagataaagttgataacgatacattaggtgttgctagcgataaactgttcactgaagctaccgtttctaaaggtgagaagaaagcaagtgctgatgatgctgttattgctgatttaggtgttgctggtggtactactctaaaagctggtttaacagttaaaaaatacgaagaagatggcaaagttgttgatggtaaattcgttgcaactgaaggtggtaaaagctacttagtttctgcttcagattttgaagctgatggtactactgctacacaaatcaacttaaaagcaggttcagctgttgctggtaacgaatttactgctgctgcaggtaaagacgttaaaactttaaacgttaaagatgacgctttagcaactttagacaaagctatcaacaccattgatgaaagccgttctaaattaggtgcgattcaaaaccgttttgaatctactatcaacaacctgaacaacactgttaacaacttatctgcttcacgtagccgtatcttagatgctgactatgcaacagaagtttctaacatgagccgtggtcaaatcttgcaacaagcgggtacttcagtacttgctcaagcaaaccaagtaccacaaactgttctgtctctgttacgttaa

SEQ ID NO: 315022 - DNA, 1428 bp, Proteus mirabilis
atggggagtgatgtgaaattagttaaattaaaagatattacttcaaaaataactaaaggaacgacaccttctaagagtgacgggggcttttcctctattggcgtgaattatattaaggctgaatctgttagttatgagggacgcattgatgaaagcaaatttgcttttatcactgaggctgttcataaaaaactaaaacgctctcagcttcaagagaatgacatactattttcgatggcaggtgcatttctcggtaaaacaggttttgtgatgaaacatcatattcctgctaatactaatcaggcattagcgcttattcgtgttaaacctgaaatagcataccctaaatttattcactattatcttcaacaaaaaagtgtagttcactttgtcaataatgcagtatctcagtcagctcaacctaatataaatctacagcaaataggtgacctagatatttgtctattatcgttggcccaacagcaacgagtagtagaaattcttgatgcgatagataacaaaatcaccctcaaccgccaaatcaaccaaaccctagaacaaatggcgcaaaccctatttaaatcatggtttgtagattttgatcctgtggttgataacgcactagatgctggtttttttgagcaggatttaggcttttctgaagaattactgcatcgagttgaagtgcgcaaagcagtgcgtgaaagtgataattttaaaccgttatcagaggatattcggcggttatttcctaatgcgtttgaagaatgtgctgagcctgcattgggacttggggggtgggtgccgaaagggtggaagggacagcccattaaaacacattgtgtaaaaattcaaaatggtgggactccaagccgttctaattcagattattgggatggcggcaatataccttggctaacatcgggtgaagtaagacaatcaattgtcacgaatgttgagaacacaattacagacctaggcttacaaaattcatctgcgaagtgggtaagttcttactccactcttgttgctttatatggagcaactgccggtgaggtatctattaatgtagatccattaacaacgaatcaagcggtatgtgcactaattcctaaagaaagttattgttggtttaactacctccaagttcgaaataaaacaatagaaatgcaaaatcaagctgtaggctcagcacagcaaaatataagtaagaggttagttgagaacttaattgtgatatcacctctgccttatattgtggagatctttaaccaaagagtagaaccattatttttgaaatcaatatttaaccaaaaaatggctatggagctaaccaaactccgcgacacgcttctccccaaattgatctccggcgagctgtctctgagtgatataaaaatagatattccagaagaaacacttatttaa

SEQ ID NO: 315023 - DNA, 543 bp, Proteus mirabilis
atgtccgataaaataaaacgacgcgtcacccgcggggtacttgctggaggacttagtatcacgctactgcttacgggctgtgtcggggcttttagtctgacacccaaacctcaaccccttgccgccggcattcaaggatttaaccacacccaatacagtattaccggttttacgattaacgaaggctacggcagtatcgggggcaccgtctgttgtgtactgcttcccgaacaatggcgaccggatttagtcgcccatattaagtgggataaattagataaaagtaaactctctccccgccctaaatttagccaagtagaagcctataaccgctgggaaaaagaactagaccgatatacgacttatcatgaagcttgggtaccgatcccgcaatatgctgaagaagtttgcggtgttgatgtccattttctgccttgtaatgaagtgaaaatcaccacctcttgttatagatacggtgatcctgagtacccgattaatgaaccgcataatatgaaggagccggctgtatgtccgataaaataa

SEQ ID NO: 315024 - DNA, 540 bp, Proteus mirabilis
atgtccgataaaataaaacgacgcgtcgcccacggggtacttactgggggacttagtatcacgctactgcttacgggctgtgtcgacgcttttagtctggcacccaaacctcaaccccttgccgccggtattcaaggatttaaccacactctctttgaaatttccggttttacgattaacgaaggctacggcagtatcgggggcaccgtctgttgtgtactgcttcccgaacaatggcgaccggatttagtcgcccatatcgaatggagaaaagtcgatgcgagtaaacttccccctacgcctgatatggaccaagtcgaagccatcaagaaatggaagcaacaacttcgtgacaacacctcgcgccatgaagcttgggtaccgatcccgcaatatgatgaaccttgtagcgttaaagtccattttctgccttgtaatgaagtgaaaatcaccacctcttgttatagctattatgaccccgagtatcccatcactgagcccatgaaaatgaaggagccggcagtatgtccgataaaataa

SEQ ID NO: 315025 - DNA, 582 bp, Proteus mirabilis
atgaaagtaaatctgaaaaaaattgaaggtaattgggaattaggttatgccttagataaacatacagtaaatagtcaatttatcggttatgatgaatatggatatggacgatgggacaatattagaagtaaggcaggtgaggctctttatcagctaaaatataaacacgactttactcaggtcgaggcacttgctcaaactattgtaaatgagattgtaataccattcttcccaaaaattggttttgtggtacccatgcctgcttctaaacatcgggaactccaacctgtaactgaactggccgaacaagtggcaaaattaataggggtttatagcattaatacacttattaaaaactctactggggtatcgctcaaggatttgtctacaaaaaaagaaaaagaagcagagataagtggtgcgttttcagttgtagacagaattacgaatgaaggaccgtgggatgttcttcttatcgatgatttatttgacactggagctactatggaggctgcatgtcaagctcttggcagttataataaagtcaatagaatttatgtcgctacaatttcgtggaagtaa

SEQ ID NO: 315026 - DNA, 561 bp, Proteus mirabilis
  misc_feature (427)..(436): n is a, c, g, or t
atgacaacagtatttatcgcaggttcaattaaaattacaaagttggataagcttgttatcgaacgagtccggaagatagttgattctggctatcagatagtcgtaggtgatgcgaatggtgtagacagttctattcaaaagttgcttatggagttgaatagtaacaatacaaccgtatttagtagcggtacttatccacgcaacaatttaggaaaatggagcgttcatgttgttaattccaagcattctccaggatcgagagcattttttacggataaagacataaagatggcagagattgcagattatggtctgatgatctgggattctcagagcattggaacacttagtaatgtaattgagttattacgccagaaaaaattcagcgcgatctttgttaataaagtaaaaacttttgaattaattnnnnnnnnnncaaatgacctgaaaaaattgattagccacatgtcgccaaatgcattagaaaaagctgagcaaaaaatcaagctcagccaaaagctggagcagttagataataatcagatacaaatggtactatga

SEQ ID NO: 315027 - DNA, 627 bp, Proteus mirabilis
atgcttgaggttattaggaaagatttattcgatattagaagtaaattagacaatggctactatcaaatatttaaagatagactggtagatcctacattctatttagataatattcttgttcaacaagaaggaaaaattttatcgtcgacactctgtaacggtgcaaaatatataatagcagatagtgaactttataatagtattgaaaatggtgatattatatctgtttcaaatagtagaattagagttattttatctcgcaaggcaaatcataatacgttacttgttactgagcgttgtaataatttatgtcaattttgttctcagccccctaaaaatagagatgattcttggcttttagatgatgctctacttgcgattgctgcttttaatttcgatggtgttattggaattagtggtggagagcctttactttatggcaataaatttattgattttattagagaaataaaaagattggcaccgaggaccgttttacatgtattaacgaatgggcgaaggttttctgatatttattttacaaagaaattattatctgaagcaaaagatatgaatatttcatttgggatccctctttattcatctcataaagaaattcatgattag

SEQ ID NO: 315028 - DNA, 432 bp, Proteus mirabilis
atgaataagaaatttaaggttattaactctctaacatcactgcgattttttgcggcacttggtgttttattgcatcattttgggcttcttggcaactcatcattaccaccggttcaatttgcagcaaagtatttttttaatgggtacactggagttacattcttctatattttatctggatttatcataaattatagctttaaaaaacacgaggctgctggcgtatttggatataaggattttcttttttttagggtggcgagattatatccagttcatatactttgcttaatattatttatggctttgtttggtgtatttacaaacatatcaaatgttccagcattgccgttattatctaatgcgctattggtacatgcgtttatacctattaatgaatattacttttcattcaacacggtgttattttag

SEQ ID NO: 315029 - DNA, 192 bp, Proteus mirabilis
atgaacgaactcaagaaatgcccgttttgcaataacgatttgttagatgagaaatcagcagcaccaaattttaaatatatccgctgccctagatgcggaatggctggcgcttacggattatcaagcgaacaagcgattcacttttggaatacgttgccgagagagtctatcagcatgggacaggagagctaa

SEQ ID NO: 315030 - DNA, 246 bp, Proteus mirabilis
atgcagggaactaattgggttaaggtgagtgagagattgccatctgaaggtgagccagtaattgttgtctatagcgaacatatccagaacataacatatgagctaatttcatgcggtgttgactgcgaagaacttagatggataccacacaataacagcgactatgattcggctccactggaaacattcgactactggatgtacatcaaagacctgtcactcccaccaatgccagagggtgaatga

SEQ ID NO: 315031 - DNA, 162 bp, Proteus mirabilis
atggttggattgatgggttttagtgtgtatcactatggccaattatctgaatttactacgcaaacaagtgtcataattacaaaatatctatggcgcttacactatgaaaaaccgataaataaatttctgaggaatgcgtggattaagcgtcactacggctga

SEQ ID NO: 315032 - DNA, 984 bp, Proteus mirabilis
atgtttggtgggggagcgtttggcgttgatttgttttttattattagtggatttattatctgctacgcaacagaaagagttgagcgtcatatggtttttaaatatatcataaggagaatgtttagaatatatccaatcttaataatatcaattttatctatatttattttgattgactcgaatgctacgacattatctttacttagatctttaatccctttaaacgctgattattctgctgggtcaccattttttggatataatattcttggcccagcctggacgcttacatatgaaattgcattttatgctatttttctcatgtcatttattatatcgcataggtatagatacataatttctgttgttgcaattttatttttagttactggcatacaaaaatggcagtcaggagctgttacactgcttgcatataataacaattcatttatggttggtagcgtatttcatgctccattaacatttttagcatctccactttttcttgattttatatatggacttataatatataaaatatatacattaattaaacactttaatctttcaagaaaatcttgttcatacattagatatgtatcgatatttgttttttgtatatcagcacttgttatattgtcatgtcaagtttatgggcatggcccattgctatggggtgcatggagtgccgttattgtactctcaggattactaatagaaatttttggcggaataagagaaagtaagatgttgaattttttgggaaatatatcatactcactatacttgacacatgcaattgtgattgaggcattctctagatacacagatgtattctcattgtttaataatcaaaaaggattttcagtagtcatttacctagtcatggtttcattatttattgcatatattgctcatgcatgtattgaaaagccatttattaagataggaagaaaaataaatggttggattgatgggttttag

SEQ ID NO: 315033 - DNA, 348 bp, Proteus mirabilis
gtgaataaatacaccgaactatctgacttcgagattaatttagctgttgctcacattgtacttggcaagggtagctatgattggtgccctgataaaaaagaggtttactttgcaggtattgatggtggtgaatttttacatcatggatacttcgacccatgcaacaatccatccgacgcaatgccgattgtttttgaaaacggcatcagtcttatttcagactggaatgaggttggtgtatggggtgcgaccaatcaaccatggtattcatcagaaaataaaaacccactacgcgccgctatggaagttttcttgatgatgaaggatgcggagaatgaagaagtatga

SEQ ID NO: 315034 - DNA, 408 bp, Proteus mirabilis
atgggtgataaatattattccaactcgggtattattttttatttatgtcatttgttgtgtaacaaaatacaaggcactttgaccattacaagccaagaaagtattggctctcatttccgtatcgtacttccataccagcatatagatacagaagagcgctcttttgacatattattagagggtataactgcaaaactcgccataaaaaaccctgaaatagaaaaaataatctgccaacagcttgataaatatggcgctacatactttgataaaaataaagagaatctttactcagaatacgatatcatacttagagacactccggataataatcctgaatcagcaacagtattattagttagctctattaccggatttgaaaaaatagcaagaaatttaataaattga

SEQ ID NO: 315035 - DNA, 1407 bp, Proteus mirabilis
atggggagtaaagtattttctagcttatcggatgttgcaaatataattgattctctgcataaaacacctaaatattcagaagttggttatccaatggttcgatgtgtaaatatttcgtatgggcctttaaaattgacacaaacaaagaaggttacagcagaaatatttcatgagtactctaaaaaatatagaccacatgaaggtgatatcattattactagagttggagcaaattttggagaaactgcatacgttgaagatacaaatttctgtctgggacaaaacacagcagcaataaagccaacatcaattgcacccgagtatctttactttatattgaattcagccgtgtgtagacatcagatggatgttcttgccactggagcggcacaaccaacattaagtataaaatctataaaatctttacaaattccccgccttggtggagagatcgagaaaaaaattgcaaatatttatagtgagttaaacaataaaattactctcaaccgccaaatcaaccaaactctagaacaaatggcgcaaacgctatttaaatcatggtttgtagattttgatcctgtggttgataacgcactagatgctggtttttttgagcaggatttaggcttttctgaagaattactgcatcgagttgaagtgcgcaaagcagtgcgtgaaagtgataattttaaaccgttatcagaggatattcggcggttatttcctgatgcttttgaagaatgtgctgagcctgtattagggcttggggggtgggtgccgaagaggtggcaaatatcaacagtagatgatgaacttactgtaaaaggtggttctaccccgagcactgcaaatccagatttttgggaacaggggaatattcactggacatctccaaaagacctttccggtagccaagagaaaataatgctcgatacagagcgaaaaatcactgaacttggactaagaaaaattacatctggattacttcccatcaatacagtattgatgtcttcacgagcccctattggctaccttgctatggcaaaaattccagttgcgattaatcagggatatattgcaattactacaacaaaaaggctttcacaggagtatgtcctttattggttggattcttcgatggatgaaattaaagggatcgctggtggtacaacttttgctgaaatcagtaagaaaacgtttaagagtatctcaatggttatacctgatcctcaagtgattgagaaatatacagttacaattaaaagttatcttaataaagtaacgttaaatgcaaaagagagggggagcttagaaaaactccgagacacactcctcccaaaacttatctccggcgagttgtctttgagtaatataaaaatagatatcccagaagaaactttaatctaa

SEQ ID NO: 315036 - DNA, 159 bp, Proteus mirabilis
atgaaatctctaattaatagcatcttagtattatttttcgtacagatgctttctttttctgctgtggcagatgtggttgaattgaaaaacttattaaaagattcactggataatgtatcagaggttcaagaagcatatgccaattaccaagcagcgtaa

SEQ ID NO: 315037 - DNA, 417 bp, Proteus mirabilis
atgccacaaatggggatggatttaaaactggttcagttaatcgcttataccgattggaatgagacatatgaaaaacaaccagatggtacatggacaaactacagttatgactggatgtttaaacctggcgccatgaaagaaattgcgacttatgctgatggcattggccctgattatcatatgttagtagaagaagactcaacaccagataaaatcaccttaaccggtatggccgccgatgctcatgccaacaagttaaccattcatccatttacggtacgagtggataaactacctaaatatgccaaagatggcgatcagctttatgacattatttataaccaagcgggtgccgaaggggtatttactgatttccctgatttaggggttaagttcttacaaaaacaagctaaataa

SEQ ID NO: 315038 - DNA, 702 bp, Proteus mirabilis
atgaagacacaaatacagatcaattgccccgactgtcacagtcccagtttaaagaaaaatggcataaaaagctatggcaagcagaactaccagtgcaaggactgcaaacgccagtttattggcgatcatgccctaacttataacggctgtcactctagaatagaagatctcatacgactgatgactgtccgaggttgtggtgttagagacatagccgttatagccaaggttagtattggaaaagtgcttagcaccataggctcatccatttacaagattgtacctaagaagcgctactatgaacgcttagaggttgatgagttttggacttacgtgtatcgcaaaaagcgtaaagtttggcttatttatgcttatgaccgcgctaccaatgagattgtcgcttatgtctggggcaaacgtgacctgaaaacagctaagaagctaagagcccgtcttaaacaactgaaagtcagctatggttctattagcatggataactgggatagctttataaccgcattcaagcctgacaagaaacaaatcggcaagcagcatacggtaggcatagaaggtaataactgtcgccttagacaccgattgcgacgagccgttcgaaagacctgctgcttctcaaagaagtttgataaccactttaaggtgtttgatttggtattcttctatgtcaattatggctatgtctga

SEQ ID NO: 315039 - DNA, 135 bp, Proteus mirabilis
atgataaatacgttaactaagaaacaagcaacaaggactctgctattttcactatttcttggtttatccgtgtcttctttttcttctgttgcagcttcaacaaatgtaaccattaatggcaatggctatgattga

SEQ ID NO: 315040 - DNA, 1038 bp, Proteus mirabilis
atgaatagttggattcctatgttgcaagatgccgcagagatgtttgtttttctggctgttgagctttcattgctgtttattgtcattagtgccggtgtgagcctgataaggcaaaaagtcccggatcataaaattcagcagatgatgggggcgagaaaaggtaaggggtatctgctggcctcgttgctgggagccgttacccctttctgtagttgctcaacagttccaatgttgcgaggattgttgtctgcgaaagcggggtttggtccgacactcacttttttgtttgtttcaccgttgcttaatcccattatcgtggggttaatatgggttacctttggctggaaagtaactttgttgtacgcgatcatcgctgccggtgtctcagtccttgccagtatcgtattggatttactaggatttgaacgtcatattgttgatcacaaaaactcagcatcaagtggttgcaccacgaaatgcgatgattccgaagcttcggtaaaaaggacggtaaagaacgagcagaacgtatcagcgtgttgttcatcaatatcatctgaacaaccagctgttagctgttgcagcagcgagaatctgggcaatgtgaatctcacaacgaataccacctctggcccaataaagttagctatgaaagatgccttacagcagtttaaggatgttctgccttatcttttgttaagtgtattaataggttcatttatttatggctttatcccttcagagtggattgcagctcatgccggagcagataatcccttagccataccgctgagtgcagttgttggtattccgttgtatatccgcgcagaggcagtgataccacttgcatcagtgctgatgactaaaggaatgggcctgggggcattaatggccttgataatcggtagtgctggagcgagtttgacagaagtaatactgcttaaatcaatgttcagaatgcctatgatagtcgcttttctgacagtaatcctgggtatggccatacttatggggtatctgacccaattgcttttttaa

SEQ ID NO: 315041 - DNA, 324 bp, Proteus mirabilis
atgcaactggaagaagtagctaaagctctaaaagaactgggtcacccgacccgtttgttcatattcaaacatcttgtaaaagctggagaacaaggtttacctgtaggtgaattgcaaaagcagcttggcattccttcatcaacgttaagtcatcatatttcagccctggtatcagtaggactcgtcacacaaaaccgggagagtcgaacgctcatgtgcgtctctcaatatgaaatactggaagctatcatcgaattcttacgtgaagagtgctgtgtaaacagtaaaatagatgttgcggaacccgctggcaaaaatgggtaa

SEQ ID NO: 315042 - DNA, 1437 bp, Proteus mirabilis
atgagtactcttgatgttcagaagctcaaggatgatgccgtcgaatgggccttaactcatggtgttgctttcaaggaatcgtcgtattccgcagtgcataccccgtttaccctgacaccaacacctatcagccgtaaatcctatcagtacttaaagaatgcaacaggaatactcagcaaattaatctattcagtttctgaggatcatgattttttgtactctgcgatttatcccatcaaggccgggaatgccttcttttcagccctcctgaacatgcatcaacaaatccattcatcatcaaggcatgctcctcgattaccattactcattatgcgtagcgactttatggatgataatcgtgatgggttcaggcttatagagttcaatggtatagctgcaggaatggggccgtttggtcagcggatacatgatctgcatcactatctacaacggcaatatcccgctgtcttttctgatttatcgaatcaggcaacaggggcgcttgtcgacaatcaagcgatcgaagggttatcagcagcgatttgtcaggcaacttgcagaattaagcaggagttcggagaccccggccctgccaggttcctgatgattgtgcaggagaatgaaaataatgtgtttgatcaacacttgcttgagctcgccctccagcaaaaaggaatcgaaacgcatcgcaggacttttcgtgaactgcataatcaattgagtacaggcgccgacaacaggctcattctcgagggtgtaggcccacttgataccgtctacttacgtgccggatatcagtattctgattatgaagcattcaatatcgatgagcaggagtgttgtcaggcgctgatggcgacccgagtattcattgagcagcaccgggttgcagtgaacgccacagttggccagcaactggcgaccagcaagcgagtacaaatgctgctctcgcaattgggttacgacgagtttgtcgcatttggattaacactgcaggaagctaaaatagcaaaaacgatactgggtgagatgttacccatcagcccggatagtatcaaccttgcaaaagagtctccttcggaaacctgggttctcaaaaatcagggtgaaggcggggggcattgtctgtttggtgcggatatcctgacaaaactgacggaactcactccacaacaatatcagtcctggtcgctgatgcgccgtttacaccctcagccccgagctatgcccaccttgattgtgcgtaaaggggagttgcataaggtgaatgatttgataagcgaacttggaatgttctccgtgcagacagataacaatccctccagtgctgagcacagttttgctggatatctaattcgtagcaaatcagctgaatcgacagagggaggggtccatagtggacaaggtgttttagactcgctggtatacagcgattag

SEQ ID NO: 315043 - DNA, 492 bp, Proteus mirabilis; identical to SEQ ID NO: 15993

SEQ ID NO: 315044 - DNA, 627 bp, Proteus mirabilis
ttgccaccacaaactggcattattgccgtcaccgatgccagagcgcgtcatttactgcaagtctgtgataacttaaatattaatgtgcctgaagaaatcagtattataggcattgatgatgaagatatgacacgttatttatcacgtatagcgttatcttctgtagtacaaggttcacgacaaatgggatatttagccgcgaagcttctgcatcaaatattagaagggcatctaactgaacaactaccaagaatattagttcctccagtaaaaatcattgaacgtcgttcaacagactttcattcatttagtgatcctaccgttgtacaagcaatgcactatatttattacaatgcttgtaaaggaataaaaactgagcaagtgttagacgctgtaaatatgtcgcgttctaatttagaacagcgttttaagaaagaagtagggaagactatccatgccgtgatttatgaagagaagctgaaaagggcgaaaaacttattagccacaacaacattatcaatacaagagatttctttgatgtgtggctatccgtcgttacaatatttttactctatttttaaaaaagagtttggcatgacaccaaaggattttagagatgagaattga

SEQ ID NO: 315045 - DNA, 1467 bp, Proteus mirabilis
atgttaaataaatataattttaaatctattattcctttatggtgtataggtatattttacatactaccaatacttattactaacaatctttattatgatgacattggaagatcaatatatggatatttctcatggggaatagatggtcgaccactagcagatttattttttagcatcatcaatcttgggtcgcctgcaactgacattgccccatatccacaaatagcatctattctgatgatgacaaccttgtgctactttatgcacaaagcattaaaccctgagcgaaaattaggatggttattatttacaccgatattcctaagtccttttttcattcaaaatttggcatttagatttgattcattgacgatgacgctatcaatagtgatagcgtcattacctctattttttatgagaaaaagtaatttaaagttattaactatatctgctttttctgttttcgcctcactctctctataccaggcatcattaagtgtatttgctgccgttatatgtctatatgtacttttctcaataaaagacagcgccagcccatacgcattattacgtaaaattgtgattactatgcttgggatgatgattggttatctgggttattcaaacctgataattcctatttttgtaaccagtgaatatgcaaatagctacaatcaaattatcagtagcgcatcagaactaaaagtaaacatagatataacaattaacatcctccattcattttttactggttggatggcgaaaatatttatcattattttctcactatctttttttggtctaattgctgttttattaaaaatactgagaactaaaaaaccaatagcgcaacgaataaccagtgctattctatttattataagcttggtagttatattggtgtgcatccctgggccaggtattgcactgaaatccatgcctattggcccgcgtgtttttattggatttggctttgctatttcagcttcattagccttgatttcttttattacagataaaaataaattaaatgccatttacggtgctcttatagttatttcgttttcatacatggcaacatttactaatgcaatgaaatcacaagataagatgacagatagaatcatttatggtgtaacaaatgatatcattaagatagggtataatgatgtcaagaccataactattgatggtaagtccctgtatacccctattgcagataaatccatacaaaagtttcctttgatggggcaaatgataccatcatattttgacggacatcttgcttggggtgttgtcagaatgattgaaatatactctggcaaggatcagccaactcaagttactcagaatgaactaatttcaaaaatatgcgaaatgaatttgattaccgatgccggtttatataaaacatattaccttgatggtaatcttgtcgtttcattctcatttaaaaaatgtccgtaa

SEQ ID NO: 315046 - DNA, 702 bp, Proteus mirabilis
atgaagacacaaatacagatcaattgccccgactgtcacagtcccagtttaaagaaaaacggcaaaaaaagctatggcaagcagaactatcaatgtaaggactgcaaacgccagtttattggcgatcatgccctaacttataacggctgtcactctagaatagaagataaaatacggctaatgacagtgagaggctgtggcgtcagagacattgctattatagcctcagttagcattggtaaagtgcttagcaccataggctcatctgtttataagattgcgcctaagaagcgctattatgaacgcttagaggttgatgagttttggacttacgtgtatcgcaagaagcgtaaagtttggcttatttatgcttatgaccgcgctaccaatgagattgtcgcttatgtctggggcaaacgtgacttgaaaacagctaagaagctaagagcccgtcttaaacaactgaaagtcagctatggctctattagcatggataactgggatagctttataaccgcattcaagcctgacaagaaacaaatcggcaagcagcatacggtaggcatagaaggtaataactgtcgccttaggcaccgattgcgacgagccgttcgaaagacctgctgcttctcaaagaagtttgataaccactttaaggtgtttgatttggtattcttctatgtcaattatggctatgtctga

SEQ ID NO: 315047 - DNA, 816 bp, Proteus mirabilis
atgttggcactttctgtcagacagccacttaatatttattattggctcattgcgatatcattagtttatatcagtttattgagttgggtgcttaattcatggtctatgacagaaagtgcgcatcatattgatcagcaacagcaaaatacattatcggtctatcaggtgatgttttcgccacctaaacaatctactaccatgattgaaccgagaataaagatcgagtcacaacaaccacctattgcactaccaagaagtgagaacggtgaatttattgaagcgcccaaacaacccgcaaaaaagcgtcaacaacaaccgaccccaataacacctaaagcgataaaacaggtaaaaaaacagccagtagtagacaaaacagtacctataaaaccacgtgatttaacaaatcacaacatagttcaaagtacatcacaaccatcagcagaaaacttaacacagcataccgcgagttcattggcagggagtagtcgtgcattaagtgaacatggtattgggcagggagagtctgaaaatcactatatcagtttattgcgccgagaaattgagcgtcataagcgctatcctgcgcaagctcgtcgtatgcaagatgaagggctggttgttgtgcgtttctcattaaccaatgaaggctatatttcatccgttgtacttgaacagacctcaggggtggcatctcttgataatgctgcacttgccgcggtaaaacgggtaaaaccaattggcccgaaacctaataacttatctgatcctttaacctgtctcttatacacatctccgagcccacgagactcctga

SEQ ID NO: 315048 - DNA, 3078 bp, Proteus mirabilis
atgcatgtagtgctttttcacaaacgtacgttagtctccatgatggtttcactctccttattttctctcaatagttattccaagactaaggataatacaaccgatcttggacaaattcaggttgcagataatttagaaaaagatcaacaaggttatgctcaagtctatgaaaaggatgtggctaatatttatttaggtaaagcccttattgaacgttatcaaggggtatcacctgcagatttatttaaaagcgcgataggtgtttatagtggtgaagcccgtaatggaggagcattggatccgaatattcgtggtattcaaggccaaggacgtatccccgttactgtggatggtactgagcaggcgattacggtttatcgtggttatagcggtgcatctaatcgtaactatattgattcaaatttgataagcagtatctatatagaaaaaggcccttcacttaatcctaatataaaaacagggattggcggaggggttgccattaaaacattagatatacgtgatattgtgcccattggtgagtcttttggtattaattttaaaggggatattagtaataatgccacaggctataaagatatttatatcaatatgattgaagattatcgtaattatccaaaattctatcataaatattcttttttaactgatcccgcattagaaataacacctgaaaaaaataaagatttaaagtttaatgactatgcgtttcgtattggaataggatttgagaatgaaaaatttaatttactctttgcatatgcattacgtgaaaagggaaattatttagcaggtaaaagaaataaagacgattatcttaaaacagattacatgcatgagatacatgctacagatcataaattcaggttaacaccttatgtgccttttattgctcatatttatcgacctggtaatgaagtgccaaatacatctaatcgtaaccgctcttttttagtaaaaggaactctatttccacaacaagcgcatcgtttctccattaattatcgatacaccgatttattatttggcgacattatgccattacgtttaagttgggctcgttatgaagaaaatttagttaatcaatggcctttggcaaatattacacaacaagcaggcatattaacttatcaatataaaccagaagataaaaaaacagatttattactgcgtttatggggcaatttaacgacaggaaatactaatactcgaggaggagcacctcgacaacctaagaatagagatataactaatgattttgatcgatatttatttatgaaatcaaaatctgaaagtggtatgagttatgacactgatactcgttttttagatacagcttctctatatcaagataataatcgttatggtgttgatttttcatcgttatttaaattatcacctcagttttctatttctttttccggtcaatatcaattggaaaaattagatagtcatgagcttgaacttcccatgggttttgatttcgtgaccgaggggcgagcagggcaacgtcatgaagtcaatttagcgttagccacagattggaaaccattatcctggtttgcgatgaatattggcggtaaatatcattactatcatctgacggatacctttttaaataataaacggaagaatagggttaaaaattacgagaaaacagcccctatccgcggttatctgatctcttatcgacgagtcttaacgccagaagagtatttactctatcgcgcggttaacaaaattgatgtcgatactttacctgacgagttaaaaaattaccgaagttctgctgagctgagtaaaaaaattagagactttcaacaagcggatttagtttatcctgaaggtggcgctttgctagaggaaatcaaggagcagattgttaggccatatcttcagagaatacagcatgatatggagcatgaagattttattcgtaataaccatggaaagatgcaaataaaaaacgctaaagccatcccgatgaaaagagagtttagcctttggttatttgatgaaaatggcgtactacttaagagtaagaatattttacttaatggttttcttgatatggaggaaaaagtccctcatccagtgacgggggagttagtctatcgctttgaaaaagatgttattaatcctcaggcattttctctatcagaagatattcaagatccctacgcactggagcctagctatcagcatggcgcattttcccctttaatctctgccaccctttatgccaacgatatggtgcgtttttatggccgttatactgagcaattgcgtttacctaacttatttgaagataccagtggtttttcaggctctaaagctcgctattatggttttaagttaaagccagagcgtgccaaaagcagtgagtttggtgtggttgttgattttacgcattggttgaatatagagcgccacgctgatattaaaattaattactttaaaacgaacattgaaaatgtatttgatagagatgctaattggcaaattagacagttagaaaaacaaatattagaaggtgtagagttacaagcccggtttgataatggatttattttctttgataccgcattagtgtatagccataaaaataaagtctgtgatgaaaatgctttttatgagcttgatgcatcaggattatcgggtattaaaaactgtatgacagggggataccctggcggatttttgcgcacctcaatgcagcctaaatactcagttaacctacatttaggcacgcgctggctaaatgataaattagaattaggtagtcgctggctctattcatcagaagttgaaaataaagatgaaaaatggcttaaagaaaatttacctaatagctattttggcataaataataatccgatgcgttgggcaaaagtatttactattgatgcttatgcaacttatcaatatagccccaatttatcttttgaaataacaggaagtaatttattaaatgaatattacattgatccgctgacccgttctggtatgccggcaccaggaagaagtttgcgattaggtgtaacagcccaattttaa

SEQ ID NO: 315049 - DNA, 675 bp, Proteus mirabilis
gtgaaagcaaatcaatttataggtttggttaaattttttagaaatgaagattatttagataaattaattgaaggatgtttccattgcactcctcctgaagtttatagattagataaacaagaaggcatctcggataaatttgaaagttgttctttttcttatagaaaatctagaaatgatgctgatattcagttgaatatcaatggtagaaatctaaccgatgttcttggtcttactttgcataatggtcagcaacaagattcatggatgcattgttggtttgtattacggctacctcataatgaaaatgatctaaatcaacttattgaagatgttaagaaaatgaaatgccaatttggaaatcattatgcttttatccctaattccaatttgaaagatcttatttatcgtttgcaaaaaaatagcaaattgccattggcaggtggtgaagttaaatacagcggtgacaattcattatggggtaataagtgtaaatctcttgaatattcttatcaaagagagtttagattcctattcggtgaatgctctgttacagaaatagccccttacgttgtaaatattgaaaatggtctaagtgatcttattttaaaggatccagaccttgagcttacaagtaaggatggagagcaagtgtggtttcatatacgtgcataa

SEQ ID NO: 315050 - DNA, 1674 bp, Proteus mirabilis
atgaactttaatcaaaccacagtattggctttctttgaaccctccaaggttagttacgagatccctgtataccagcgggcttatgcttggggagagaacaactggaatgaattcttgtcagatctttatgagcaagtagatggggaaaacaactattttttcgggaatattcttcttgaatgcgttgaaaagaacaagttatacgaaatcattgacggccagcaaaggatcactaccattactatatttgttcgctctctgctcaatgtattaaagacacgagatgacctgtcagagcataattttgacattgaagacactgaagaagctttcatcagagataaaaatattaaactccgcccagttgaatatgatcgaagttgttatgactgcttaattgtcgaaaatcacgataagtttgatgcttattctccatcacaaaagaaactacttgaagcgaaagcatacttcactaaacaactctctaaacttgataccgcacgccttgtcagtatccaagagaagcttgaaaataccgaccttaccatcatcgagttggagggtaagaaggatgcggctctgatgtttgaactggaaaataatagaggcaaagaattgaccaatatggaaaaggtcaaatcgtatttcatgtatcagatgtacgtgaatagccctgctgacgatgttgataacaatatcgaatttgtatcgaacatatttaaacgcatttatcaggtaatcaacaacatagagcggattaatgaagatagtgtgctgatttaccacaacaatgcgtatatcaaggggtatgcctaccgcactttggatgacttgaaggaagctttccgtaacaaagatgacaaagttacctggataaaagagtacgttcgaagtttaaacgattcattcgtggccatagataagttacaacatgaaaagagtatgtatgcgaaaaggctgtttaaacttgggatccccgcgtacatttacccattcattattaagggctaccgttataactcttcagatctcccaactcttttccgcattcttgaagtgataacctttagggctaagctcatcaatagtcgggcaaatatccaagagcgtctcaatgaaattctgctctcctacgatggcaacaatgctgtcttattagaaaaaatagcaagtaagctcaatgatacatggtattggagtgatacaaatatgaagaactatctacatggcgggatgtacggaaataatgtactaagctacctgctttggagctacgagagttatcttcagagagctggatattcagtcgaagggttcaagattaccaaccaacaaattgaacatatagcaccgcgcacgcctactgatggaagtcctctcgaaacaggatatgaactcaatgagcagggtgaatattccgaagactttagctctgaatacctcaattgtcttggcaacctgatgctcatatcagggtcgcacaatgcgtccatcggaaacaaaccatttgccgataagttaatgtcttacagaaagacccccattcttaaccaacaggctgagattgcttctttcgttaaagatagcgagaacccagtgtgggattgtgaggcaatagataaacggcataacaaaatcgtagactttgcgatcactgagtggtcatttcggtaa

SEQ ID NO: 315051 - DNA, 636 bp, Proteus mirabilis
  misc_feature (587)..(596): n is a, c, g, or t
ttggctatccttaatgaatatctatctaaaaatcatttaaaaaaagcgaatagttttgccaatcaagcacaattaatacaaagccatcatttagaacatccacagactatcgaagcgatgggaatgcttagtcaattacgtaaacaatggcaaacctctcatttcaaatacttacaagcacaaacacaagctagtgataatgcagccggtattaacgctatcacaaaagtaacacgtatggcattacaatctttaatgctaggtttagggggatggcttgctattgataatactattagtcctggaatgatgattgcaggttcaatacttttaggtcgagcattagcccctattgagcaagtgatcaatgtatggaaaagttgggatagtagtaaagcagcctataatcgattgacaactttattaaaaacataccctcaagaaaataaaaaaatggccttacctaagcctcaaggccaattacttgttaatatcgatgaagcagtatatccacacagtgacagaatattactaaataatatcaattttgctctattaccgggagatatactaggtattattggccnnnnnnnnnngtatatggcaggtcaaaaaaggcattgtgcgattagataa

SEQ ID NO: 315052 - DNA, 996 bp, Proteus mirabilis
  misc_feature (984)..(993): n is a, c, g, or t
ttgtacgacgcacttcattcttcagaaaatcatgatattctctgctgggatacagatactaataatggaggttatactcacaaattcttccgttttgctaccagttcagatgagatccgtcaacaaagagatgccattgcagaatggtctcgctatagttacggttggatggggcgaactcctgattataaggcggcattttgttgtgcattaggtgcttacccagagttctacgggtcatttgcagataatgccaaaacgtggtacaaacatattcaagaatcttgcagctatttcagccacgctattgctaacccacctattgatcgccacaatcctacatctcatttcattaaaatagaaaaagagactgatgctggagttatcgttagtggagctaaaggcatggcaactaattcggctttagctcactataatttcattgttggaactgctcgtgacacagagaattctccagattttacgttcatgttcatagttcctatgaatgctgatggagcaaaactaatatctcgtacttcttatgagttagctgctagcgttaccagttctccttttgattctcccctttccagccgatttgacgaaaatgatgcaatcttgattatggataatgtttttattccatgggaaaacattttaatttatcgtgaagaaggtagttcccgcagttgggctgtacaaagtggctttgcacgcttgtttccgttacaagcttgtgtacgttttgctgttaaattagactttattacaggcttgttacaaaagagcttagagtgtactggagtagccgattttcgcggtgttcagtctgatcttggagaagttgtagcatggcgaaacttattttggtcattaacagatgctatgtgggcagaagctcagccatgggaaaatggtgcttatctaccgaattctcaagccagccaaacctatcatgttatggctcctatggcctataannnnnnnnnntaa

SEQ ID NO: 315053 - DNA, 414 bp, Proteus mirabilis
  misc_feature (26)..(35): n is a, c, g, or t
atgttatggctcctatggcctataannnnnnnnnntaatgttactagtggtttaatttatttaccctccagtgttcgtgatataaaaaataaagagcttaatccatatattgagaaatatgttcgtggttctaatggaattgaatatattgaacgtattaaaattttaaaattaatgtgggatgctatcggaagcgagtttggtgggcgccatgagttatatgagattaattatgcgggtagtaaggatagtgttcgcctgcagtgtcttcgtcatgcatatagttctggtaatatgatgaaaatggataacttggtagagcaatgtctctctgattataatatgagtggttggactaagcctcatcttcataataacaaagatattaattttctcgatcattcattgaagtaa

SEQ ID NO: 315054 - DNA, 627 bp, Proteus mirabilis
atgaaattcaataaattaggcgtaatggttgctggtgcacttcttatgggttctttatcaactcaagttatggctgctaaaaacgcagacgttacatttactgggcgtttagttgcagcaacttgtgatgtaactcctagcaaagccagtatcgacttaggtacttatgtaacgagtgaaattacaagcactgctgcccctcttggtgaaagagatttcagcttaacattaaataattgcactaagtattctcaaccgggtgacgacgaagatactacaatatctaatattgaattaatggctacaggtacagccttagtgggtaataataaattattctctagccctgattcttctgatcttggccaagcaggtattaaaatctctgctatgggtaaagacattttaccaaaccaatcagcagagttggcattaaaagcagaaggttctaaagaagataacattattgttcctatgaaagcaggattatatgtaacttcaactgaagcttctttgaatcctcaagatattagagttccagtaacctttagtgttgcttataataatattagtctgtcatggaaaaggaatttattccttttccatggtttttatagcgttaactaa

SEQ ID NO: 315055 - DNA, 318 bp, Proteus mirabilis
atggacacagatacactagccctggtgataatcgggctgatattgtttacagtattatatacattacaacacagtcacagtatcattaaggacattgtgacactactcaaaagcacaccatccgatgaaaaagaatatgtagactcagaactctacattcagcatgtaaaaaccattcggatgtacggatatctagacagtacgaactataaggttcatgttggcgatgctgatatctgtagtggaggtgtcacgcgtcgtgggcatacgttgtcggcagcgggccaaaaaggaatacgtccatgcccatcgaggtga

SEQ ID NO: 315056 - DNA, 540 bp, Proteus mirabilis
atgaaactttatcacgtcgtagctacggctaaaaacaacaccatcggtctaaatgatagcatcccttggcaatctcgagcagatatgtctttctttcgtcgtcgtacgatgaattcaattattgtgatgggtcgtaaaacttacgaatccttatatcgcaaacttacaggtcgacacattgttatcttaacacgtaacccagatacattctaccttgacaatgagaatctgatgggtgatacagtcgttgtaagtaatgacctacaactgggtatgggtaaaattcttgattgtctaatcgatcatcctgaagtcgatcgtgagcgcgcttatattgtagggggtgaacaaatttacaccctaacagctaatctcgtagcgggtgcgtacgttagccatatagaggtgcatgttgaaggtgatgcgcattataaactacctgaacacttgaccgtcgctacaaatcatccaacggaattgggtaatgaagaagatccattccgttcttatactttttacgaaacagaaatagcaggttaa

SEQ ID NO: 315057 - DNA, 255 bp, Proteus mirabilis
gtgtggcatttatttgttattacaactgagcatagagaattattacaaaaacatttaaataattgtggtattcaaaccttgatccattatcctacccctccacataaacaacaggcatataaaaaatataattatattaatttacctataactgaaaaaattcatcaggaagttttaagtatccctatgagctctgttctaaatgaagatgaagttaacaaagttataaattcactaaacggatggtacatttga

SEQ ID NO: 315058 - DNA, 390 bp, Proteus mirabilis
atgtctaaatcggcaaaaggtacgacagaacggcctggacggaacgtaaaagctaaatctggtttaaaccgctcaatactggagcagggctggtatgaaatgcgccgtcagcttgagtacaagcagctctggcgaggtggtcaggtagtggcaataccaccggcctacaccagtcagaagtgcgcttgctgtggtcatacagcaaaggaaaaccgccagtcacaaagtcaattcgagtgccttgaatgtggatatacagcgaatgctgatatcaacggggcacgtaacattttagcggcaggacatgccgtgcttgcctgtggagggagggtgcagtcaggccgcccgtcgaatcaggaacccgccgaggtgattcagacatcagtctga

SEQ ID NO: 315059 - DNA, 186 bp, Proteus mirabilis; identical to SEQ ID NO: 315007

SEQ ID NO: 315060 - DNA, 369 bp, Proteus mirabilis; identical to SEQ ID NO: 315008

SEQ ID NO: 315061 - DNA, 198 bp, Proteus mirabilis; identical to SEQ ID NO: 315009

SEQ ID NO: 315062 - DNA, 333 bp, Proteus mirabilis
atggaagatgaaatattgaaaacatcagaagccgccaaggagttaaaaacaacacctagaacagttgcttatcttatttctaaaggagagttgaaaggtagaaaagttggccgaggttatagaaccaccagatctgctgtgcttgattatataaatagcccagagcaaactcatgatgcgaacaaggataatctaaacggaggtagattatgtcaatcaaacaacgaaacggaatatggcactgtcatttctttacaccgtcagggaagagagttagaaaatctcttggcacaaaagacaagaagcaagcgcaggagatgtatgacaaattaa

SEQ ID NO: 315063 - DNA, 1056 bp, Proteus mirabilis
atgtatgacaaattaagggctgagtcatggagaactgagcaattagatgaactccctcagcgcacatttgaagagtgctgtattagatggatcagagaaaaggagaataaaaaaaccttagatgatgataaaacaaaaatagaatattttttaacaaagttctcaggaagagcaatatcaagcattactgctgatgaaatatacgagtctgtctcttgtatggaaaatagaaagcaccggcagatatgggaaatgaaaaaagaagcagctataaaaaaaggagtagagccaccaaaatacacaccaaaacaagttagcctagctacaagaagtcagtacctatcttttattagatcattactaagaactgcaactaatgattggcgatggatggagtcttgcccatcaataaaaaccaacaagccattaagtaagcgcatacgctggctaactaaggatgaagcaagcaggttaattcagtgtatgccagaaagtatcaagccaatagttacatttgcactagctacagggttgagacgatcaaatatcataaatctagaatggcaacaggtagacatgcaaagacgtgtagcatgggtaaatccagaggatgccaaaggtggcaaggcaattggtatagccctgaatgataccgcatgtaaagttttaagagatcagataggaaagcattcaagatatgtctttgttcatacagagtcaaaaaaacggccagatggaaccatgacacctcaggttagaaaaatgagagttgatgataacagcggttggcgagctggattaaaaagagctggtatcgaaaactttcgctttcatgacttaaggcatacttgggcaagttggttaattcaatctggcgtaccactaacagcactacaagaaatgggaggctgggaaagtatagaaatggtaagaaggtatgctcatttggcgccaaaccatttgacagagcatgcacgtaaaattgatgacgtttttaataataacgacacaaatacgacacaaagcaaaaaccaagttggattgaaattagcgtaa

SEQ ID NO: 315064 - DNA, 921 bp, Proteus mirabilis; identical to SEQ ID NO: 297638

SEQ ID NO: 315065 - DNA, 174 bp, Proteus mirabilis; identical to SEQ ID NO: 315006

SEQ ID NO: 315066 - DNA, 270 bp, Proteus mirabilis
atggcgaataccgctagattaagactgggcttctcgcctttaactaaaaaaatcagcttagcgaaaatgaaagtcgtcggcgatggtctcttggtcatggttggcaacgatgaaagagatgtgacaaatgaagcagcacaaatggtctggcaattagtaattgctgaaggcggggaaataaagtggcatagagaagatggaaagatcatgaagctaaaggctgaactgattgatgacgacaactcgcagggatgcaatgaagaggaatga

SEQ ID NO: 315067 - DNA, 534 bp, Proteus mirabilis
atggctgagagaggcgtaaataaagcggtcatcattggtaacttaggcgatgatccgacagttagatattcacctaacggaacagcatttgctaatttatcagtcgctacaagcgaaatatggacggataaaaacactggagaaaaacgagagcgtacagattggcataacatttctatacaagggaaattagcagaaatagcaggtcaatacttgaaaaaaggaagtcaggtgtacattgaagggaaaatgcgcacccgtaagtatcaaggtaatgacggtcaagataagtacattactgaggttatcgtggatatgaagggaacaatgcagatgttaggtggccgtggtggtcaagataatgcaccttcacaaggccaaggcggttggggtcaacctcagcaaccgcaagcacagcaacaacaacctaaacaacaaacacctcaaagtgagccaccgatggattatgatgacgatattccctttgctccaatcgggcttatgtatccacgccatttaattaatgttatttaa

SEQ ID NO: 315068 - DNA, 873 bp, Proteus mirabilis
atgaaattcgctaaggcaatgcgaaaaaaagcaaaattaaggctcgctttaacagggcctagtggctcaggtaaaacctatggagcactggaaatagccaaaggacttggcggaaaaacggcattgattgatacggaaaaaggaagcgcttctctttactctgaccgttttaattttgacgtattggagttagatccaccattcacaccagagcgatttattgaagctatcggggttgctcaggaagctggatacgataatttgataatcgacagtattactcacgaatggagtggaacaggcggatgtctagaattactcgatgtgttagcaaaagccaagtatcgaggcaatacgtggtcagcatggagcgaaataacaccacgtcacaatgcatttctcgatgcgatcctacggtctgacctgcatattatcgcaacgatgagaagtaaaacggaaactgctcaggtcgataaaggtaatggtaagaaaggcgtagataaacttggtatgaaatcagagcagcgtgacggggttgagtatgagtttacgactgtactagacctaaatcacgaaactcacacagcaatggcaagcaaggatagaacaggattgttcagcaacgccgaagttactcagttaaatgaattaacaggtaaaaagctaatggattggcttaatgatggacgcactaaagcagagatagatttagctcactttacgaacattgcagcggaagcacaaaacatggatgagttaaaaatcgcctttagtgaagcatacaaagcacttagagatacacctgaacaagcggaggctcaaaaagtgtatgagctaagaaaagaagaactaaccaaacaagaggcagtataa

SEQ ID NO: 315069 - DNA, 150 bp, Proteus mirabilis
atgaacttggacgcatcaaaaaatcaccctcctattcctccacatattcaggcgttacgtgatgcagaaagggattctgtaccaagtaataaatctgaagtcgattactacggaagcgatcgacgtcaaggtcaatacttaggagattag

SEQ ID NO: 315070 - DNA, 342 bp, Proteus mirabilis
atgatttttgggtttatttttcatctaaaaatgaaagcaatagcacaaataacgacaaaattggtaagtggatgtattttagtcgagcattgtaaatatacgaataatgctgaatctggagttgcgtgtttttacttaaatattgatgatattgaagggcataaaaaagttattaagttttttttagataataaattaattcccataaataaatcaggtaaatttaagaatatatcattcaaattagacatgcagacaatgaatcaggaatatggagacaagtttgaaggtaagttatcattagagcattttattgatttgagctctggtatttttaagtga

SEQ ID NO: 315071 - DNA, 282 bp, Proteus mirabilis
atgcaaaacaattttactcaagttgatgtcttatctgcacgttatgacgatgtgttgatggctcgttatcaactggctattatgcgttctaatgtcaattatctattacaagacaaagatagtcgtgtcgcagatcgtaacaaaattattcagcaaaataaaaagctagctatcatggctaaaaacaccatggaaacatgggtgaaagagaagaaaatgactgttgcagcacaaaaaaatgctgatgatatttcgacgttatttaaaaaactttttgattaa

SEQ ID NO: 315072 - DNA, 984 bp, Proteus mirabilis
atgaaccatttgatgggtaaaagactttttttattaggtacaatcttctttttttctgctgacgtctttgcagcttgtattcagaatcctaatttaaaaaatattcaggctcggatccccaataaaacctattcaattcaatatgatgatatagggacaagagtattagatgagtttcagattaattatgccaatgggcctataacaactttttcaggtaacgatgggcggtgtgggaacgcatcaatcactgccaattatactaatggctggttgcctaatgcgaataaaatagcacagaccaatattgcgggtattgggatacaggttaaatttgctggaataggtgcattaaatacaacgtatttgaccccaaaggacccaagtggcaattcttatcgacttcttaccccttattggacagtcaaaattataaaaacaggcagagtaacgcaatcaggaagccttcaatggggcaagattgctcaagcagtacaaaataatacacaacctaaaaacacaacttggaacttaacttcactttatttgcctcttaatgcaataaagataaattcattaaaatgtactacaaaatcatcaaattataatattaatatggggacttggtatgatactcaatttaaaaatattggtgatgtcagtaaaagtgtagatgttcctattacattaaactgtgcggctggcactaacattaaagcgacagtgacaagtagtgctggatatatagatgcaaatacagggaaattaaacctatcgggcactaatcgagccactggtgttgccattcagttattagataaaaacaataacccgataaaactaaatacaaaaaatagtctacaaaatggggtctcctccggtgattatatatttggttggaaagcaagatatataaaaataggtaataaaataacgcctggtagtgctaactcaacagcaacagtaaatatcttatatgagtga

SEQ ID NO: 315073 - DNA, 159 bp, Proteus mirabilis
atgcttcaagaaaatgtagttaaagatatcattgtttggatcgagcaaaacttagattcacgtttatcattagatattattgctgaaaaatcaggctataccaagtggcacttccagcgcttatttaaagcatatacaggaatatctttaggcaaataa

SEQ ID NO: 315074 - DNA, 225 bp, Proteus mirabilis
atgatccaccaacctttaggtggataccaaggccaagcgacagatattcaaatccacgctcaagaaattttgaaagtgaaatcgcgtatgaatgagttaatggctcaacatacggggaaatctattgaagaaatagaaagagatactgagcgtgatcgtttcttatccgctaacgaagcgttagaatatggtttagttgataaagtttatacacaacgcagctag

SEQ ID NO: 315075 - DNA, 234 bp, Proteus mirabilis
atgaagtcatctaagaatttaaactctcggcaaggcattaaaaatagacctatggtggttgatgaaattaatatcatgtggtgcgaaatagcattttttactaataaggagggaaagctcaagcatagtggtaaacgccgtatatcaaatagtcatatgtttgctgattcattagttaagctagatacactgaaattcagtgacatattttttaagtgtaattccagtaactaa

SEQ ID NO: 315076 - DNA, 822 bp, Proteus mirabilis; identical to SEQ ID NO: 296988

SEQ ID NO: 315077 - DNA, 378 bp, Proteus mirabilis; identical to SEQ ID NO: 295783

SEQ ID NO: 315078 - DNA, 819 bp, Proteus mirabilis
atgaataatagagtccatcaggggcactttgcccgcaaacgcttcgggcagaactttttaacagacagctatattattgaaagtattgttgaatctatttatccacaacccggtgaagccgttattgaaatcggtcctggtttaggcgcgcttactgagccggtgggggaaagaatggataaaatgacggtcgtcgaaattgaccgtgatttagctgcacgcttagaagttcaccctacattaaaagataagctaaccattattcagcaagatgcgatgacgattgattttgcccaattagcaaaagagcgtcagcaacctctgcgggtttttggtaacctaccttataatatttcaacgccattaatgttccatctatttagttttgctgatgccatttctgacatgacttttatgttgcaaaaagaggtggttaatcgcctagtggcaagtcatggtagtaaaacttatggccgcttaagtgtcatggcacaataccactgccaagtcattcctattattgaagtgccaccaagctcatttaagccagccccgaaagtagattctgccgttgtgcgtctgatcccttataaggaaaaaccctatccggtgacagatattgctatgttaagccgtatcacagcacaagcctttaatcagcgccgtaaaacgttacgtaatagcttaggtggactacttacagcagaagatatgctggcattagatattgatcccactgcacgcgcagaaaatatttctgttgagcaatactgtaaagtggcaaactggttatcatcacaacagcaacacgctgagtga

SEQ ID NO: 315079 - DNA, 1002 bp, Proteus mirabilis; identical to SEQ ID NO: 311815

SEQ ID NO: 315080 - DNA, 1311 bp, Proteus mirabilis
atgaaaaattggaaaacgctggttatcggcttaatgatcacggttggtgcagccaccagcacaaccacttttgcagcacaagaactcaaccgcgtatcggctatcgtcaataacggtgtcgttctggaaagcgacgtcaatagaatgttacaaacggtgcaaatgaatgccaaaaatgccgggcaagaaatgcctgatgagcaagttttgcgccaacaaatcttagagcgcttggtgatggataacatcatcttgcaaatggctcaacagatgcaaattgatattcctgaagctgccgttgagtcaaccattcaagggattgccgcagaaaacaacctgacactagagcagttaaaaaaacgtcttgctgccgatgggattgcctataacgattatcgtcaagatattcgtaaagaaatgatgttagcagaagtgcgtaataacgaagttcgtcgtcgtattacgattttgccacaagaagtggactcattagctaaacaaattgaaagccaagcaagccaaagtattgatcttaatcttagccatatcttaattccattatcagaaaatccatcacctgcagaaattgaaaaagcacagcaagtggtgaaccgtattaagaaccagctaaaaaacggtgctgatttcggaaaattagctgccacttattctgccgatccacaagcacttaatggtggtaatatgggatgggcatcaattgatgagttaccgacaatctttgctaaacagcttgctaatgcacaaaaaggtgaaattgtcgggccactgcaatcaggtgttggtctacacattattaaagtcaatgatatacgtggtgcttcaaaaaccgtttctgtgactgaagtaaaagcacgccatatcttactaaaaagctcgcctatcatgaatgatgagcaagcttatgccaaactacagaaaatttccgccgatattcgtagcggtaaaatcagttttgcggatgcggctaaagagtattctgaagatcccggttcagcattacgtggcggtgagttaggatggtcaatgcctgatatttatgatccagctttccgtgacgcgttgatgcgtttaaacaaaaatgaattaagccaacctgtgcgctctaattttggctggcacttaattgaacttgaagatacgcgtagcgttgataaaacagatgcagcgaataaagaacaagcttaccgcttactgtttaaccgcaagtttaatgaagaagtgcaaaactggatgcaagagttgcgtgcaggcgcttatgtgaaaataatgaacgagaataatgcaaactaa

SEQ ID NO: 315081 - DNA, 2367 bp, Proteus mirabilis
atgaaaaaaagttatcccacactgctggccaccttagtttgggccacaatttatgctcagcctgcatatgctgatcttgcctctcaatgtttactgggagtccctgtttataataagccattagtcgaaggcgatcctaactcattacctgtcaccattacggctaaggatatgcaaggggaatacccacgcatgatccaatatagaggcaatgtagacattaaacagggaaatcaaacattaagcgcagataatgttgagttgacccaaacagaaggtgaaacaccattaagaatggtcaccgcgacaggtaatgtctcttatgatgatccacaaatcatcttaaaaggcccacgtgcttggtctaatctaaataataaagatactgatatcgaagaaggtaaataccaaatggtgggccgacaaggccgtggctacgcgaataaaatgcaaatgcgtggcgaaaaccgctataccattatggataaagggatgtttacctcttgtctacccggcgacgatagttggagtgttgtcggctctgaggttatcttagatcgtgaagagcaagtagcagaaatttggaatgcacgttttcgtgttgctaacgtcccagtcttctatagtccttatctgcaattaccgattggcgataaacgtcgctctggtttcttaattcctaatggtaactattctcgtagttctgggtttgacttccaactgccttactattggaatattgcccctaattatgatgcgactattaccacgaattatattagtcgccgtggtttaaagctcgataatgaatttcgttatttaacaaaaccgggtcgcggtacgattgcggttgattggatcaaccacgacagtcaatacaataaagataaagcagacgaaaaagcgggttatctggcgcgtgattctgctacacgctggttattctattggggtcacagtggggtgatgaacaatgtgtggcgctttaatgttgactacacaaaagtcagtgataacaaatatttcaccgactttacttcgcaatatggtaataccactgatggttatgcgacgcaaaaattcagtactggttatgctcagcaaaattggaatgccacattaaccactaaacagttccaaattttctcagataataaagatgcaagggcttatcgtgctgagccgcagcttgatcttaattattataaaaatgatattggcccatttgattttcgtacttatgcacaatttgtccgctttaccagtgtcggagaaaacacccctgaagcgaaccgttatcatatagagccaaccatttccttacctgcctccactggctgggcaagctttaataatgagtttaaattgatggcgactcattatgatcaagatattcctgatgcttataagaagaagtatccacatcaaaaacttgatgatagcgtcaaccgcgtactaccacaatttaagtcagatatgaaagtggtatttgagcgccaatatgacactaacgatattacgcaaacgttagagccacgagtacaatatctgtatgtaccgtataaagatcagtctaatatcaataactttgactcagcgctattacaatccaactatagcggacttttccgtgacagaatgtacggtggtctagatcgcattgcttctgcaaaccaattaacggcgggtgttacttcacgtttttatgacagtgaactggttgaacgttttaatatttctgttggtcaaatctatttctttgagcgtcctaaaacaggttcatcgaatgaaattatcaatagcaaagatgaaaccggatctatggtatgggcaggcgatgcatattggcgcattactgatactttaggtatgcgtggtggtttacaatatgaccgtcgtttaggcagtgtctctatgggtgatgcgattatggagtatcgccgtgatagcgaccatctcttacaattgagctatcgttatgtagaccgtgattatattcaagcaacacgggttcgcccttatgatggcggggtcaatcaactaccagaataccaaaaaggcatttctcaaattggtgttgtcggcagttggcctttagcagaacgttggggactggtcggcgcttattactttgataccaaagattcagagccagtaagccaaatggttggcttacaatataacacctgttgctgggcggtaaacgttggttatgaacgtaaaattgttggctggaaagaagaccacagcgatattgacaacaaatggtcaatcaatttggaactcagaggcctaagtaacaatcatagtttaggtagtcaaaaaatgcttgagcgcggtatcttaccttatcaaagagcgttttga

SEQ ID NO: 315082 - DNA, 801 bp, Proteus mirabilis
atgcgctattggggaaaattattaggccttatcatcggtagttttgccgggatcggcttttggggcattgtgattggggtttttctaggacacctttatgacgtacaaagaagtaaattaagctatggtgggcgctataatcgtgatagacaagcctatttctttgctgccacattccaagtcttagggcatttaaccaaatccaaaggacgagtgacacaaaccgatatcacattagccagtacgttaatggatagaatgaatttacatggggcagcacgtcaagcagcacaacaggcgtttcgagaaggtaaagaggttgatttcccacttagagccaccttacaacgtgttcgccaaatttgtgctggtcgccgtgatttactgcagatgtttctggaaattcaattacaagccgcatttgctgatgggcagttacatcctaacgaacgtaagatgctgtttattattatagatgagctcggattttctcgtgcccgttttgaacatatattagccatgatgcaggcggggcaaagttttcattatcaacaagggcaaaattatcagccacaaactcaaggcccaacgctttctgacgcctataaagtgttaggtattaaagagggtgatgatgttaaaacaataaaaagagcttatcgaaaattaatgggagaacatcatcctgataaattggttgcaaaaggtttaccaccggagatgatggaaattgcaaaacaaaaagcacaagctatccaagttgcttacgatttgattaaaaaagaaaaaggatttcgttaa

SEQ ID NO: 315083 - DNA, 654 bp, Proteus mirabilis; identical to SEQ ID NO: 295776

SEQ ID NO: 315084 - DNA, 2904 bp, Proteus mirabilis
atgccttttactcttggtcaacgttggattagcgatacagaaagcgaacttggactaggtactgttgtggcaattgatgcccgtatggtgaccttactttttcctgcatgtggcgaaaatcgtctttattcccgccatgatgccccaataacgcgggtgatgtttaatgtgggggatactgtcaccagtcatgaaggctggaagctcgccatcgacaacgttgtggaagataatggcttacttatttatcacggcgtacgtttagataccgaagagccagcacaactgcgtgaagtattcttagataacaaactcacttttaataagccacaagatcgtctttttgctggtcaaatagaccgtatggatcgttttgctttacgctatcgtgcgcgtaaatttatgagcgaacagtttaagcaagcacaaagtggtctacgtggtattcgcgcaagtcttattcctcatcagctctatattgctaatgaagtgggtaaacgtcataacccacgtgttttattagcggatgaagttgggctgggtaaaactatcgaagcgggtatgataatccaccagcaaatcatggatggacgcgctgagcgtgttttaattatcgttcctgaaagcttacaacatcagtggttagttgagatgttacgtcgtttcaacctacgtttttcactgtttgatgatagccgttatagcgaatctttattagatagcgataatcctttcgaaacagagcagatgatcatttgctcattagactttgtgcgtaaaaacaaacaacgctttgaacaccttgttgaagcgacttgggatatgttagttgtcgatgaagcccaccatctggtatggagtgaaaaggcaccaagccgagaataccaagttatcgaaacgctggctgaagcgatcccttctgtattgttattaaccgcaacaccggagcaacttggtcaagagagccattttgcccgcttacgtttgctcgatcctaatcgtttccacgattacaacgaatttattaatgaacaacaaaaatatcgccccgtggccgatgcggtaaccattttgctttcagaagatgatttaaataacgaacagcaaaatagcatcagtgagatgatcagcgagcaagatatagagccgttgctaaaagcctctaatacccaaggtgaagagcgtacaaaatctcgccaagcacttattcatatgttgatggatagacacggtacgggtcgtctgttatttcgcaatactcgctccggcgtcaaaggcttccctaaccgactgttgcacgcaataaaaatgccactaccaactcagtatcaaaccgccattaaggtggctgagattatggcagcgaaaaagagcctcgaagtacgagcaaaagagatgctctaccctgaacgtatctaccaagagtttgaaggtgaaaatgccacatggtggaactttgatccacgcgttgaatggctactaggctttttaaccgccaatcgtcatgaaaaagtattagtcatttgtgctcaagccgccacagcattgcaattagaacaagttttacgtgaacgtgaaggtattcgtgctgcagtattccatgaagggatgtctttacttgaacgagatcgtgcagccgcttatttcgcctcagaagaggaaggcgcacaagtgttactatgttctgaaatcggttcagaagggcgtaacttccaatttgctaatcaactagtgatgtttgatctcccctttaatcctgatttattagaacaacgtattggtcgtcttgatcgtatcggtcaaaaccgcgacattgatatcagtgtgccttatcttgaaggaaccgctcaatctgttctattacgttggtatcacgaagggttagatgcatttgaacatacctgcccgacgggtcgtacaatttatgacaacgaatatgatgcgctagtcaattatcttgctcaacctaatgaactaggtgattttgataagtttatcgtttcttgtcgtaagcaacatgatgagatgaaactcaaactagagcaaggtcgtgaccgtctattagaaatgcactctaacggcggtgaagttggcgttgagttagcgaataagattgcagagcaagataacgatcccgatctggttaacttcgccttaaacttatttgatattgtgggcattaaccaagaagatcgtagtgatagcttaattgtattaacgccatcagatcatatgttagttcctgacttcccaggattaccacaagatggttgcacaattacctttgatagagagcacgcactctctcgtgaagatacgcaatttatcagttgggaacatcctattatccgtaatggtttagatttagtcttatctggtgatacaggtagttgtgcggtttctttattgaaaaacaaagcattacctgtaggtacgctattagttgaactgatttatgtcgtagaagcgcaagcccctaaacaccttcatttaactcgcttcttaccggcaactccagtacgcttattacttgatttaaaaggtaataatcttgcatcacaagttgaatttgaaagttttaaccgccaattaaatgcggtgaatcgccacacatccagcaaattggtcaatgcggtacaaaatgaagttcatcatgtactaaaagcatcagaatccttaatggaagcggaagcgaaaacgctaattgaacaagcgaagcaagaagcagacaacgcattaacacatgagttatcacgcttagaggcattacgtgccgttaacccaaatatacgtgatgacgaagttgaagcaattgaaaatgagcgtacgcatattcttaaccacttagatgaagcgacatggcgcttagatgcgatccgtttaattgttgttacccaccaataa

SEQ ID NO: 315085 - DNA, 2355 bp, Proteus mirabilis
atgacaattcacacagagcaaggctttattcttacccgccattggagtgataccccacaaggtatcgctgtctcctattggttggcgacagaaaatggaccgcgtaaagtcacggttgcaaagcagtatgctattggttttgttgcccaacaaaatgaaagtatattacgctcagtggttggtcataatcgcgatattgatattcgtcctctggcgttaaaagactttgaaagacaacctgttttgggggtttattgtaaacaataccgccaacttacccagcttgaacagcaattaaaacagtataatattcgcctatatgaagccgatatccgcccacatgaacgctatatgatggagcgttttatcaccgcgcctgtatggtttcgttatcaaaatagtcatactgtcacgctaaaacctgccagtgattatcgtcctacattacgtaccgtctctttagatattgaaaccagtgagtttggtgagctttattctattggattagccggttgcggtgataacgttgtttttatgcttagtgacaccctcccagaagttcaagaaagccaacaacctgaaggctatcgtctgtgctatgtaagtagtcgattacaactccttgaaaaactaaatgcttggatacaagagtacgatcctgatgcgattattggttggaatcttattcaatttgatttgcgtatcttgcatacccatgctcagcgttacgggatcaatttattattaggacgacaaaataccccattagagtggcgtgaacatggttttaaagcggggcacttttttgcctcagcacaagggcgtttaattattgatggtattgatgctttaaaaatggcgacatggaattttccctcttttagcctagagtcagttgctcaaacactgctaggggaagggaaagcgattgatacaccttatgccagaatggacgaaatcaatcgccgttttaaagaagataagcccgccttagcgtattataactggcaagattgtgtcttggttaatcgtatctttgataccacacacttaatggaattcttattagaaagagccagtgtaacaggactggcagcagatagaagtggtggctctgtcgcagcatttactcacctctatttaccctcaatgcatcgtcttggttatgttgcccccaatcagggtgaaaaacccgaagagcatagccctggtggttttgtcatggactcaacaccgggtctctatgactcagtggtggtactggactataaaagcctatatccctctattattcgtacctttttaatcgatccggtgggtatgattgaaggtatgcatcaccctgatagcacacatgccgttcccggttttcgtcaagcgtggttttcacgagaaaaacactgtttacccaccattgtttcacaaatctggcatgaacgagataatgctaaacgtcataacaacgccccgctctctcaagcattgaaaattattatgaatgctttttatggtgtattaggctcggtaggctgtcgtttttttgatcctcgattggcttcatcaattactttacgtggtcatgaaataatgaaaaagacccgtgaattaattgagtcaaaaggctatcaagtgatttatggtgatactgattctacttttgtttggcttaaagcagctcataacgaagtacaagcagagcagatcggtcgtcaattagcgcaagatgttaatcaatggtggaaaagctatctgactgaaacttaccagcttgatagccaattagagcttgagtacgaaacccattatcgccgattcttgatgcccactattcgaggcatggaaaccggaagtaaaaaacgttatgcagggctaagtcatgataaaatggtgtttaaaggattggaaatggtcagaacagactggacaccactggcgcaagcgtttcaaaaagagctttatacacgcatctttaatcagcaaccttatcaacagtttattcgtgattatgttgctgatacgctattaggaaaatatgatgataggctggtttatcgaaaaagattgcgacgaaaattatcagactaccagcaccatatcccccctcacgtcaaagcagctcgattagcggatgactataatcagttacaaaataggccgcaacaatatcagcaaggcggttggattagttatataattactcacttggggccagagccgttagagcatatcacttcgacacctgactatgagcactacattaataagcaattaatgccgatagcagatgctattttgccatttctacaagatgatttttctaccttgttaaatgggcaaatgacgctctctttttaa

SEQ ID NO: 315086 - DNA, 570 bp, Proteus mirabilis
atgacaaactatactgttttgcttgatgcctgtgtcatgtatccagcccctcttagaagttatttaatgtatcttgctaatactggtttatttagagcacgttggagtaatcagatccatgatgaatggatcactaatttattagtcaacaatccaacattaacagctgagcgactaatacgaaccagagatttaatgaatgcacatgttcctgattgtttagtagaaggctacgaaccgcttatttgtggtttaaagctacctgatcctaatgatcgtcatgtgctagcagcagcaataaaagggcaggctcaagctataattacatttaacttaaaagattttccgcaaaaataccttaattcttttgatatttcagctatccatcctgatgaatttttgagtgacatgtttgaattaaatcctagtagctgtattaaagcggcgcaacaacatagacaaagcctaaaggatccaccaatgaccgtagagacctttttaggctgtttacaaaagcagaaattaccccagtttatttcccatttacgggcattccagatattattataa

SEQ ID NO: 315087 - DNA, 453 bp, Proteus mirabilis; identical to SEQ ID NO: 296144

SEQ ID NO: 315088 - DNA, 702 bp, Proteus mirabilis
atgattaagttagagcagcttacttatacctatgagcaccaacatctgacctttaatttaacggtaaaagcgggggagcgtattgctattttaggtcccagtggtgcaggtaaaagctcattactcagcttaatagcgggttttctgccctcagagtcaggctcgttatttttaaaagggaaagatcataccaaaacagcccctgcccaacgccctatctcgatgttatttcaagataacaatctttttcctcatctcacggtaagacaaaatattggtttagggctagatccagggctaaagctcactgtggcacagaaagcactattagaaagtcgagccaaacaggtttctttaagtgattatctagagcgtttaccttcacagctatcaggaggtcaacgtcaacgagtggcaattgcccgttgtctggtacgtgaacagcctattttattgttagacgaacctttttccgcccttgatcccgcattacgtatcgaaatgctgacattattagaacaaatttgtgatgaaaaaaatctcactttactcatggtgtctcacagcttagaagatgctcataaaatcgcaccaagagcgcttgttattgataatggcaccattgtctatgatggaaatacagcgtcattaatcaaaggcgaagtggatcaatcactgctgttagggataccttttaattaa

SEQ ID NO: 315089 - DNA, 1581 bp, Proteus mirabilis; identical to SEQ ID NO: 311822

SEQ ID NO: 315090 - DNA, 1014 bp, Proteus mirabilis
gtgttaataaattctcttcgttcaactcttttattcagtgcactaggtttgttcagtgcttttgccgcaaatgcacaacaaaccaaacccacacttaccgtctatacctatgactcttttaccgcggattgggggcctggtccggcaattaaaaaagcatttgaacaacaatgtgattgtgagctaaaactggttgccctttcggatggggtttctctccttaatcgtttacgtatggaagggagtaaaagtaaggcagatattattttagggctagataacaatcttattcatgcggcaaaacagaccggactttttgcaccaagcaatattgatacatcaaaactggcattacctgaaaaatggactgatgacacttttgtgccttatgactacggttatttcgcttttatttacgataaaaatcgtattactcatccccctaaaagcatggatgagctgttaaatagccaacagccgtggaaaatcctttatcaagatccacgtaccagtacccccggcttaggcttaatgttatggatgcaatcactgtatccaaacaataccgctgagcagtggcaaaaattggcgaataaaacactgacagtaaccaaaggctggagtgagtcctatggcttattcttgaaaggagaaggggattttgtgcttagttacacctcatctccgggctaccatattttggctgataaaaaagacaattatgcggctgctatttttgatgaaggacactatttacaggtagaagttgcagccaagctaaaatccagcaaacagccagaattagctcagcaatttatgcaatttatgctaacccccgctttccaagaaaccatcccaaccactaattggatgtatcctgttattgatatgccactacctgaggtctactccgttatgcctaaaccgcaaaagtcattacaatttgatgctgatgtggtagccaaagagcgccaaacatggacacgtaattggcaatctgcggttagccgctaa

SEQ ID NO: 315091 - DNA, 531 bp, Proteus mirabilis; identical to SEQ ID NO: 311824

SEQ ID NO: 315092 - DNA, 2247 bp, Proteus mirabilis
atgctgacacgtttgcgggaaattgtagaaaaagtggctatggcagcgagtctgccagaagcacttgaactattagtgaaagaaacgtgtcaagctatgcacacggatgtgtgttctatttatcttgccgatattccccatcgctgtttctatttaatggccacaaaaggattgaaaaagccgaaagggcgtgccgtcagcctctcatttgatgagggggtggtgggtgaagtaggacgtctttctgagctgattaatctggctgatattcgtgaacaccctaattttacctatctgccacaagtaaaagaggatgatctgcgcgcttttctcggcgtgcccattgtctatcgtcgtcagttacttggggtgttggtggttcagcaaaaagagcgacgcttatttaatgaaagcgaagaatcttttatggtgacactagccacccaattaggggcgatattgtcgcaagtgcaaacgaaaggattatttggacaatatcgtcaaagccgtattaaagccctatccgtttctacgggggtagtgatggcatatggttggcaagagatgtctcagccaaccttagatcatgtttttaaagccagcgcactggatataaaaagtgaattaaaccgattaacggtcgccttagaagatgcaacatcagagtgtcgccgttttagtaagcgctttatggcgaattcacaaaaagagagtgcggctattttcgatctctattcgcatttacttaacgatccccaattaagacaaaaaatgactggggttatacaacaaggctatgttgctgagtgggcagtaaaagtggtgatagagaagttttctgcacagttctcaagtcttaaagatagttatatgcgagaacgagcttcagatttaaaagcattaggtcagcgcttactatttcatttagatgatgatctcagtacgacaaatacatggccagatcgctttattcttgtggcggatgagcttagtgccaatctattggctgagttgccagaacaacaactggcaggggtgatagttcgtgatggtgcgactcattcacactcagcgattttagtgcgagcaatggggatccctgccattatgggggcagatattcaaccggagctacttcacaaccgaatgctgattcttgatggttatcgtggtgagatttttattgaaccagaaccctttatcatgcaggaatatcggcaaattattgatgaagaaagagtattgagtcaacttgctgaagagcagcttgaacagcaagcggtattaaaaaatggtgaatccatcagtgtgcaattaaatgcagggctaagcattaaatatgaacaacgtattagcgttggtatagatggtgtcggtctttatcgcacagaaatcccttttatgttacaaagcggttttccttccgaagatgaacaaaaaaaccgttatcgtgaaatcttatcattttttcccaataaacccgtcgtactacgtgctttagatataggtgcagataaacagcttccttatatgccgataaatgaggagaacccttgtttagggtggcgggggatcagaatattacttgatcagccagaaatatttctgatccaactacgagcgatgttaaaagctaatcttgaatttaaaaatttgaaaatattgttgccgatggtgacaagtattgatgaaattgaagaagcgaaagcattgttactaagagcatgtgctgaagttagccgagaaatgaaatgcgaatgcattctaccacctgtggggatcatgcttgaagtcccctcattggtctttatgttaccgcaattagcacatcgagtagattttatctcgattggtaccaatgatttaacgcaatatttacttgcagtcgatcgtaataatacccatgtagcactgctctatgataatttgcatcctgcattactgcgttcgcttaatattattgctttagaatgccaacgttatcagttaccagtcagtgtttgtggtgaaatggcgggtacgccgatgggggcattgctactaatagggctaggttttcgtcagttaagcatgagtggccgtagtttacctagggtaaaatacttattgcgccatctagatcctgctatcttacagccttttatgcaacaggtgttgaaagctgaaacggcaatagagataaaaaaattgtctgctgattttatggaaagacaaggattaggtggattaattcgcggaggtatctga

SEQ ID NO: 315093 - DNA, 852 bp, Proteus mirabilis
atgaagcagtatctggcattgtgtcaacgcattatcgatgaaggtgaatggattgataataaacggacaggaacccgttgtttaacggtgataaatgccgatctggaatatgatgttgccaataaccaatttccactcataacaacgcgtaaaagtttttacaaagccgcgattgcggaactattagggtacttacgtggttatgataatgcagcacaatttcgtgctattggctgtaatacgtggaacgcgaatgctaatgaaaatagcgcatggttaaataatccgcatcgtaagggtgaagatgatatgggccgagtctatggtgttcaaggacgccaatggcaacgccctgatggctcgcactttgatcaattacgtaaagtggtagataacttaactaacggtattgacgatcgtggtgagatagtcactttttataatcccggagaaacagcgttagggtgtttacgtccatgcatgcatacacatactttttcattgctcggtgacaggctttatttaacctcatatcaacgtagctgtgatgtcccattagggttgaattttaatcaaattcaatgctttgtattattagcgctggtggctcaaatcacagggcataaaccaggtaaagcattccataagatagttaatgctcacatttatgagaaccaattacctctgatgcgtgatgttcaactaaaaagagagccattgccattacctaaactacatattaatccaaacattaagacattagatgatatagaaacttgggtcacgacagatgactttagtgttgaaggttatcagtgtcacgaggcgataaaatacccgtttacggtgtag

SEQ ID NO: 315094 - DNA, 534 bp, Proteus mirabilis
atggagttaataagagcaattaatgtttttaacaaattcagtaagcaaggtagaaatatcttcctcaccaaagatttaaaaatgctttttcctgatgagtctccgaaaacattacaaaaatcagttgaccggctgatcgcgcatgatgtgctacgccgagcatcaaaaggtgtatatatctatactcaaggttcattggggccttaccctttagaatgtctggccgaaaatattcgacgaggccactacaactacattagtttggaatccgctctatctcagtacggtgtaatttcacagatccccatcgacagacttacgattatgtccacaggccggtctggagagtttgtaacgccttggggcgttattgaggttacccatactgccaagaagcctcttgaaatactcaatactacggtggaaggaagggggccattaagaattgcaacaaaggagactgccattaaggatctaatgaaggttggcaggaatacacacctcatccaacgtgaggaattaaactatgtctga

SEQ ID NO: 315095 - DNA, 930 bp, Proteus mirabilis
atgtctgattttgtcaattttaatgagctggttgacagcattgtcatcgaaaaggattacggcgcgaacaggcctgtcgtggaaaaagaattgctacattatgacattctttatgctctttccgccacagggcttttaaagcacatcacatttcagggcggtacatcgcttaggctttgctatggatcaaacagatttagtgaagatctggactttgctggtggtcgtgacttctgttcagcgcaactgcttgagattaaagcgtgtattgagaaatatgttggtgaacgatatggcttggaggttgtggttaaagagccaaaagagctaagaaaagaacctgattatgcagatgtaaaagtcgataagtggcaaatatcagtgactaccaatccaggaaaaaaagacctaccaaagcagaagatcaaagtggaaatagccaacattcctgcatacaccaacacccttcgaacgcttgttaaaaactatgagcagcttcctagtggctattctgacctgattattagagtggaagagctcacggaggtcatggctgataaattggtttcattcccagcaacaacctcacgtattcggtatagagatatgtgggatttggtgtggttgcaccagaaaggggttaaaccagacgctgaactggtaatgaaaaaggttgccgattataagctcaatgagcattttgaggaatggttgcaagcaagaattgagtctttgcctgcattggttgcgagtgaaaagtttaagggagagatgaagcgattcttacctgtgtctgtcgtagatagaactctccttcacccagattttcttgaatttttacaaattactcttcatgaactgctagtcactatccaaacagatatttatggaagtaaagatccgaagccagtaaaaaaatttgaaatgtag

SEQ ID NO: 315096 - DNA, 480 bp, Proteus mirabilis
atgacaggcaatcattattcccactctaaacatttagggagtagcttattcgaggtgcttattgttatggctatagtagcaatattgagcgctttatccttgagctcatatcatcagttgttacgccaacgccagttagttcaaagtgtaagagaagtgatggcgtttttagcttatcaacaacaacgctcactgctctttaattgcaaagtgcaaattgtattgtggctatcacctattaataaattagaggcaaaatcgttaacaacacccacaaccaaagaaagtattcaattagggttaaacaatcagcttattcgctctacagcaacacgctttacattttgtggcttacgccaaacgttacgaccgatgcattttgtgctgtcaaatggtgatgaagaagtcaaaattattatctcttcattagggcgtattcgagcgtgcagtcagacaataaaggcattttcagtatgctaa

SEQ ID NO: 315097 - DNA, 285 bp, Proteus mirabilis; identical to SEQ ID NO: 294760

SEQ ID NO: 315098 - DNA, 3378 bp, Proteus mirabilis
atgttccatatttaccattcaaatcaattatcactacttaaatcactgatggtacattttatgcaaaatcggccactatcatcgccttttgagcaagaagtgattttagtgcaaagtcccggaatgtcgcagtggttacaaatccaattagcagaaagtttgggtattgctgctaatatccgttatccattacccgctacttttatttgggaaatgtttactcgggtattatcaggtatacctaaagaaagtgcgttttctaaagatgccatgacatggaaactaatggcattattgcctaattaccttgatgatccggcatttaaacccttgctacattatcttaaagatgatgaagacaaacgtaaattacatcaactagcggggcgtgtggcggatctctttgaccaatatctggtttatcgtcccgattggttgtcggcatgggaaaatgatcaactaattgatggcttgagtgacaatcaatactggcaaaaaacactgtggttggcactgcaacgctatacagaagatcttgcgcaacctaaatggcatcgtgctaatctttatcaacaatttatttctactttgaatgatgcgcctatgggggcgcttgcgcactgttttccatcgcgtatttttatttgtggtatttcagcattgccacaagtctatttgcaagcactgcaagcaatcggcagacataccgaaatctatttattgtttactaatccttgccgctattactggggagatattcaagatccaaaattcctcgctcgtctaaatagtagaaagcctcgacattatcagcaacttcatgaactaccttggtttaaagatgaacaaaatgcatcgacactatttaatgaagaaggggagcaaaatgtcggcaatccactattagcgtcttggggaaagttaggtaaagataatctctattttctttctgagcttgaatatagcgatgtgttagatgcttttgttgatataccaagagataatttattacatcaacttcaggccgatatactcgatttagaggatttttcacaaataggtcagacgcttgaggattaccaaagtagtgaaaaaaaacggatcatcgccaatgatgatcgctctttgacctttcatgctagccatagcccacaacgggaagtcgaggtattacaagaccaattactgcatctcctcgagcaagatgctgatttattaccgcgagatattattgttatggtggcggatattgatagctatacgccctatattcaagccgtatttggtaatgcgcccgcagagcgttatattccttttgccatttcagaccgaaaagctcgccaagtacatcctgtcttacaagcttttatcactttattagaattacctcaaagccgttttaccgcagagcaagtgcttgcattacttgaagtacccgccttagctgcacattttgccatttttgaaaatgagttgaagctactacggcgctgggttgaagagtcaggtatacgttggggattagatgatgaaaatgtggcctcctttttattacctgtgacaggaaaaaatacgtgggagtttgggttattaaggatgcttcttggttatgcgatggacagtgaggcagggccgtggcaaggggtattgccttacgatgaatcaagtggcctagtcgctgagttagcagggcatctagcagattttttatataccttaagtgaatggcgcacacgattaagcgaaactcgcaacttagaagagtggcttgatatcggtcaacagcttgttgatgctttttttgacacagatgaagagacagagctggtattggcgcttatcacacaacagtggcaaaaggtgataaaaaatggtctagaggcgcactatcaacatgaaattccattagtgctgatccgcgatgaacttacagtgcgttttgatgatgagaaaattagccaacgctttttagccggaagccttaatttttgtaccttaatgccaatgcgttcaattccatttaaagcagtctgtttattgggaatgaatgatggggtctacccacgtaatattcagccattaggatttgatttaatggcagaaaaacgtcgtcgaggtgatagaaaacgtcgtgatgatgatcgctacctgtttttagaagcattaagctcagcagaaaaatacctttatatcagttatattggtaaatctattcgtgacgatcgtgaatgtaatccttcggtattgattaaagagttacaagattatattgggcaaaatttccgtttaagggaagatgcatcattaaatgttgatgacagtgcgcagcgtatcatcagccacttattaacccaacatagtcgagtgccttttgcgccagaaaactttaaaacggatgccctatatcgctcttatgccgctgaatggttaccggcagcaagtgggaaaggaactgctcaccaagcattttcaacgccattaaataaaaaaattgagaaagtctctttagatgaactatcacgcttttatcgccatcccgtacgtgcttttttccagcaaagtctaaaaacgaattttgttattgaagagaccgagctaccggaagaagagccttttgtcattaatgcattacaacgttatctattaaaccaatggttattaaaagccttaatcgaagggacatcaacagaagcactttatgaacgcattaaagctgctggaaaattaccagctagtgcgtttggtcaaatttattgggagcaacaaatagaaacgttgcaacctttagccgaaaaagtcagaagtgaacgtttagcaacccattctgtcacaatagaataccaatttaatacgatcccattaattggtcgtttaaatgaagtacaagccgatgggttactccgttggcgacccgccacattaacagctaatgatctactgcaattatggatagaacatctcgtgtactgcttaagtggtggaactggcgaaagccgtttttatggtagaaaagagtcgcaatggtgtctatcaccggtgtctgcggatattgcgtattcaacccttgaaagattgatccaagattatcaaacagggatgaatacacctttagccttattcgccaacagtggttgggcttggttacaagcttgcttcgataaaaaaacacagacgtttttatttgatgatgaagagatacaaaacaaggcagaattggtattaacgcaatatttaaccgatagctataaccgagaaggtgaaatgaatgatatctatattcaacgtgtatttcatcagcttgatgcaccttttcttgaggcagtaaaacagaccacgttagccatatttaagccaatcattccatttataaaaaaataa

SEQ ID NO: 315099 - DNA, 3639 bp, Proteus mirabilis
gtgagtgaagtgatacaggcacaggtattagatccctatacacttcctttgtatcaaagacgcctcattgaggcgtctgcgggaacagggaaaacatacactatagggttattgtatttacgattactgcttggattagggggcgagtcagcatttcatcgccccttaagtgttgaagagatcttagtcgttacttttaccgaagcggcaacggatgaattacgcgcccgtattcgtcaaaatattcatcagttaaggctagcctgtatccgtcatcaagtagaaaatgacaataacgcttaccaaatattattagatcaaatcccgaataaaatggtggcggcgcaatggctactagaagctgagcgtcaaatggatgaagccgccatttatactattcatggtttttgtcagcgcatgttagccactaacgcctttgaatctggtgtattgtttgaacaggtgttgatccaagatgaatatgagttaaaaaaacgtgtctgcgctgatttttggcgcaggcactgttatcccctttcttatgatgttgcctatgcggtaagcgaaatttggtctggccctgagcaactgctgtatgaaattcaaccctatttacaaggtgaatgccccgaaattcaaggtattgatttcgacgctaaaaaagagactgttgaacagcgtcatcaagcagtcattgaggccattgataaagttaaagcactatggcgtcatcattgcaatgaaattgcagattggataacttcatctggtgttgataaacgcagttacagtagtcgtttcttacctaaatggatcgatgaaatcaccgcatgggccactccactcgaaaccaaaagttatcagttacctgactgtttaagtcgtttttcgcaagcaaccctacatgaaaaaactacaaagggtgctgcgcctgagcacgctttatttgcggaaatcgaactactttgccaacaaagtttaacgttacgtgatgtgatcattgccaatgccattcctgaaatacgccaagggatagaaaatgaaaaaatgcgtcgtggtgagttgggatttgatgatctgttaacgcgtctcgataaggcattgcaacgagaaggcggcgaagcattagcagatgctattcgccaacgttatcccgtcgcgatgattgacgaatttcaggataccgatcctcagcagtatcgtatttttgatactatctatggtgagcatacagagagtggtttgctatttattggtgatcccaaacaagccatttacgcatttcgtggtgcagatatctttacctatattcgggcacggcaacaaaccgatcaccactatacattgaatactaactggcgctcggctccgggtatggtaagtgcagttaataaactgtttttacgttctaaaaccccttttttgtttgatcatattccttttattgaggtcaattcggctgaaaaaaatcagcatatgaagtttatttaccagcaaaaaacggttgccccattaaacttttggttagctgaaggtgaaagcctttcaactggtaattatgaacaattaatggcctcgcaatgtgcgatgcaaattcgtgactggttatcagccagtgacaatcaacaagcttggttaatcgaacaagataataaaagcgctgttacatctgccgatattgtggtgctagtgcgtagtcgccgagaagcattattgatccgagatgcattagatctgttatctatccaatcagtatttttatccaatagagaaagtgtgtttgaaaccaatgaagccaaagatctactttggttactacaagcagtggtaacccctgaaaaagaacgggtgttaagagcgtctcttgccagtgcactgtttggatttaacgcacaacaaattgacgaacttaatcaagatgaacaacgttggaaccgctatgtggagcaattcgctgattattttgtcttgtggcaaaaacgtggtgtgttacctatgctacgtaaagtcatgatagaaaaccaaatcgctgagaacttactcgcaagccaagcaggagaacgacgtttaaccgatatcatgcatattggtgagttgctacaagaaacatcattacagcttgatagcgaacacgcccttattcgttggttagcccagcaaatttctcgaccagatgcacaagcggaaagtcagcaaatgcgtttggaaagtgataaaaatctggtgcaaatttgtaccattcacaaatctaaaggattggaatatcccattgtttgtctaccttttgcctgtaattatcaagaacaaaagggcgcgctttatcatgatagagatgaattttacgcaaaactagatatttttaatcaacctgatagcgtgcgtcttgctgatgaagagcgattggcagaggatttacgcttgttgtatgtggcattaactcgggcgaaattttgttgttatgttggtgttgcgcctttggttaaaggaaataaacgtaagtcaggattaactgatttgcataaaaatgcgctgggatatctgttgcagcatggggaagagggtaatagtgagctattacatcaatccattaatcaattgcttgatgacaatataaaagtgatcacgttaggtgatacctcaacgcatcgatatcaatctccacacacaacggatattgctttagatgccgccatatttaagcgaaaaattaatgataattggcgtatcaccagttattcgggattaacggcacaacactctgctcgtggatatctatttgatagtgctgatttggatgccttggtgcaatctatcgctccgggcttagataccgatgctaaaggtgagaaaacggcgcaacacagcgatgaactctctattcatcacttccctcgtggtgcagtcgcggggacatttttacatagtttgcttgaagagcttgatttttcacagcctattgatgaaagttggatgcaagagcaacttattgcccaaggttttgaggaaaaatggacgccattgttggtggcttggatggaaaccctttttcacaccccattaaatgcgcaaggcttatgtttagctgatattcctaaggagcatcaactcgatgagctacaattctatctgcctattgaaaaggagatgtcggcggcacagttaacagcattaacccgtcaatacgatcctttatctgcgcaatgtccagccctcaattttcagcaagtgcaaggcatgctaaaaggttttattgacttagtattttgttgggagggtaagtattatgtggttgactataaatctaactggcttggtgaatcgagtgaggattacacgcaagaggcgatgagcaatgcaatgcgcgatcatcgttatgatttacagtatcaactctatactttagcgctacatcgatttttacaacaacgcttacctgattatgattatcaacgtcattttggtgggatctgctatctcttcttacgtggtattgatgctgactacccgggcaatggcgtctatacctatctacctgaagaaaagtttgtagaagcattagatgcgctatttaaaggggaagcgcttgaggttaacggcagtaaagtgaacgcgctgggtgagaacaattcaaatgattaa

SEQ ID NO: 315100 - DNA, 1917 bp, Proteus mirabilis
atgattaaattattagaacaagcaattgcacaaaacctattgcgcccattagatttacgttttgctcaaatgctggtggcagatgaaaatcctatcctactgtttatttttgcctatctcagtgctcaaacaggggcgggccatgtttgcttaccgttaaatatcatacaacaagataaattgtttgatggacgacacaccgagctttcacaagccatttggcagaaaatggcgcaaccatcagcgaaagaaatactggcagagcttaatcagagcgagtgtgttaatcaaggccatagtgacttaccttcacctattattctcgataacggattactttatctacaaagaatgtggcgttatgaagagcaaattgcgcaattttttcgccaagagcaacgagtggttgatatcgatgaaaatcaattaacaaacgtattaaatcaacttttcccaagcgttaaaacccatgctgaaactaactggcaaaaagtcgccgcagcggttgctattacaagccctatttcgattatttcgggtggcccaggaacagggaaaaccacgacagtagcaaagattttagctgcttttgttatgctaacggcgaatgaaaaacccattattcaactagccgcacccacgggaaaagcggcagctagattgaccgaatcattaggtaaagcattagcgcaattggcactaagtgaagaagagttaaaatggatgcccgatcaagcgcaaaccattcatcgcttattaggtgcccaaccggaaagtcagcaagttcgttatcatcgcgataatccgctacaacttgatatcttggttatagatgaagcttctatggtggatttaccgatgatggcgcgtttaattgaggccttaccggaacattgccatgttatttttctgggagataaagatcagctcgcttcggtagaggcaggagccgttttaggggatatttgtcgttttgcggatcaggggtttagccaacgccgttttgagcagattgatcgcttaacacaaggtgaattacagaaagatcccgcttctatgacgacttctactaagccagtttcggtggtcagtgattcactatgtttattgcgtaaaagttatcgttttggctcacattcaggtattggtcaattagcttttgcggttaatcaaggacaagtgaggagtgctatgacgttactgaaaaaagcgacagtaacacaagagagcactgagcgagaaaaacataccgatccgcaggacatcgaatttatctcattagacaccgatgagagctatatgaagatgcttcaagatgttgctaaggcttatcatcactatctatcgttagtcgcgcaaaaagcagcaccagagactatccttcatagctttaatcaatatcgtttattgtgcgccttgcgagaagggccttttggtgtcacaggactaaatgaacgtattgagatgctgttacatcgccaacgcttgatacgacgacctataaatagttatcagcgggagtatattggacgaccaattatgatccagcgtaatgacagcacattggggctatttaatggtgatatcggcattatgcttaatagcgatgaaggagaaatgaaagctttctttcagttgcctgatggcacattgaaagctatccaacctagtcgtttaccgcaacatgagactgcttatgtgatgacagtgcataaatcacaaggttcggaatttacccatacggcattggtattgccgacacaattttctcctattgttagccgagaattactctatacggcgataacgcgagccaagcagaagctatcactttattcttctgaatatatggtgaaaatggcgatccagacacgtattcaacgccgcagtggattagttgaaaaactgcgttactga

SEQ ID NO: 315101 - DNA, 1335 bp, Proteus mirabilis
atgaaagagcgtagcaccgaattggtcgatggttttcgacactcggttccgtatatcaatgcacatagaggtaaaacatttgtcattatgctagggggagaagcaatagcccatgagaactttccctcgatcattaacgatattggtttattgcatagtttaggaatacggttagtggtggtttacggcgctagaccacaaatcgacatggctcttgaagagcaaaaaatttctccgctctatcataaacacacacgaattactgatagtaaaacccttgaagtagttaaacaatctgccggtaccttacaactcgatattactgctcgtttatcaatgagtttaagtaatacgcccttgcaaggagcgcatattaatgtggttagcggtaattttgtcattgcccaacctttaggtgtcgatgatggggtcgattattgccatagcggtaaaattcgccgtattgatgaagaggccattcatcgtcagttagataacaatgccattgtgttaattggccctgttgccgtctctgttacaggggaaagttttaatttaacctctgaagaggtcgcaacccagctagctatcaaacttaaagcacaaaagcttattggcttttgctcttcgcaaggggttgtagatgcaagtggccagattgtgtctgaactcttacctaatcaagcagaagaacgaattcaagcattacaaactacaggcgattatcactcaggtactgtacgttttttacgaggtgcggtaacagcctgccgtcgtggtgttgagcgtagccatttattaagctatcaagcggatggtgccattgttcaagagttattttctcgtgacggtattggtacgcagattgtgatggaaagtgccgagaaagtccgccgcgccaatattaatgatattggtggcatattagagcttattcgtccattagagcaacaaggcattttagtacgtcgctcaagagagcaacttgagatggaaattgatcaattcactattattgagcgcgataatctcaccattgcttgtgccgctctctatccttatcagtctgaaaaaataggtgaaatggcctgtgtcgccgttcatcctgattatcgtagctcttgtcgaggtgaagtgttgttacaacgcatatcaacccaagctaaacagatggggttagataaattatttgtgctcacgactcgtagtattcattggttccaagaaaaaggctttacgcctgctgaaatcgataaattacctattgaaaaacaggctctgtataattatcagcgccgctctaagatcttaattttagatctacataaagagtag

SEQ ID NO: 315102 - DNA, 1263 bp, Proteus mirabilis
atgagtcattcagaacataatcaaacacgtcgtcgtcttattaaaggaattggcgcgttattgttattaagtgttagtcctgttggcttagcggcaacatcatcagtggttgccgtcagggtatggcctgcatcgacttatacacgtgtgactatcgaatcaagtagacccttgaaatatcgccagtttgcgttatcagcaccagatagaattgtggttgatcttgaaggtatccaactgaatagcgttctgaaaggtatggctagtcaagtgcaaacaaacgatccttacttaaaacttattcgtgtcggtcaaaataccccaactacggttcgtttagtgtttgaaattaaaacccccgttcagccacaaatgtttactttaaaacccgttgctgaatttaaaaatcgcttagtgctcgatttctatccaagtcatgcggcgacaagtgaagatgatccgctattagcgctattgcgtgaatataacgaaggggatttacaacaagctgtgcctgaacaaacagatacgcgtaagcccggaagagcaggacgagataggccgattattatcatgattgaccccggccatggtggtgaagatccgggagcgatggggaaatataaaactcgtgagaaagatgttgtactacaaattgcccgtcgcttaagagcattgattgataaagatgccaaaatgaaagcgtatatgacgcgtaatgaggatgtgtttatccccttaaaagtgcgagtagcgaaagcgcggaaaatgcaggctgatctctttgtctctattcatgcagatgcatttaccaatcgctcggctagaggctcttcggttttcgcgctatccaaaacaggcgcaacaagtaataccgcacgttacctagctcaaacccaaaatgaagcggatttaattggtggggtgagtcgaagtggtgatcgctatgttgatcacgcaatgcttgatttagtacagaccgcgacaattaatgacagcctaaaatttggtagtgaggtattaaaattattaggtggcgtgaataagctacataaaaataaggtcgatcaagccggatttgcggttttaaaagcccctgagatcccttctattttagtagagacggcttttattagtaatattgaagaagagcgaaagctcaaaacggctaaattccagcaacaagttgctgaatctattttcaaaggtattaaagcctattttgctaatggtggtgaactgacattagctgatcgaggctga

SEQ ID NO: 315103 - DNA, 1095 bp, Proteus mirabilis
atggttacttggcgaaaatcgttgcttttggggatattagcgcttgccttaacaggctgccatcgtccaacagatcaggggcaacagtataaagatggtaagcttaaacaagatcttattgaagttaactcgccaaatacgcaaggcaagcccattaatggctcagattaccttgaacaaattaaccaaataaatcaaacatcttcacgtctatacaatagtaatcaagatacttatcaagcagtggaaaattggttacgctcaggggcagatacgcgtcaattacgtcaatttaatatcgcagcctttcaaatggaaggggaagataattatgggaatgtaaaatttaccggatattatacccctgttttagaagcacgtttaacgccacaaggtgattttaaatatccgctctaccgcatgccagccaaagtgcgtggtaaattgccttcacgagcggctatctataacggtgctttaagccccactttaattgccgcttatagtaactccatcatggataactttatgatggaagtgcaaggcagtggctatgtcgattatggtgatggtaaacctttaaccttctttggttatgctgggaaaaatggtcatccctaccgcagtattggtaaagtgctgattgataatggtgaagttgaaaaagaagcgatgtcaatgttggcaattagagagtgggctgataagcatagtgaacaagaagtcagaaaattattagaacagaacccttctttcgttttctttaaacctgaaccttttacgccagtaagaggggcaagtgctattccgctgattgctaaagcgtcagtggcttctgatagaagtattatccccgcaggaaccgtattattagcggaaatccctattttagataataccggtaagtttactggacaataccaaatgcgtttaatggttgctttggatgtggggggagccattaaaggacatcatttcgatatttatcatggtattggtaaagaagccggacaaatggcgggtttttataatcattatggacgtgtatgggtattaaaaaaatcgcaacccaccttactgaaccccatacagtaa

SEQ ID NO: 315104 - DNA, 849 bp, Proteus mirabilis
atgcaaaattcattatcagactcctatctgcaacgcttttctggtattggccgtctttatggacaacaagcgctgtattatttttctcaggcacatatttgtgttgtcggcattggtggcgttggtagctgggctgcagaagccttagctcgcagtgggatcggcgctattacgttaattgatatggatgatgtgtgtgtcaccaataccaatcgacaaattcatgcgctaaaagagcatgtcggccagcctaaatgtgaagtgatgaagcagcgaattttgcaaattaatcctgaatgcaaagttacttgtgttgatgattttgttacggttgataatgtggcagaaatgatgcaaaactcatttgattatgtgattgatgctattgatagtgttagaccaaaggccgcattattagcttactgtcgtcgttataaaattcctgttatcaccacaggtggcgcaggcggacagattgatccaactcaaatccaagtcgtcgatttagcgaaaaccattcaagatccattagccgctaaattacgtgagcgtttaaaatctgattttaatgttgtgaaaaatagcaaaggtaaattaggcatagattgtgttttttcaaccgagcaattagtctaccctcaaggagatggtacggtgtgtgcggccaaaagtactgccgatggtgtcaagcgtatggactgctcagcgggttttggcgcggtgacaatggtaaccgcttcctttggttttattgccgtttctcatgtattaaagaagatgttagctaaggcgcaacgtactcgtcatacttcaagttgtagcgttgttgaccgcattcattcgcactag

SEQ ID NO: 315105 - DNA, 678 bp, Proteus mirabilis; identical to SEQ ID NO: 294632

SEQ ID NO: 315106 - DNA, 786 bp, Proteus mirabilis
atgataaaagcggtagatttaaatagtgatttaggtgaaagctttggtcaatggcgtatgggcaatgatgctgcagtgcttgaaattgtcagcagtgccaatattgcttgtggttttcatgccggttcaccagaaggcattttaaaaacattaaaagcagcgaaacagcatcaagtcgcgataggtgctcatgttgcttatcctgacttagtgggttttgggcgacgcaatatggatattgccagtgatgaattaaccgctgatgtcatttatcaaattggcgctttgcaaggtttagcaaaagctgtcggtatgaaggtgacttatgttaaacctcatggtgcgctttataacaccattgctcatgataaacgccaagcattagcggttattgaagctattttagctattgatccacaacttatattagtggctttagcgggatcgccgctgatcacacttgcgaaagagaaaggattacatgttgttgccgaagcttttgctgatagagcttatcatgctgatggcacacttgtttcgcgcaaacaagagggggctgtattacacgatcctcaattggtggctcagcgtatgttaaagctagtacaaaaagggggcgttgaatcgatagagggtacttttactgctatacaggcggattctatttgtgttcatggtgatagtcctgatgcggttaatctcgcaaaaagtgtcaaagagatcttaataacacacggtattgcgataaaacctttcacatctgcaataggaataaaggaggcgtaa

SEQ ID NO: 315107 - DNA, 660 bp, Proteus mirabilis
atgcagaaaaaaacatcgccacagatcctttgccaaaaaatcgctgatattattcgccaaaaaattactatcggcgaattacctccaggagagaggctttcagaagctactttaagcgagcagcttgaaatatctcgtaatacattaagagaagtatttcgtatattaacccaagaaggcctattaacctataaacctaatcgtggtgtgtttgtttctgtaccagatatggcatcaattatggatatttatcgcgtaagaaggctgattgaatgtgatgctttacgacatgcctatccaatgcatccagccatttcccgcatgcaagataacgttaatcaagcaaaaatgtttcaacaacaaaaagattggaatagcgttggaacctgtaatatgcatttccataccgctatcgtcgagctttctgatagccctaggttatttaaacaatatcaacttattttagcagaattacgattagcctttggtttactcaatgatcctcaattattacatgctccttatattgagaagaatgagcatattttaacgctattgatgaatgggaaagcgcaagaagcggcaatcgaaatggaaagttatttagaaatatccgagcgaaccgtattagccgctttttctcgccacaacatctgttaa

SEQ ID NO: 315108 - DNA, 282 bp, Proteus mirabilis
atgaataaatcaaggcagcaatttgaatgttggtactttaataatcaccgtcatgaacaaaaatacccactacacaaagatgagagtggggaatatttctatgatggagcaaggagagcatgggaggcttggcaagcatcacgcgagagtttagagattgaattgccagagcctaaccctgaagattcagggagtcctaacttttacgacgggtacaacactgcaataagcgatattcatgacgaattaatcagcaatggagtgaaaataaaaaatgaataa

SEQ ID NO: 315109 - DNA, 177 bp, Proteus mirabilis
atgaacgcaaagcagaaacacgcaaagcaacaaatattcaccctacttcgcgagtctgaaatgactgagcaacaagtcgaattattgtttgatgattggaaatttaaacagcaatgcgaaaagacaaatcgaattttacgtcaggttaatacgcgtggagagtatgcgttcacgtaa

SEQ ID NO: 315110 - DNA, 183 bp, Proteus mirabilis
atgaatattgataaatacaaactttgtttagctcaatcgcaagccgggattgcacgctttctcaaggatgagaatggatggcgcaaagcaaacgaaacattaaaaacagcatatggagtacaacatgaacgcaaagcagaaacacgcaaagcaacaaatattcaccctacttcgcgagtctga

SEQ ID NO: 315111 - DNA, 324 bp, Proteus mirabilis
gtgagtgaattaaaaaaatggtttaacccattttactggttccgttcagcaatagataagtttgaatctcatttatggaaaagtgtaaatagaagaattgctgaaaccacctattgtaatgatgatcaattaaaaccttgccaccattgcgaatctgaaaaactggaggttatgcaggtattcagcaattcatttgttcagtgtaatcactgtggtgcaagaggtcctattgctgaaaatatggatattgcagttgagtattggaatgcgcgaggtaactatggagaacttctgtctacacgaatcaacgaaaaaactatttga

SEQ ID NO: 315112 - DNA, 297 bp, Proteus mirabilis
atgattgagctacaaaaacaatttcaacccaaagcgagaaatatatgctcggcttgcggtaaagacgttggggtatcaaagctagttgtggcaggcaatatcaatatctgctttgaatgttcagatttagcgaaggaacttgctgataaagagcgtaatgaaatggctgaaaaggaaattaatcaaatttctaacaccttatccactactcgtgacggtaattttgatgtagatatggctcaagctctagtttacgcaaatcgtttatataaagctggatatagaaaggtggagtga

SEQ ID NO: 315113 - DNA, 294 bp, Proteus mirabilis
atggcaatagttcaatattacgttgatgcagagcctgtgaacatggaaacagagttatacgaaataactgatgatgaaaagtacattctagataatgggcgtcgtgacaaagacttgctagacaatttggagtggtgtgcgagtgattgcgctgaagactattactatcatcatgatggttgggagtcttcatggccagtgtgcctcatcatttggattgatggatcttgtaagggaaaattcagcgttgatcgtgaatttgaaccggcattctcggcaagtgaggtggaatga

SEQ ID NO: 315114 - DNA, 213 bp, Proteus mirabilis
atgcagggaattaattgggttaaggtgagtgagagattgcctaacgatgaaactactgtgctggttttttctaaaggttatatctggattgctgatgttgatcatgatggacagttttatcctgacgagtggagttatggcagagatattattgctgatgaaataacgcactggatgcctttgccactcccaccaatgccagagggtaaataa

SEQ ID NO: 315115 - DNA, 606 bp, Proteus mirabilis
atgagttggagtgaagttatttctatcgttggtagtttaggttcggctggggctattgttgccagcattcttgtatataaaaaacaaagggaaaatgaaaataatgcttataaaaagcaaaaagaaagagaaataagagctttaaagttgatattaaaaaaagaatgcgaattaaattattcttctttagaaaaactaaaagaaataatattaaatttacatagcgaaaaagtggaattaaccttaagaaaaggtaactttggatacaattatacttttgattttggcggagtcaaaatgagcggtcgcattcctattttttatattaatgttatgacctcaagtttattgactgctgctagactagatgatgagttcttttcaaagattgaggtggcgttagatgtagtatcagagctaaatcatattacgaataacatcatagattacactttaaataaagatgaaaagacaaaaatagtattaagaaaattagctagttatacaagtaatagaatggagtttttttataataatttaaacgaattatacatttattgttctggtgatagtttgacaacacaaacaaaagtgctatttaaataa

SEQ ID NO: 315116 - DNA, 3228 bp, Proteus mirabilis
atggctaaaagaacagatattaaaacaatcctgattttaggtgcaggcccgattgtgattggtcaagcgtgtgaatttgactattcaggcgcacaagcgtgtaaggcactgcgcgaagagggatatcgtgttgttttggtaaattcaaatcctgctaccattatgacagatcctgaaatggcagatgccacttatattgagcctattcattggcaagtggtcagaaaaattattgagaaagagcgccctgatgccatattaccgacaatgggcggacaaacggcattaaactgtgccttagaattagagcgtcaaggggtgttagctgaatttggcgtaacaatgataggtgcaacggctgatgctattgataaagcggaagatagacaacgctttgataaagcgatgaaaaaaattggtctggatacggctcgttcaggcatcgctcatactatggacgaagcatttgcagtggctgagcaagtgggtttcccttgtattattcgcccttcatttactatggggggaacagggggggggatcgcctataatcgtgaagaatttgaagaaatttgtactcgaggtttagatttatcaccgaccaatgaactattaattgatgaatcattaattggctggaaagagtatgaaatggaagtggtgcgcgataaaaatgataactgtattatcgtttgctccattgaaaactttgatgcgatgggtattcatactggtgactctatcacggttgctccagcgcaaacgctaacagacaaagaatatcaaattatgcgtaatgcctcgatggccgtattacgcgagattggggttgaaaccggtggctccaatgtgcaatttgccgttgatcctaaaacagggcgtttaattgttattgaaatgaacccccgtgtttctcgctcatcagcattagcgtcaaaagcaacaggtttcccaattgcaaaagtcgcggcaaaacttgcagtaggttataccctcgatgagttgatgaatgatatcactggaggaagaactcctgcttcttttgaaccttctattgattatgtagtgactaaaatccctcgctttaactttgaaaaatttgctggtaccaatgaccgtttaaccacgcaaatgaaatctgttggtgaggtgatggctattgggcgcactcaacaagagtcaatgcaaaaagcattacgcggactagaggttggtgcaactgggtttgatcctaaagtaaacctcgacgatcccgaagcgctcaccaaaattcgtcgtgaattaaaagaagctggatcggatcgcatttggtatatcgcggatgctttccgcgctggaatgtcggttgatggggtgtttaatctcaccaatatcgatcgttggttcttagtgcaaatagaagagattgttcgcctagaagagcaagtggcacaacttggtttagctggtctaaatgctgatttcttgcgtcaattaaaacgtaaaggttttgctgatgcgcgcctagctaatatcttgaatgtgaaagagcaaaccattcgccaattaagagaacaatatcaattacacccagtttataaacgggttgatacttgtgcggcagaatttgctacggataccgcttatatgtactccacttatgaagaagagtgtgagtcggatccaaatcaagacaaacctaaagtgatggtcttaggtggtggtccaaatcgtatcggtcaggggatagagtttgattattgttgtgttcatgccgctctagcattacgggaagatgggtatgaaaccattatggtcaattgtaatccagaaacggtttcaacggattatgatacttccgatagactttattttgagccagtcacccttgaagatgtattagaaatagtacggatcgaaaaaccacaaggcgtgattgtgcaatatggtggtcaaacgccattaaaattagcaagagctttagaagctgaaggagtgcctgttatcggcaccagtcctgatgcaatcgataaggcagaagacagagaacgtttccaaaaagccgtggataagttagggttaaaacaaccagaaaatgccacagtgacgacattagaagaagcggtagagaaggcaaaatctattggttacccgctggtggtacgtccatcttatgtccttggtggacgagcaatggaaattgtttacgatgaaattgatttacgtcgttatttccaaacggcggtcagtgtttctaatgatgcacccgtactgttagaccgattcctagatgatgccattgaagtagatgttgatgcgatttgtgacggtcaacaagtggtgataggcggtattatggagcatatcgaacaagcgggtgttcactctggagactcagcttgctctctacctgcttatactttaagccaagatattcaagatataatgcgcaagcaagtacgtgaactcgcttttgaattaggcgttaaagggttgatgaacgtacagtttgcggtgaaaggtaatgatgtttatcttatcgaagtgaatcctcgcgccgcacgtacagtgccttttgtctctaaagcaaccggtgtgccattagcaaaagttgctgctcgagtgatgataggacaaagtcttgaacagcaaggcgttaccaaagaagtgatccctccttactactcggttaaagaggtggtacttccctttaataaattctcaggtgtcgaccctattttagggcctgaaatgcgatctaccggtgaagtgatgggggttggtgctacttttgcacaagcttttgctaaagcgatgttaggtagcaattccaccatgaagaaaaaaggaagagcgctactttcggttcgtgaaggtgataaaaaacgtgtcgttgatttagcaactaagctattgaaaaatggttttgagttagatgcaacacatggtactgccattgtcttgggggaagccggtatcaatcctcgcctagtgaataaagtgcatgaagggcgacctcatattcaagatagaattaaaaatggtgagtatgactatattgtcaatacgactgccggtcgccaagctattgaggattcaaaactgatccgccgtagtgcattacaatataaagttcactatgacactacattaaatgggggatttgcgacaacactgtcattgagtgctgatcctactattgatgttatttcagtccaagagatgcatgcaaagataaaaaaatcttaa

SEQ ID NO: 315117 - DNA, 1014 bp, Proteus mirabilis
atggctaaagatctcacatcttctgcgtatgacaggcagaacatacttaataattcttatgcactaaaacatgcagagtcacatttggcattaggaggaattgagttcaatggggaaagaatattcacaaaaaatcagttaatgatacttttcgatgttagtgatactacaatagaacgctatattaataatcatttagatgaattaaaaagtaatggatacactttactcaaaggtaaaactttaaaagatttcaaggagatacactatggtaccctcatcaatgaaggtaccaaaacttcagttattggtatttttaaatttaaatcagttttaaacctagctatgttgttagttgaaagtgaacaagcaagaataatcagaactcgtatcttagatattgtgctagacactttagctgaacgttctgggggacatactaaatttattaatcagagagatgaagattatttagttgctgctttcaaagacgaaagttatagaaagaaatttacagatgcgttagataaatatgttgatggtaatcaatggaaatattcaaaattaacaaactctgtttatcaagcaattttccatgaaaatgcagctgagtatagggatgtattaaaacttcaccaaaaagataaaattagagacacaatgtattcagaggtgcttactctaatatctagctttgaggtagggcttgctcatgaaatagaacaaaaagctaaaactcttggacgtaaattgaagcttaaagaggctgaagaaatattaaaaatcatggagagccatcctctttatgaaccaatgttaattgatgtcagaacaaagatggctagtagagatttgtgttttcgtgatgctctacatgagaaattagaagcctatgtaaaagctgtaccaccagaagattttgaacgttttcttggagaaaaaagtaaatctcttgaagaacgattaagtgatcctgaaatgttggaagttttcaaacgacttaaagatcgatag

SEQ ID NO: 315118 - DNA, 459 bp, Proteus mirabilis
atgaatatatttatcaccgatttttaccatcgcaacgatttgttagataaagcagaagccatgatagccaaccattggcctgcttttatgatgggaacttctgttgatgatagctattgggaacgcttatatgatgtgcctttttcccattaccaatttatggcggtattaaaaacgcaaacagaagaaaaggttatcggtgtaattaactccattgcgttaccttggcaaaccaactctctcaacgatttaccggatgaaggttgggatcgtgtttttcagctaggcatggaggctgaagaacaacaattaccttgccatcttatttctgctttgtcggttactatcgatcatcattatcgggggaaaggtattgctcaacgcttaattaataccttaaaggagcatgcaaaaaacaaggttacctcggtgttgctgtacctgtacgccctacattaa

SEQ ID NO: 315119 - DNA, 1206 bp, Proteus mirabilis; identical to SEQ ID NO: 6029

SEQ ID NO: 315120 - DNA, 306 bp, Proteus mirabilis; identical to SEQ ID NO: 6030

SEQ ID NO: 315121 - DNA, 585 bp, Proteus mirabilis; identical to SEQ ID NO: 6032

SEQ ID NO: 315122 - DNA, 1239 bp, Proteus mirabilis; identical to SEQ ID NO: 6033

SEQ ID NO: 315123 - DNA, 906 bp, Proteus mirabilis; identical to SEQ ID NO: 6034

SEQ ID NO: 315124 - DNA, 132 bp, Proteus mirabilis
atgaagtttgaattagaccatttaccgggacatttattacaagccgagatctctgctgctgagctacatagtattcaaaacggtaaagttaaagtgactttaccggctaatgaactacacatatttgcgtaa

SEQ ID NO: 315125 - DNA, 141 bp, Proteus mirabilis
atgattattgcgtacttttttttaggggaagagagaggccttataattataatttcagtggtcagtaaacgtattttaacaacaaataaaattgataagattatttttaacttatgttatcgcatatttataaaacattaa

SEQ ID NO: 315126 - DNA, 915 bp, Proteus mirabilis
atgtcatctcagttcaatggacttatcccttccaattctttatcttcgtttaatatagaagtgattaaagaacttctgctctggatcgaggtaaatctagaaaagccgttattacttgatgatgtagcgataaaatcaggttatacaaaatggcatttgcaacgggtgtttaagcaagcaacgggcttaacattagcctcttatattcgtggtagacgactgaccaaagccgccactgagttgcgcttaactaaacttccggtattaactatcgcactgcgctatcaatttgattcgcagcaatcttttacacgccgctttaaagctgtttttggcgtcactccttcggaataccgtaaagttgatgtgttgtgtagcgacaattttcagccccccatcaattttgaagttaccgacctccctattccaaatattatcgagctacctgaaagctttctttatgttattcaataccaatacttttgctctatcgaggatattggcaaactacatgaagatattcgtcatcagttttggaatgattttttgttgtacactgataaaaactttacggaaagtagtgtgttaatttcttatcagccaaatacattacgtaaagataagatccagattgattatgaaattggcctaaacaatttagatcactttaccagaccccgtggttttagaaaaaaagcgattgcaggcgggcgttatgttcgtttccaatttaaaggcacgttagaagaatataaacaatttgccatcaagatctacttttatactttaccggctttggggttatgtcgtcgtttagggccagatattgaaaactacatttgtatagaaacagatagcgacattatggaactaccaaaaacactggaaattgattattacgttccaattcattaa

SEQ ID NO: 315127 - DNA, 168 bp, Proteus mirabilis
atgaatattaaattacctattaatcctattcgtatgcctgatgttttaaagctaactgggctttctcgttcaaccatttacacattagaaaagaaaggtgattttccaaaacgtatttatcggtgcgttgcgtggcatgggaagcggaagaagttgatgagtgcttga

SEQ ID NO: 315128 - DNA, 132 bp, Proteus mirabilis
atgaggcgtagtaattttgggattgaaccacctaattcactacttagtgcagaggctgttgcaaaattcactctatcagcaatgtcatttgaacatacagggcaagtatttagcataaagaatgatttatag

SEQ ID NO: 315129 - DNA, 141 bp, Proteus mirabilis
atgaaattaaaaaacatggctaatagccgtggcgggcttctctacgctaaaaatcaggaatgggtaaataacctattgaaaatatttcagaggacaaatctgtttaattattcagccaatattaatgagaaaccacaatga

SEQ ID NO: 315130 - DNA, 261 bp, Proteus mirabilis
atgccgatcacgcgagaagatatacaggcacattatgattatcacaacattacacaactcgatgatttacatacaactgattatcgtgagttggttagcggacattcttttttctttcaagatactggcggaaatttaagacacacattatcagaggaaatcttagcaacgaataaagaacaattagatgtattaattgaacaactgcaagcgtttagaaaaataatgaatgatgtccccgaatggttgagtgataaataa

SEQ ID NO: 315131 - DNA, 501 bp, Proteus mirabilis
atgaatttcaatcagcttgcatatccagaattaattattattaatggagatgagtacaaaggtagccgagaaagcagtactgtacgaataccctacaccgatgaacccgatattggaattggtgatgttattacacaaaaatcaggaaaaagacttattgaattaaaagtattagatgcttcatttcttgctggaggatcattgaatataggtactcaccacccacacatgttaactctacaagttgaaaatatgactgccagtgagcataaaacgaaagatcttaattctgtcgttaatataggtaatatttctggacatcaaatacaagttgggaataataacacccaaattacaaatgtaactattcaggaattagttgaaaagattgcaaaatctaatgatgttgaggcaaaaagatctctcattaaattactagaaaatagtaccgttgcaagtgtaataggggcaggtatttccgggctaataagtttattataa

SEQ ID NO: 315132 - DNA, 360 bp, Proteus mirabilis
  misc_feature (5)..(14): n is a, c, g, or t
atgcnnnnnnnnnnttcatggtctttgctctatttttctgatcacggattatcttatgaacataagggggaaagctatactaaacttacccataatgatcaatttaaacaaaattttgaggtaccactctttatactttcgagtgatagtcacgagaaatatcacataacagcaaaaagaaatggtagatattttatgacgttattttctgagtggataggcattcaagatcccaaaatttctaatcattgccatatgatttcaaatgatatttgcactgatcaagacacggttatcaactttcaaaaagaagaaatcgattataattcactaccagaagataaaataatatatcaataa

SEQ ID NO: 315133 - DNA, 192 bp, Proteus mirabilis
atgaaattaacagaacgtcaaatcagcacattaaaaaatataaataatggatatggtcagttaagcaataggctatcaattttctcgttggagaataaagggcttattaagcttcacccaaaggacggatggcaattaacagagttaggcattgaagaactaaaaaggtggaatgatggatatattagatga

SEQ ID NO: 315134 - DNA, 135 bp, Proteus mirabilis
atgtcttcttcacacatatttactccaacaatattacaaatcaaagtttatttatctctaaataaagataataactatatgttaattttatttaaccgcggagtatcggctttccctgttaattcattcagttag

SEQ ID NO: 315135 - DNA, 453 bp, Proteus mirabilis
atgagtaaaaaactgttaattgcctgtgctgtgatgatgacattgttatttatcacagttcgatggcaggcaggaaaaattgatgagctgaaagaatcaaaccaatcactcactgaacaactatctcaacaagtaaaaatcaacaaagactatcaagcccgtatcactcgactaaatcaactcgatattaaatacactcaggagttagccagtgcaaagaatgaaattagtcgcttgcgtgatattagtgagcgtaatcctgagcgggtgtacatcaaagccgagtgcccaaagagcaccagtaattccacctccgagttggatgatgcaaccaccgcccgacctactgacaccgctatcagaaattattggttactcagagagcgaattgcacagtcagagcaaatgatattagggctacaagattacattaaagaagagtgtgtaaattaa

SEQ ID NO: 315136 - DNA, 192 bp, Proteus mirabilis
atgaattacctgaaaacattagaggcacaagctgaagctttagtagccgaattgtttgcaaatgataaaactcccatggaacaatttggtacaagctggtctcgaattgaaatgctagaaagacgagtaccgaacttagttagccaactagatgcaccaacagacgactattccaaagcactgtgttgctag

SEQ ID NO: 315137 - DNA, 540 bp, Proteus mirabilis
gtggataagaataaaataaaagctacgcaggaattcatttttgataatgtagccaagatgttgagagataagtaccctcataagtcattatgtatagaatatccttcagacttaattattgaggaccttgataccctacaagaacaaggaaagctaaaatggaaagcttcagtaaaaagtggaacaatacttaccatagagcaagaacacccaataaaactagtagtatactatcgaggtgagctagttgggtatgcatttggtggttacaaagagaagcttgaatctctggaaatatcgtggattgaaaaacgaactgatgcgcacgctgatctcgatcatcagatgctaggattaacaattgatagttatgcggcatatggtatgatgcttcgtaaggatgggttgccagttaagcaattagcaatagttagtcctgttgaaggtgcaaaactttactataaagagtgtggatttgattacactgctaactatgatggttacacagaagctatgatctttaagtatcagcaagcttag

SEQ ID NO: 315138 - DNA, 153 bp, Proteus mirabilis
atggctgaaaatgtcgttaatgatattctgaaatggttagaaactcagttacaacgtaatgagggtataaagattgatacgattgcaataaaagtggctactcgaagtggcatttgcaacgtatttttaaagattttaaaggttgcacattag

SEQ ID NO: 315139 - DNA, 234 bp, Proteus mirabilis; identical to SEQ ID NO: 311624

SEQ ID NO: 315140 - DNA, 621 bp, Proteus mirabilis; identical to SEQ ID NO: 266551

SEQ ID NO: 315141 - DNA, 333 bp, Proteus mirabilis; identical to SEQ ID NO: 266550

SEQ ID NO: 315142 - DNA, 855 bp, Proteus mirabilis
atgacaaatgtgattgcttgtattgacggttcaaatgtgacatccgctgtatgtgatgccagtggctgggccgcctttcaactgaatgcccctgtaatcctattacatgtattggataagtcagcctatccgatagagtcagatctgtcgggaaatattggcctaggtacacgggagcacttgctcaatgaaatggttgagctcgaagcgcgccggggcaagctggcactcgagcagggtaagtatatgttgcaagatgcgcaaacgcgcatcgtggaggcacaacctgcagtcgtggttaaaaccttgcagcgtcacggcgatttagtcgaaaccctgttagagcaagaatcccatgccagattggtggtgatggggcgtcaaggggagcaacatcaagatcaagcgcaggcgattggcagccatctagaaaacgtcattcgcacagttaagcagcctattttagtggtgatgacagagtttgaagcaccgaaacgatttatgattgcctacgatggcagcattactgcgaaaaaagcccttaatcaagtgctaacaagtccactcttaaaagggcttgaatgtcatttggtgatggtgtctgatgctcaatcacaggcgacagcagaactggcgttggtgaccgaatctctgatggcggcgaatttcaatgtggttaccgctgtttgtcagggagaagttcaaacggctcttgagatctatcaacttgagcatcacatcgatcttatggtgatgggggcctacggccattcgcggataagagagttttttgtgggaagcaataccacaaagatgatcagtaaaagccatatcccattattattattgcgctaa

SEQ ID NO: 315143 - DNA, 573 bp, Proteus mirabilis; identical to SEQ ID NO: 263951

SEQ ID NO: 315144 - DNA, 1101 bp, Proteus mirabilis
atgagtgaaattaaatatattaaagaaaagcagtacttacaaaaactgttcagtgagtatgcagataaagcgccacatttagcgagcgtacttgatcctcaagatccacaaacaagttatctcttagaaggctttgcttttttatctgctcgtttacaagataaaattgatgatgcttttcctgagatcacattacccctactgcaacgactaaattcccaagccattaaaggcctaccatcaacaacaattatccaaattgaccaaagtgaaattctcccctatcccatggagattaatgaaaaacatttggtgattggcgacaacggggcacaatttagtttctgccataatttcaccatcatgccttatagcattttggatagaaaaattactcagcatccaaaccactcttgtatctctcttgaaatattatatcgtggtgatgtggaattaactcaaacaaatgcacttaatgtttttttaggggaaaataaaaccacctcagacattttattactcgcatttagtcaatattttgaaaaaattgaggtggtacataacggtgaacgttatgaaggcgatcatcttaattatgcttttgaacccaaaattggcaatgactataaaatcttcccacagaaaaataactcattttctgcaccacaacgtttattagaaggtctttatttaccccatgttcaccattttattgagttagatataccacaaatagtgactcaattagattggaaacaacagcagcggtttgttgtgaatatctatttcagtcagcaacttcctttaactcaagaagagtgtaatcagagcttttttttaaactgtgctccagcgattgatagtgaagcaaaacatacacttttaattgattttaaaaagaataaatcaagttatttactccctattccaacccatcactatttggccgatcttgataaaattgagttatcactagagcctcatgagctagcgcgtggcatatactgtcatttttatcctacgacagaattaaccgccgcctctcgtttaatgccccaatttcataaagccattttctattcattaattgaatttctttga

SEQ ID NO: 315145 - DNA, 582 bp, Proteus mirabilis
atggtcacaccgcctagtttacattttgcatgtgtttatattggctttgaacaatataaaagaaatgagttaggtctattaaataaacacagcgaaaaaatgcctgatgcagtaaaaacaggaaatatcacattattatcatcttgttatccacctattgtaaataatcaccatttttggaaattgttatctcattacagtgctaatggttcaatgttaatgtcattagatactattaaacatatgatttctgattatattctttaccgagatactgataggcagatcactcgaaaatgtgagcgattattaaatggactcgttgaactaaaaacacatttatatgactatattttaaaaggtaaaccctatcgttgtttatctttatcgctattcattgacgaaacacaatatgaaaatagaggtgaagcttttgtctttactacacatctttaccattttttcccgttctgtttatctgaaaatatgttattggaaatgtcagttacactcaacgatcagaaaaacaccacttggtatttatctccctcaccactaaggggctataaatcaatgatttaa

SEQ ID NO: 315146 - DNA, 183 bp, Proteus mirabilis
atgatcatggcaaaagaaataattaatgtagatagcgggaaaatgctagatacattacatcgagtaaaagcattcttaatttcagctcagtttctttctcgtaatagcgaagagcgagcaattcaacttagcttattatctcaagcagaagatgaaatcgatgaggttttaaatgatgaataa

SEQ ID NO: 315147 - DNA, 348 bp, Proteus mirabilis
atgagtcgccctttttcatggggtgaatttgattgttgtatttttgcctctgaatgtatttacgcacaatgtggtttctctccaataaagccttatctcaatcactataaaaccaaagccgaagccttcaacctgctcaaatctaaatttggctccttagagaaagccgtatcacgctatttcaaatccattgagattgagcgcgttcagcgtggcgaccttgtactgttcaaaggtgaggacggtgacagtttagcggtggtctgggcgaggcattattggggcgtaaccccacaaggcgtgaagccggtgcagattaacccaatcaaagcgtggagagtggaataa

SEQ ID NO: 315148 - DNA, 291 bp, Proteus mirabilis
atgcgccgtcagcttgagtacaagcagctctggcgaggtggtcaggtactggcaataccaccagcctacaccagtcagaagtgcgcttgctgtggtcatacagcaaaggaaaaccgccagtcacaaagtcaattcgagtgccttgaatgtggatatacagcgaatgctgatatcaacggggcacgtaacattttagtggcaggacatgccgtgcttgcctgtggagggagggggcagtcagaccgcccgtcgaagcaggaacccgccgaggtgattcagacatcagtctga

SEQ ID NO: 315149 - DNA, 354 bp, Proteus mirabilis
ttgaaaaagtggcttgttgattataaatttaaagaatggaattataaagagagttcaggtgaagtcgttagtttacaggataaaatggatagagcggaagaaatagctatactattatctgataataaacgatggcactcacatggtagatcaattggcattaaaactataattgatactttaaagttaaaagttgaagattactcaggcgatgaggatttctcagctgaagttattgatatccataatttattacttcaatttgcaatgaaatcaaatcaagaaatagttgtcatagggtcaacaccatttttagatgaagaagacccacaactggagatagaaaatgaataa

SEQ ID NO: 315150 - DNA, 1125 bp, Proteus mirabilis
atgaattcagaaagcccaattaagcatgtccgctgggcaatcatgtgttcggtaatcggatttgcattaacaggctgtgccgacacgccttatcgtcctgcaccgataacctctgtcaatgatagttcgtcaaatcgtaccgtttctacatcacctgttacaactaacagtaatgcaggagtggcaacacctattgaaagaggttcaactccgttacaaacaacgcctcctccttctattagagtgaataacacaaccgcgcagcctcaaagccagcctcgtacgcaaaatgttacccctcaaaatgtcaatacggatggtagcggacgcattgtgtataaccgtaattatgacaatatccctaaagggaattacagcggtaacacttatacggttaaacgtggcgatacaatgttttatattgcgtggatcacggatagtgatgtaaaagatttggcctcaatgaacaatattccagagccatatagcttaaatgttggacaagtacttaagattggtaaccgtcaagttaataccggtaccaataccaatgtaaatacttcggtaattaataaaccaagtagtgaaggtgttcagacagcacaaactaagccgtcaaataataatagctcaatggggccgttgatcacgaaaccaacaacaacgacaccgccaaagacaacgacttcgacaccaacaacttcggcaacaaccagtaataacacaacggcaacctctaaacctgcagccgcaacaggtaaatgggtatggccagcacaaggtaaaattattgagagctactcaaatgcacctggtggtaataaaggtattgatattagtggtacacgaggttcacccattgtggcaacagccgcaggtaaagtggtttatgcagggagcgcattacgaggttatggtaatttagttatcattaaacataatgatgaatatctcagtgcttatgctcataacgatacaatcttggtacgtgaacagcaaaatgtaaatgcaggacagcaaattgcgaccatgggaagtactggtactagttctgttcgattacactttgagatccgttataaagaaaaatcacttaacccaatgagctatttacctaaaagataa

SEQ ID NO: 315151 - DNA, 627 bp, Proteus mirabilis
atgttaagtcggtcaatgaaagacttactgacaatgttaaaacaacacggcatcaatgatgagcgtctgttggaagctatgagcaaagtaccccgagagctatttattgatgaagcgctctcccataaggcttatgaaaatacggctttacctattggtaatggtcaaactatttcacagccttatattgttgctaaaatgacatcactgcttgaattacaagcaacagattctgtgttagagattggcacaggctctggttatcaaactgcagtattagcaaacttagtgcatcatgtcagttcagttgaacggataaaaatattgcagtggcaggcaaaacgacgctttaaacaccttgatttacataatatatcgactcgtcatggcgatggttgggaaggttgggtatcaaaaggcccctttaatgctattattgttactgcctgtgcaacagaagtaccgcaacgactcttgatgcaattagctgatggtggcaggatgatcattcctgtcggtgaacagcagcagatgcttaagtttattcgtcgtttaggtaatgattttcactatcaatctatcgaggctgtacgctttgtccccctaattgcgggtgagttagcataa

SEQ ID NO: 315152 - DNA, 747 bp, Proteus mirabilis
atgaatataccaaactctacttttcctattgtggcggttattcccgctgccggcataggtagtcgaatgcaagcaacctgcccgaagcaataccttaaaattggcagattgactatccttgaacatactattaatgcgctattaaaacatccacgcatttcgcaaattattgtcgcaattaacccagaagatgactatttttatcacctagcccttgctaaagataaacgaattattgtcgttaaaggagggggacaacgtgctgattcggtattatcagggcttcgctatattacagaacatcttgcgcaaaatacatgggcgctagttcatgatgcggcaagaccttgcctgtcctttagtgatttggataatcttattcaactcattgatgataaccatcttgatcctcaattttgtggcgggatcttagcctctcctgtgcgtgatacgatgaaacgtagtcatcaacaagataaccatattgaaaaaacagtggcaagagacacgctatggcatgctttaacgccacaatttttcccagcggccttgttaaaacaaaatcttgaaaacgcattggcacaaaacgtacccattactgatgaagcatctgcgatggagtttggtggatatgaacccttattagttaaaggccgtgcggataatataaaagtcacacaaccagaagacttggctcttgcagaatttttcctctctcgacaaattaccagcataaggaacacataa

SEQ ID NO: 315153 - DNA, 321 bp, Proteus mirabilis; identical to SEQ ID NO: 308586

SEQ ID NO: 315154 - DNA, 615 bp, Proteus mirabilis
gtgacgatacatcaaaatattgtctggcatcctcatcaaatagggttaaaagagcgtgaagcacaacaggtacacaaaggatgtgtactttggtttactgggttatctggctcaggtaaatcaacactggctgatgcgctagagcaaaccttatatcagtactcgacactccatgcgcctatccgcacctatttattagatggtgataatctacgccatggtttatgccatgatcttgggtttagtgaacaagataggcatgaaaatattcgccgtgtaggggaagtggctaaattaatggttgatgccggattaattgtcttaacagcatttatttctccttatcagcaagatagacaacaagtaagagaaaggtttactcaagggcgatttattgagatctttgttgatacacctctagccctttgtgaagcacgtgatcctaaaggcctctatcaaaaagcacgacgaggcgagatcaaacagttttccggcattgattcaccttatgaacgacccattgcgccagaaattcatttagacggctcactcgcgattaatgagcttacacaacaaatcctcgcttatttacagcaacaacaaatttaccgctaa

SEQ ID NO: 315155 - DNA, 909 bp, Proteus mirabilis
atgaatgaaacacaattaactcatcttcagcaattagaagcagaaagcatttatatattgcgtgaagttgtcgctgaatttgaaaatcccgtcatgctttactcaataggcaaagattcttcggtgatgttgcatctagcacgtaaggctttttatccggcgaaattaccttttcctcttttacatgttgatacgggttggaaatttcgtgagatgtatgagtttcgcgataaaacggccaaagagtatggttttgatctcaaagtttatcgtaatccccaaggggcacaattggggatcaatccctttattcatggtagcgccaagcatacagatatcatgaaaacagaaggtcttaagcaagctctggataaatatggttttgatgccgcatttggtggggcgcgtcgtgatgaagaaaaatcgcgtgctaaagagcgtatttactcatttagagatagatctcatcgttgggatccgaaaaatcaacgtccagaattatggcaaaactacaacggccaaattaataaaggggaaagtattcgcgtttttccattatcaaattggacggagctagatatttggcaatatatctatttagaaaatatcgatattgtgccgctctatttcgctaaacaccgtccagttattgagcgggatggtaccttgattatggttgacgatgatcgaatagacctaaaagctggagaggtgatcacacaacaaaaagtacgctttagaacattaggttgctggccattaacgggtgctattccttcacaagcagacacattacccgccattattgaagagatgttaatttccaccagtagcgagcgacaagggcgtttaattgacagtgatcagtctgcttcaatggaacttaaaaaacgtcagggttatttttaa

SEQ ID NO: 315156 - DNA, 732 bp, Proteus mirabilis
atgagtcgattatcactttctcaattggtgttactatcgattgaagagcagcgactggcgcttgatgaaatcaaccaacaattagagcaaaaaacggcgatagagcgggtgatttgggctttagaacatcttcctaaccagtttgttttaagctcaagctttggtattcaagcggcagtttgtttgcatttgcttaccagacaatatcccgatatacctgtaattttgacagacacaggttatctctttcccgaaacatatcaatttattgatgaattaacttcttcactacaacttaatttaaaagtatatcgcgctgaaatatcttcatcttggcaagaagcacgctatggcaagctttggttgcaagggattgaaggtatcgaacgttataaccaaataaataaagttgcgccaatggaaagggcattaaaggagttacaggcgaagacatggtttgcagggctacgacgccagcaatccaaaagtcgagagcatttacctgttttatccatagcgaaaggtatttttaagttactaccgatagtcgattgggataataaacaaatttatcaatatattaaacagcataatttaccttatcatccattatgggaacaaggttatctgtctgtgggtgatacgcatacgacacgcaaatggcaagagggaatgagtgaagaagagacgcgattctttggcttaaaacgtgagtgtggattacacgaataa

SEQ ID NO: 315157 - DNA, 1815 bp, Proteus mirabilis
atgagcaatcaacccccattattatcaatgcttccattaacacaggagcaattgaataaattacaggatgtgacgaaagacttaactccagcccaatttgcttggctttctggctatttttgggggcaattaaatcagcattcatccactaaagatgagctggtaagtgtacaaagtcaggttccccaacaagaaaccatcaccgtgatatcagcatcacaaactggcaatgcacgtcgtttagctgaacaattacgcgataaattggttgataatcaacttaatgttgagctctatagtgcgagtgaatataaatttaagcagatccacaaaacgacaaccttaattattattacctcaacacagggggaaggtgaacctcctgaagaagccatcacattttataaatatttgcactctaaaaaagccgcgccaatgaagcaaacggcttatgctgtactgagtctcggcgatagtagctatgaacatttttgccaagcaggtaaagattttgatcatcaattggcgcaacttggcgcgaccagtctattagaaagattagatgcagatgttgattatcaagctgacgctgataaatggataactcagctgactgatattttaaaaatacgtatacctgagcaaaacactcaagtattacaacaaacacaatcaggaacaaccgacagtgtcgataccgcacgctaccatcgtgatgcaccttttagtgccactttattaactaatcagaagatcaccggtcgacattcagataaagatatccgtcatattgaaatcagtctagcaggctctgaattgcaatatcttcccggagatgcactaggagtatggtttaagaattcggaagaaaaagtggatgagcttattaccctattatggttaacgggggatgagcaggtaaatgttaaatcacaaacattaacgttaaaagaagcattattgcatcatgttgaattaactcaaaatagtgcaccaattattaaagcgtatgcccaattatcccgccacgaagagttattatcgctggtggctgataaaagcaaacttcagcaatatgcgcaaacctacccaattaatgaaatggtacgtcaatatagtgcgcaacctaatgctcaagagtttattgatatattgcgcccattaactccacgtctttactccatcgcttcatcacaacaagaagttgatgatgaagttcatcttaccttaggtgttgttcgttataacgtcgatcagcgtgcttatacaggaggtgcctcagggttcttagctgatcaacttcaagaaggcgatacagtaaacgtttttattgaacgtaatgatcattttcgtttacctgaagataatcaagtccctgtgattatgattggcccggggacggggattgcgccttttagagggtttatgcaacaacgtgaaagtgaaggtgcgacggggaaaaactggctcttttttggcaatcctcactttgtagaagatttcctttatcaagtggaatggcaacgttatgtcaaaagcgggttgttaacacgtattgatttagcatggtcgcgtgatcaagccgataaaatttatgtgcaagataaattacgggaacaaggtcaggaaatttggcaatggttacagcaaggtgcttatctctacgtttgtggtgatgcatcaagaatggctaaagatgttgaacaaacattgttagaaatagtaatgacccatggcaataaaaatattgagcaagcagatgattatttaagtgagctacgtttagcacgtcgttatcagagggatgtttattaa

SEQ ID NO: 315158 - DNA, 363 bp, Proteus mirabilis; identical to SEQ ID NO: 295451

SEQ ID NO: 315159 - DNA, 672 bp, Proteus mirabilis
atgcaataccccattaatgaagtgtttcaaaccttgcaaggtgaaggtgtttttactggcgttcctgcgctttttgttcgattacagggatgccctgtaggatgtagttggtgtgataccaaacatacttgggaaaaagaagagagcaagaaagtccctcttggagatattcccattaaaacacaagaaagtgatacttggggtatagccactgtcgaagatattttatcacttttccggcaacaacgttatagcgcaaagcatgtggtgataacgggaggggaaccctgcctttatgacttacggcctttgacggaaggcttagaaaaagcaggttttgattgccaaatagaaaccagtggcacgcatgacattctctgtagtgaagcaacatgggtaacactttcgccgaaagtcggtatgcgaggtggattgaatgttttatctagtgcgattaatcgtgccaatgaaattaaacaccctgttgctcgtgaaaaagatatcgaagcactggatgatttactgcgattaagaactcaacaacctatggcgatcgttgccttacaaccaatcagttgtaaagagagtgcaacagcgttatgtattaaaacctgtattgagcgtaattggcgtttttcaatgcaaacacataaatatttaaatatcgcctag

SEQ ID NO: 315160 - DNA, 291 bp, Proteus mirabilis
atgaatcacctgacatgcaatgtaaagaaaataaatgaaattaataaaataaaaactcctcacttagataaatacattgatgaacattaccaaaatcacggccgatgggaatgcagaatatataaattaaatgaaaatactaagaatataaacgatatcaattacacgctaatagattgtttttttgattacaaaaaagcgtctcacagcaccaaagaaataatgaaccaacaccctaaaatgaaagaacgcgtaattgcatttttaaacataaggatagcagatgaataa

SEQ ID NO: 315161 - DNA, 468 bp, Proteus mirabilis
atgtataaatattttttttgtatattttctatttttttcatgacggggtgtgctaatcaagaaccattaaagaaagtaacttcatcaggcaagccggaaggcgtatacagcaatacgactaaatcatcagtaaaagatgcgttaagcacttactgtaatgagagaggttttatagtattagaatcaacggactcaggagttttgtgctcaaagaaaactgaaggcggtacagctgttatgtcacaacttgctatcggtaattcttattcaacaacaccagaagtaaaactaaaattttcgataagtgaagtaggtgaagttattaaagtttgggctgatgcttggtttgagacccaaatggctatgggtcaagtcaatagaatggatattaagaacaattcagatattaaccaaatacaagatagattagataatttatctcctaaaaaaattcaagaaaagaaataa

SEQ ID NO: 315162 - DNA, 366 bp, Proteus mirabilis
atgtcagataacactattcaattaaaagtctcagtggatacaagtgagttaaataagttagaagaacaactcaatcgtattaagcaactaatacaagatgtaggcgtgaagcctaaatcaatcccaccattcttctttcagtcttctggtgaattctttattaaagatgcctttattaattctgctgaattcaaaggtgtgcttgtcagtaataagtcagaactagacatcaatgctcaactagcagatttacatatgcgagcagatcgacaagatgttgctatagctgaactcactagattaagacaggcagatcaacaggcatggtctgatgctattaatcgaacatggtgtagtcagaagtaa

SEQ ID NO: 315163 - DNA, 300 bp, Proteus mirabilis
atgaccatctcaatgttttggatttacatcaatttcttttcttgtttactcgcagtcattcgactcattaattatcgacgtaatggagctcaatataaatttggggcgtcattcattgcgtgggtattaattatcttattgggttcggtgccattgcggatcttaacagatgattattctcatgctgacccatttgaagtcggtatcaatttatcgttatgcatactcatattattgagtcgcggaaacataatgcaaatattcagaggtgttagacatggcaaagatggctcgcggtga

SEQ ID NO: 315164 - DNA, 390 bp, Proteus mirabilis
atgaatgagccgttaacgggcactacaacagcatcgctagcgggcgtttcaattgtgggcctgtttgctggtatggatgctggcgttgttattggggcgtttgcaggagcagttatttttgttttatctgctcatgatattcgtctattaaagcgttggacttattttgcggttgcgttccttattggtatttatggcgctgattttatgtcaggtattcttagcgatataactggtggccgtgatgtcgataagtcagtaggagcaatgttttcgtcagcagggctggtgggggttttggtctcaatatcaaaacctggtgcaatgactgacggaataaataagtttattaataatctgatagataaattcagaggaggtggcagatga

SEQ ID NO: 315165 - DNA, 537 bp, Proteus mirabilis; identical to SEQ ID NO: 312764

SEQ ID NO: 315166 - DNA, 126 bp, Proteus mirabilis
gtgagtctatatcgctttcttggttggcaagttagtggtgaaattcctgagtttgctcaagcagttgatggtaagtttgaggctacaaccattatgtttaaacttaagcctgagagtaatagttaa

SEQ ID NO: 315167 - DNA, 330 bp, Proteus mirabilis
atgataagtgctagttcaagagagcgctggaatactaaaacgataataattataagtcttttggtatcaatagttttgattgtaatttcgtttttttatccaaatgattataatgattggaagaatattcagattagtgtggcttgttcaattttagcaagtaacattatcatgtttttaacctccgaatatatgctgagaagtaaaagacgtacagaaataattgatcgttggggggttgaatctatatacaaaactagggctgaaatgaatgtttccacaaatgtttcgctatcacagtggtataaaaatactaaccttaactcctaa

SEQ ID NO: 315168 - DNA, 300 bp, Proteus mirabilis
ttggggggggatggcggtattgaaatcccactcgatgtaaataaacaaccactgatatgggttaactctaaagttaacaaagatggctctattctcgttaaaacgtatcaccgaattcactctaatgcgctagagtttgcccgtaatgatattgatggtttcaatgacggtgactcaattgatatccctaacggtcgttttatttccgtgcgtgtacagatgccagaaggctcaatctataacgtgagaatgcgtgagatggaagaagcgcagaaagtggaagaggagatgaaagagtag

SEQ ID NO: 315169 - DNA, 240 bp, Proteus mirabilis
atgctaattactatttcaccagctaaaacactggatttcgaatcgcctttagcaacaacgcagttcacccagcctgaattgctaaaatattcccaacaacttattgcagaatgtcgaaaactgtcgtccagtgatatcgcaagcttaatgaaaattagtgataaattggcaggactaaatgcggctcgctttggtgaatggcaacctgactttacacccgattttagcgttcaaaggtga

SEQ ID NO: 315170 - DNA, 255 bp, Proteus mirabilis
atgagtgaagttattaaaactgttatcaaaataatggggacccaaaaagatttagcaactgcttgtggtgtatctcagcaggctgtctgcaagtgggctaatggtaagtctagagtgcatcctaaattagtgaaattaattgttaatgtaacagatggtgcagtaaaagctcacgaaattcgccccgatttacctgacttatttccgcatcctgaaggtaactctcatgcaccaaatcaacatgccgatgcctga

SEQ ID NO: 315171 - DNA, 489 bp, Proteus mirabilis; identical to SEQ ID NO: 298431

SEQ ID NO: 315172 - DNA, 198 bp, Proteus mirabilis; identical to SEQ ID NO: 14560

SEQ ID NO: 315173 - DNA, 234 bp, Proteus mirabilis
atggtccctacaggattcaatataaagctatattatattgattataaacacattaaattcattcaatttcatgtcatgcccccaattatgccccctttttattttgtgactcaaaagttaagaggttcagacttcagttttcccaaagccaccagcattgtaaaaatatcatcaattggtaatttcattgcagataatgaaatgccattcaaagtaatttctgttcttaaataa

SEQ ID NO: 315174 - DNA, 1386 bp, Proteus mirabilis
atggttgctgatagagcaacacttgatcaccaaatattcataggctattcagaaaacgagttagaattagcccaatcccgattttatttaaagcgtttaaatctaagatatgttcgctctagaagagaccttgaaaagttcattaatatagaaaagaaaaagcttctaaagcaatctcaagacaatcttgaggcggatgaccttgctgccgatcaagcaaaaatgaaagtaatttctgagcagttaaaccaagtcaacgaaaaagtagctgggctaaattatgttaaagacgcaacatctgtagttaatgaagagttaaaaaagttatcatatacaaatggcgattatagtgtccacttagataccggagccattaaagttaatcagttcattgataatttagagcttggggcttcaacttcaggctctaaaataatgctaggaggtgatgggagaaataaccagatattgttagccttatggaaggcaaaaagtcaaagagaatttgaccctgaacatgaagtaacattctattgtatagaagaacctgaagctcacctgcacccgcatcaacaacgtaaactggctgactacttaatacatgaattaccgggccagactattatcacaagtcattctccacaaataactgagcgttataaaccaaactccattatacgactcttctcaagagctgaaggctctaaagcagcaaaagatggctgctccaattgtatttcggatgcatgggatgagttgggctatagaatgagcatacttccagcagaagctttttttgctagttgcgtatttctggtagaaggcccttctgaaaaattgttttatgaagagctagcgaaacaattagattttgatttagacttttacaacataaccatcttatgcgttgatggtattcaatttaaagtttattgccagatactcgatgcaatggaaatcccttgggtactgcgaacagacaatgatgtctctggaacgaaaggtcgtacagataaaagagctgtagggtttaatcgttgtttttcgctaatgggtttaccaaatgctccttattatccgcctaataccacatcacaagaccttgttgataatggtgcttggcagcatgcttctaaccaagtaaatccaaatggtatgttcttatcaaaaatcgatcttgagaacgatattgcacttgagttggaggccgagcttttagcttttgcagatgaagaagacattgtagatgccattaaatatttgcaaggtaaaaaagcgattagaatgcgagagtttatttcacaaaatagagatgtgtttgctaggttggccaatggtgaactagcaaaaccattagcattcgcagtattcagggcagtagcttaa

SEQ ID NO: 315175 - DNA, 1635 bp, Proteus mirabilis
atggttgattttaaatttaccccagatcaagaagctgctatagcttcaaatgcgaatatggtgattactgcttgcccaggaagcggtaaaacaactgttgtcgtagagaaaataagaaatgaagtccaatcacttcctgactataagggcgtgattggcattacgtttacagtaaaagccagcaaagaattaaaacaacggtgcaaaaaagatgcgtgcgatttaaaggctagctttttcggaactattgatcatttttgtttaagtgaaattatttacccatttggttctcggttgattggtcactattcttcggcagtagagtgcaaattattcgatgaaatccctcaaaatttaaaagatcaaatacctacgatttctggacactctggaaacatcaaaactgacatttatccaatatttgaacaagacattaagactttgtatgaaaatggatatgttttacttgaactgttaggtgtaatggctaaccacattctaaataactcattagcctgccaaaattactttcgagcaaagtatacttctctttatgttgatgaataccaggattcatctgaacctcaacatatattatttttaaagttaattgaactaggtttaacaggtattgcagttggggatacacagcaatcaatttatgcatggcgaggaagtaaccccgaatacattacaagtttaactgcgcagcctgatatctttgaacaccacatagtcaatataaatcacaggtgccacccttctattaccaactattcaaacagattgtttaatccaacttgtgatttaatttccaccgatgaaataagagttcatagatggagttatcaaggtactcagcttgatgtgtctgaacaaattagtgactctattcaagatgttatcaaaaaaggtataacagactcttattctaaaataggtattctagttagaaacaatatatctctggaatttctagagcaaaagctaaaagttccttttagaatttttgatgaagatccattggctgtcagaaatactcgcatcactaacttgtttgcaagcttattgcggtatcgttttaatgaaaattatagaattaacgatgtaatcgaaacggttgaacggtacataagagttcaagagcaacaagtccttaatcttcggagattgattgttggtgtaagaggcaaagaatatgaagatcttgtagaatcgattattaaaatttctgaaggtatttttaattgtgttgtttcagattcagataaagagctaattcataatatttgtgttgataacaaactactaaaacattacatgcctattaacgaaaatgaagtacaggtaatgacccttcataaatccaaaggactggaatttgatgtggtttatcatttggatctttatgactgggttcaccccaaaaggcttgttgttccaggctcatgggatgttcattatgacaactgggagcaagagctgaatctacattttgttggtattactagagcaaaaaagcactgtatattagttactagcagcaatcgtctaaactatcaacatcaagttaaaaacggtaccccctctcagttttttgatttacctggattagaggggttatatacacaatga

SEQ ID NO: 315176 - DNA, 2832 bp, Proteus mirabilis
atgttacgttcatcgtctgcgcctgaaaccgtaattgtcggaaaaacagtgatatcgggtttgcttttcttcgccgaagaagaggcgggtgaacaagatgaaaacgaaaaaatcacactgacattggctctggcagggcaccccatagagaaaatcgggaagatttggttgggtgatgatctcattgagacgtttggtgataaagtgtcatgggaattacataacgatagggaagatgtcgatccctttatgcttaaaaattgcccatcatggaaagaggatatgattggtcgaggtctggcgtggttacgtgtgacactcacgtttgaccaagaaaaattcccttatggattacccaatgtgaaatgtgaagtctggggaaaacatctttttgatcctcgcactgggcaaacagcatggagtaacaatggtgccttagtgattttggattattaccgtcattatttaaaagtgcctgatacggatattgattttgacagctttaaacaggcggccgatttatgtgatgaaaaagtgagtctaccagaaggcggatttgagtcgcgatatacccttaatggtgcctatgacttaaatgagagtccatccagtgtcttggaagcgatgcacaaatgcattaacgcggaaccgacattcaccgcaggaaaacatggtattcaaatcggtgcttattatgggcctgcaataaaaaccattactgaatcacaattgattggcaccgtcacatgtacccctgaaacaggattaaaagacgcgaccaatgcggtgtatggcacgtttattgatgccgaacagttgtacacaaaaaccgacttcacgcctgtgattgtggacgaatgggtgaaagaggatggcttagaaattcgagagaatatcgactatcgttttgtcaccagcccttatcaagcccaacgattagctcgccaatatcttcgtaaaaagaaagcaggaagacgagttcaactcactatgaacttagatggctatgcttatcgtccgggagaagttgtgcttttagaattaccttctttggggattagtgggctggaattccgtattgccgaatggtcttttcatgcattagacggtgtggctttaacgttggaagaggatggtgcctatttatatgaagatgtgattggcaaaccgtttgagcgtccaccatttgtgagtttacccactggcggtgttgcttcacccattaatcttacctttgttccacttgccgtcagtgacatcgtgcaaggtacgctttcttggcagaatgtggcgtctgatgtgcgctataacaccgtcactattctccaagaaggcaatgttattcaatctattcaggtaccagctgagcgtgttgatattaacggattagcacgaggcacttatcgtgttgaagttagagcaacaaatgtggctggcgcgatgtcggcacccgctatcagtgattttgccattcaagcaccaccgcctcctgagcatattgatgttacctctggcttatttaatctgaccattgcaccgaaacaaggcgatagtgctgtctttggttatacctttgaattttggtttagtgaggaaaagctcgctaatctttctgaaaatgaagtgatcactaaaacaaataaagttggccaagggaatttctggacgcaagagaatttacaagcagggcatacgtattatttttatgttcgaacaatcaacagctatggtaaatcaccttttgtggaagcttcgggtacttgctctcctcaaactgatttaattctagaagaattagcggggcaaattagtcgagatcaactcgcacaagacttattgggtgagattaatagcaaagctgaccaatcagctgttgttgagttaaacacgcaagtgaaagcaaaccatgatgcgattttagaggagcaagttgcacgaggagcggtaattaaccaagagcaacaagctcgcactgaagctgataaagcggaggctcaacaacgccaattcttagccactcaacttcgtggtgattataccggcaatgatttatcaaaagtgaccgcaggacttatctccgctgagaagcaagcgcgagttacaggtgaccaagcggaaaccaaagccagacaatcactggaaacacggatgaatgggaatgtttccgcgattaataaatcattaggaaccctcacctcgaaacagcaagcgcaaacacaagagatttcaacgctcaattcaaatttgaaagggaaagccgatagcagtgcggttaatgcgttaaatacgcgagtgtcgaatattgatggaaaaatgacggctaccgctcagcaaatcactcgtctagaaagccaagtgggtacaagttcagccaaaatagagcaaacctcgaaagtggtcactgatttaaatggcaaaatttccgcatcatggacaatgaaagtccagcaggatagcaaagggaataaagtcattaccggcattggcttaggatttaatgcgcaaggaaatagccaatttctggttaatgcccaaaactttgcggtgatatcgtcattaaacggcaaagtggtgacaccgtttgtcgtgaagaatggacaggtggttattcatgaagccttaatggataaagcgtggatacagaaactagtggtactcaattattttaaatcatcgggatttgataaagggaatggctttttattggatgcaaaaaataatattttccgctttacgggtggtaatggggcattaaatatcaccaataatcaattggtcgtcaaagatgagaaaaaacgccttgtgatgaaaatcggttatctagggaattga

SEQ ID NO: 315177 - DNA, 1515 bp, Proteus mirabilis
atgaaagcagcatatatcactaaagataacattcttgtcacagaagctacagttgaagcctataaagcgattgttctgagcgttccctttgataatacggtagatcaacgtcaaaaatctaaatatcaccgtgaaattgctttgttcttgcagcatattatctgtagtgcgacggttagcaaaaatacgaaggaaaatgcgaggtttaaaggcgataaaaagtggacgtattcagtaccatttccctctgaactggggaaagaaaaagttcctatgatttttaagcaaagccgtgatttaggcttaaaacgtgctttagagtgcttagaacaagctaaaattattaagattatcccacatagctttgggagccataaatgtcgtgaatttgcgttatcaaaaagtgttcttaaagccttatttcccggtaaacgaaaggattatcttaaacgtacagatcgctatacctatttgacgaatatttttgataaacgtaagaaacctgaaacactgtatgaattgatgttaaaaagctcatacagagtaaagccgcctaagaatgaaacatcgaagcgcgcgattgaaaacccccattttagacagcgtattatcggtgtgtatcaacaactcgaagcattaccgatcaaccttgataaactacaagaatattgtaataaccatcctaccgcaaagaataagagcttttattttaattttatctctcatttgatgaatgtaggcgtcaaaatagttagcaaaactccactaatcgttgagtatcgacaagcgtataaaaccgccaaagtgggtagccgttcttttgaaataggtacagggtttcaatatttacccagcaagatgaaatgggcatgtttagccaacgggtataattatgatattaaaggttgccagttagctatcttagagcaagaattcaagaaatatggcattagtacggattcgctatctgtattaagtgattctaatattaaaaaaatatttaatgttggtaagtgtttcaacaaaattattcgttatggcactatttttagtgcaggtcaggtcagcctatcatctcgctggaatatggtgaaaaagctgaggaagcggaaaaagaattattccgatgattttgtgtcagagatgctggaatattggaaattagaaacaacagagcttcgcgaaagcataaatcaactccttgacgagtatctaaaaacaggaaagaaaaataagtatgggctttctgtcgtgaatgcggttgggcaaccatttaatacgacaaagcgaaaaacaaaaaatggggagtggaagaaatggcgtcgtgatgtgatgcgacgtaagctactcgcgcatatgatacaaggcttagagagcagggcagtttatgattatgtgagctcgcacagcggtgtttgtgcgctagaacatgatggatttgtaagtttgcatgagctgtctgatggtgattggcagcatgagtatttggagattgtgttgaaacatggttgttag

SEQ ID NO: 315178 - DNA, 198 bp, Proteus mirabilis; identical to SEQ ID NO: 293338

SEQ ID NO: 315179 - DNA, 477 bp, Proteus mirabilis
atgtctggaaaaataggtcagagaaagaagatagaacaagaaaataaaaaggaagataattgcaaaagggcaaaaacaagcagagagaatagactgaaaaaattaggcgcaccattcaccattaacatgcatgataaaaataaaacaagattgagagaaatctgtgttcattttggtcatgatgacatgatggaaagaaaaaaagccacaggacgaattttcagccaaacaattatgaatgttatcgattattattatattaccgcagttattgagtctaaaaatgacaatgtaaaactattaataaatattgcgaaatccatgactgaagaaaattatttcattcctccatatatagttgataataattttgataaaagagacattacaacatggacaccgttagatattttatatttgttagatactcagtcagtcattagtaaaataaaaaagttaaacaaattgaaaaaataa

SEQ ID NO: 315180 - DNA, 351 bp, Proteus mirabilis
atgtctatcaaaaataaattgcaaaaaattcgagaagaaaacgaagcgaaaggattaaatgatccgactttatttaaacagcgtttgctcaacggtggttttggattagcaaaaaccttttggctattttggtttttaccgattttattcttaaatatcgttgaattttttatcactacaaagatgacgtttaatcaaatagaagcattgatgattatttggagcatctattgtttttactttattgtgaaaataccgaaccgtcgggcttggtcttacgtggcgttggtcgtgattgttctcaatttattattgggaatactcgcaataatcggaaatcttctggggtaa

SEQ ID NO: 315181 - DNA, 1776 bp, Proteus mirabilis
atgactgtatctgaacagccacaaattaatgacaatatttatccatttcatctcttacaaaaacctaatcttagcgaattttgtgattttcttttatctcaaacatttgacggtgacaatgggcatcattcgtgtaaacctgaaataaaaaatcaggctttaaatgccttagcaaagccgttaggttatcctcaatttagcgttatgatggccaaggcaaaaaaacatcagcaacaacctccatcaaatattgcgatagttgaccatcctagctttttggctttacttccactgcattatgcggaagccatgcaaccgcatattccgaaaattccatttgcaacaccgattcctaagatcgagaaatttttaaaggaactggggtcaaaacaacttcgttttagacttcagaaaaatgccaatgggacgttttcagcgactgtagcggccaaaaatcatgggtggtatcaaggctggaatttgcagttacccaagttagccttaacgtcaagagatgcattttttacggttattttagaatggtatcataccttggtaaatatggggtattacattgattttaaccgaaattttattatagaaaacgctcaattattcaatgtattttgtcctccagatttaattcgaaattgtgtgtcgtatcaacaatattggaattcatcattacctttgaatgccgaaattgaaacgaactttgcgcgtattgaccaaagtcttaacgaacatattcgtcaagtggaaaataccccttataatatagaacgttatggacctatatccctgaaaacgcatattgttcggtttaatcaaaatggattggttatccctaacgcttattttatttcggaaaaacttagaaacctccaactagtagatcaaagaccgattgttttgatggatatttgcaccatcaagtatattgaaaaatataaaaaaattgaagctggctctaatgcagatatgcaggagcgcataaagcaattaagagctctagttgataagggctatcgtttttcttttttactcgtaatactcgaaaaagcaacggattatcaaaattcaatgaattccgatgagttaatagctcgaacgattaaagattatgggctcatcgctgattttattggaaaagaaaatatcattgagtcacctcttgcgattgaaaaaatgatccctgtattaatggatgaaaattacaaaaaagaagaacgcgcggagctttcaatcccaagtagcttaaagttattggaatttttcaatgaactgggggtaactaatactccagccgcttcacaacgatttaaattagcgaaacaagtcgcaatggaaggtaaacggttggggcttacccaaggctatcccacaataatgatttgtatcgcgtcgatttatgagtgtatagatgcacgaaaagtgttgaaaattggagaaaaaaggaaagaagaaaacaaatataatccgagtaacagcttaggtgatattatgtcattttatcgagtggcaaaagccaagagtcaaatcaaaagtgcactaggaaacgttgatattatttttcgaactgaagataaatcccttgaaaatcttcatcaatatataaaagtcacggagattaacagctccaataatatctcggtgttacacagtcaaatttcgtatcccgaaaagctatttccgaagttgtataaaaatgggaaatgtatcaatgagcaagaacgtgatgacctttttgctctactgaattttaaggttaactaa

SEQ ID NO: 315182 - DNA, 825 bp, Proteus mirabilis
atgagagctttcagcgatcttgagaagacgttagttcgcaaaatgatcgagcttgatgataaatcaagctctcttaatgttttgggaaatattataaatccctttgacggtcatatgggtctagccgaacactgttatattgaactaaaaagtgaaaacgatgtatccatccaaattaaaaatcacgccttagaacaaaatggggtcgattggatacggagcattgataacgacatttcaaaaaaactgttgacggttgttgctctttttcaatacctagaagatgagaagcttgcatattttgtaggcgatcttgacctcgaaacccttggggaaaaatggattggtgttgaatatgtgaaatttgaattcctagacgacgacttaaagcctttgattttcaaatattctagaaaaaagatatttgtttcagaaaccctccgattattgggtgcaaatggttttaaaacagacgaagagttgaggcatgaagctgaaatcacctcaatgggcaaacaactccagttcacccgctgggctcttggagttacagttattggtcttattacatccataataattccaactcttacaacctcttctgtcgaagtaaagaatatcgagtttgtaaatagtcggcctgtgttgactgcaatagagaagcaattgcggcaaatgaatgagaacgataactcgaagaatgctgtgattgcgcgtattgaatcggctattctatcgttacaagaatcaattgatagaacgtcgagcatcttgtcagaatcacataacaataaaatgcagccgaccgctgatggtgacaactga

SEQ ID NO: 315183 - DNA, 888 bp, Proteus mirabilis
atggatgcgagatacgaagaaaagactttcgaaagttacttcaacaatgagcttgatagaaaaacatctatttatttcccccttggccaagtgcaagaaggtgttttaggcttggactccgttgctcattctaaaagcaggcaactgtggaaaatgctgggatatccattctggttttttccgcaattttcaggcgctgaattaacagaaatcgctcgtgaaatggagcagtatcttggtcgagaggttaagaacataccgaccatgaaagttaacttgctacttcagtataagcgtccgcagtatataacgaattcaactggctctgagtggtacttatggaaccagaagtatttccgctatgaactgtacgctaagcaacatgccttgctctctcacatagaaacaaaatttggtaacgatgccatagtcctttacgctgccccttctgtcgtagatgttggcgagctagtcaacctaaaaatagctaactcaattattgatcacactaattttagacgcgcaagagaattggatgggcaccacagaaacacctacataaaggcaggaacatactcgcaggcatgtagtgaaccagaaaagattgagaattttaatttaattgaaatgattgaagcaatgcagccgcgccaatcggaagataacgctcaactaatcattaacttttcaagtcagattaattcagccatggaggatgtcgaagggattggttatttgaaaaccgcatttgagaatagaatgaatgaatctagacattacgagcttcaacagttcgaattgttctactcaatgcttactatgtcagtgttcagagaggttactggctgccaatggttgataccattggatggacgaaaaaatgcataa

SEQ ID NO: 315184 - DNA, 162 bp, Proteus mirabilis
atgttgttacttttagtatcatataactcagctaacagttcagtcgtcacaacaggtattccgttatgcataattgctgggatggatttaactgaattgctcatgtcgttaatatttgctaaattagtcatgtcaattattctcgcccaagagtttatttga

SEQ ID NO: 315185 - DNA, 471 bp, Proteus mirabilis
atggcatattctgccgctgctgttgcaaacgccttcattcagagggcgatagatggtgaaataccagacttaaccccaatgaaacttcaaaaactgatgttttacgcccaatcatggtctttgaaaatatacaaagagcctatctttgatgatttttttgctaagtggcaatatggacccgttataccttctatataccatgaagttaaaaagtatggtgcatcgaaaataactagcaaaatatccaatgttgaatttgatggaaatgagctgttttctgttcagcctatgatttctagtgcagacaaaaaaataaatgcacttatagataaaattattgaagtatatggaagtcttagaggcactcagctgtcttacctaactcatcaggaaggtactgcgtgggataaggctaacaaggcaggtattgatgttttatcaaatgatctacttagggagtcaaaaatatag

SEQ ID NO: 315186 - DNA, 441 bp, Proteus mirabilis
gtgactaacagtgtagatgatgtagataacgatagcttgtcattggaagacataaaattagatgattatgtagttggtgatgaggttattgatatacctgacggaacttctcctgtggaactcttgacctcatcaaacaataacgaagaaaatgaaaaaaaacgtcttgaacaggatatagaagacaggaaagccgacagaaatctaagggacaaatttggcgataaggcatacagtgttgtaaggaagacactgtatggttgggctgtactgcttgctgtatatgcattttgtaaattattttttgataaagagttatttagcgataaggtactgatcgcaataactactgccgtaacattaaacacatttgcagcattccttggtgttatccgaggattgttcccttctgttaaaataacaaagcaatctgaaaaataa

SEQ ID NO: 315187 - DNA, 444 bp, Proteus mirabilis
atgcttgaaatatttaattttatcaccgcatatcaaaaacaactgattgcaattattggaattttttttgcgattttattatctagacatattttaaaggttcattcattttttatttgttcacaaagtagtgataatgataaaaccatcataaaaaatccgttatctaagtcctctaaagataagctcatatataacttactgaaagaaaggatatccttagaatgcaccgatgatacttattattgttttgacatggattcaaattataagtcatacaaatacaacaaactcataccagaagtaatatctcaattatctcctgataaattaatagaatttagaacgatgtgggatcatttcaggacgctaaaattgagacgctcctccgcaaaagatttaataccgattattgataacattatagactttctgaataggtaa

SEQ ID NO: 315188 - DNA, 723 bp, Proteus mirabilis
atgtcaaaatatattgcgcctgaacttgaaaaagaggcatttaattgcccaaattgtggggctttttctcatatgaaatgggaagtgataacatcaaaattactttcaaacgatgcacttggagtcgctaactgcgacgcctgcaataagcaaagcatttggtatattgccgatggtcgaataagtggagtagcaaacctctttaaagaaaggccagcatctaatgattcacctttgcataaagtatctctttttgcgtctctagctagaatgatacaccctgaacaaacaaacattccctttccatctaaagacatgcctgatgatgttaaacaagactatatagaagccgctagcatctatcaaaaatcacctcgaggggcggcggctctcctgcgtcttgggcttcaaaagttgtgcaaacatcttggtgctgaagggaaaaacataaatacagatataaatacactagcccaagatgacaaaatttcaaaacaactaatcaaagcggccgacatagtgagaataactggtaataacgcagtccaccctggaactattaatgatgaagattttgataatatagctataaagctcttcgacttgcttaatattatagttcgccaaggaataaccgaaccaaaagaagttgatgagctatttaataaaatgcctgaaggacctagacaagcggctgaaagtagaggtaagcctaaagcctaa

SEQ ID NO: 315189 - DNA, 534 bp, Proteus mirabilis
atgtttgagttatcgaatattcaagtcgatcagggtggacgaactattctttcgatcccctctctcgctatttctaattgtggattaacgattgtgctcggtcacaatggttcaggaaaatcaacgctagtcagcttattatctgggcaacacaccccagatagcggaaacattacgttaaataatcgcaagataagccactataagcctcgagaactagcgaaacaaattgcttttttaccacaaaaattacccgcttcggcaggtttaactgtgagagaattagtccgcttggggcgtttcccttggcgaggtacattgagccgttggaataatattgatgatgagataatcacaaattcaatgcaaaaagcaggtgtattaccttttgccgaaacattagctgatgatctatcaggtggtgaacgtcaacgtgcttgggttgcaatgttattagcacagcaatcaccaattcttattttagatgaacctacctcagcattagatatacaacatcaatatcaatttcactag

SEQ ID NO: 315190 - DNA, 438 bp, Proteus mirabilis
gtgatctcaaaaggtgttgagttaagtagtgaattgcaattaacagaacgtttaatgttaaaagcaaattacacttatacagatatgcaaacagatgatactggtaaccaaggtaaacgacaggcagcacttatccctaaaaatatggcttcagcttggggaagctataccatccctattacagcgacacaagatcttaccttaggaacgggtgttcgctatttaggtaaatcaaaagataatcccaaaagcagtaatttaaccgtaccaagtgcaacattatgggatatggctgccacctataacctgaataaacaatggcaattacagttaaatatcaacaatattcttgataaagagtatatctcaggttgcgattactattgttattatggtcaatctcgttcggtattaattaatgctaaataccgttggtaa

SEQ ID NO: 315191 - DNA, 1347 bp, Proteus mirabilis
ttgcaagaaacaccaaaatcggtttctgtggtttctcagcaagatctagaaacacatgtgccacaaaaactagatgaagcattacgttatacttctggtgtcgcctcccagccttatggtgctgataacgataccgattggttgcgtgtgcgcggttttgaagctgcgacttatttagataacagtcgactttttcgtgatggatactatacgtggttattggaaccttatggatttgaaaaaattgaagtggtaaaaggatcatccgcagtactatttggtgaatcaacaccgggtggcgccattaatgtggtacagaaaaaacccagttttacccctaagaatgaagtatttctggaggctggtaataacgatcagcggggtttaggttttgatgtttcaactgcgagtgatgataatcatgtacgttatcgccttgttggtttaatgaaaaaagcggatggcgaacttgatgggacggataatcaacgtatctatcttgctcctagcatggcgataaatctatctgatgacaccatgttaacattgatggcaacttaccttcatgatgatggcacgccgacaaatccattcttccctgctgctggcacattaacttcttcaccttttggtaaaattaagccctctaccaatttgggggaaccggattacgataaatataaacgtacacaaatttcagtaggctatttactcgatcataatatcaatgatgtttggcgtttttctcaacgtttaaattatggttataacgatctctttttacgtagtgtttacgcgtttcctagcgcaaaacctgataatgcgagtgaatatggacgaggaattgtattccgtgatggtaaaaatcaaagcataacatttgataataatgtcgttggtgaatgggataccgataattttgagcatacgttattagccggcattgaagttcaatatcaccaaactaaaggtgaagagcaagacaactataactttggttcaattaacccttggcatcctgtctatggtaaatatatcccccttgatccggctaataacatcaatcgtaccatcgataagacacaatacagtctttattctcaatatcagactaaatttgatagccgttggattggtgtcgttggtgttcgccaagactgggtaaaaacagagaataaaacacatcagcagaataatgataaatcacgtactgataacgaatttagtcttaatgctggattaatgtatttagcggataatgggctgtctccttatattagttactctgaatcatttgaggtaatgagtatatcgatcctgcaacgaatgacctttataagccactaa

SEQ ID NO: 315192 - DNA, 321 bp, Proteus mirabilis
atgaaacggatctgggatattgatgaactggctgaacactggagtctgaggtttgacgaaacccgactgctaaaaaccaagcccgccagaaaccacctgccatttgctgttcagcttaagttttatcagaacacaggacgtttcccttcgacaattaatgagatcccggaaacaccactccattatttagccgatcagctggaggcggatgtttccgggattcaggattatgagtggtcagggcgaaccggggggcccggcatcgcagagagatccttaacttccagggcatccgccgggtatcataatccctctttctaa

SEQ ID NO: 315193 - DNA, 867 bp, Proteus mirabilis
atgattggaccattatcacaaataaatgctctcggtggtttatcaaaaaatgagaccagttatttaatcagtaatgaagaacttcaagatatcatagtacagttggaaactgatatagcggatggctcttggccccataaagattattcaaatatggatgtaaaaatcatgcccgcattggtaatgcaagcaaacaataaattccctgaaatgaatcttaattttgtcaagtcgccacaggacctttctgtagaaataaaaaacacaatagaacatggagttgaatcttcccgattcataattaatatgggggaaggtggaatacattttagtgtaattgattacaaaaatataaatggaaaaacatctctgatattgtttgaaccagcaaactttaacagtatggggccagcgatgctggcatttaggacaaaaatggccatcgagcgttatcaattacctgattgccatttctccatggtggaaatggatattcagcgaagctcatctgaatgtggtattttcagtctggcgctggcaaaaaaactttacatagagaggagtagcctgttaaaaatacatgaagataatatcaagggtacattaagtgatagtgaaatgcctttaccccacgacaaactggacccgtatctcccggtaaccttttacaaacatactcagggtaaaagacgccttaatgaatatttaaatactaaccctcagggagttggtactgttattaacaaaaaaaatgaaactatccttaacaggtttgataataatcaaacttttatagacggaaagaacttgtcagtttcggcacataaaaagagaataactgaatataaaacacttctcaaatcataa

SEQ ID NO: 315194 - DNA, 309 bp, Proteus mirabilis
ttggccgcttttcctaacattaaagaaacagagcaatatttttctgctgataattgtacagctcgctcaacaattttatctgtcaacgctttaccggaaacaatgaaatgtaaattaatatcagtaaataaacgaggtgcctcttcacgacgttttgatgttaatttcacttcacaatcagtgacttggtggcgacctttacgtaagatactcaccacatcaatagcactacaaccacccgcagcaattaataccatttccatcggactaggcgctttatcacctgaattaccatccatcataacttga

SEQ ID NO: 315195 - DNA, 1014 bp, Proteus mirabilis
atgtcctcattgtcccctgccagcgaagttattcttcgtcatctagatcatttcgcagacaggcacgtactcatagcaggtgatcttcaagacacgctagcattacaaattcaggccaaaagtgttagagcctatacaaatcaatatcaccagtggctaccgctactcaaatccatgggtgataatgcattttttggtttagcggcagatcaatcattcgtaaaatattgcgacactttgatttatttttggcctaaaaataagaatgaagcaacttttcagttacgtagcttatgtgcaagtttatctgtcgatactgaaatcttcatcgtcggcgaaaaccgtagtggtgtaaaaagtgctacggaattaatgaatggtatagcaaagctaaaaaaaatagattcagcacgtcgttgtagcctcttttttggttcactaacctatcaaacactctttgatcgaaataactggtggcaaacttatcgttatgacgatttaacggtgatggcattacccggtgtttttagtcaaaccgcattggatgaaggcagccgattattactctctacatttgatgatgcaatggtaggtgacttactggatatggcctgtggttgtggggtgattgccacggtattaggcaagaaaaacccgatgttaaaactcacactctgtgacgtcaatgcagccgctatttcatccagtattgccacgttaaatgttaatgaattagaaggacgggttattgcaagcaatgtctattctgcggtagaagaaacttatgattggatagtctctaatcctcctttccatgatggcttaggtaccagctatcaagctgcagaagacattattcgtctcgcgcctaactttttgaaaaaaggcggtaaactgcgtattgttgccaatgctttcttaccttatcaagatattcttgatcacgtgtttggctctcatgaagtgcttgcatcaacaggtaaattcaaagtttaccaagcaaccaagaaatag

SEQ ID NO: 315196 - DNA, 315 bp, Proteus mirabilis
atggaactagatttagtcagcgttatcaaactagctctcgagggtaaggataaagacttaaggctttacttagccaaacatattcgctcactcagaaagagtaaccctttactagctaaacaaattgaagagttactaaaaactcagccagttaggtctcatcaaataatgagaaaagagacccactcattcgatcttccgataaatgaaactgatgataaacccgccattcctttgaatctccttaaagaacaggtagacatcaacaatcgcgacgaaccccttttacaagcttctcgaaagaaaaaaaattga

SEQ ID NO: 315197 - DNA, 339 bp, Proteus mirabilis
  misc_feature (281)..(290): n is a, c, g, or t
atgaagtacttgcaactcacaaaaacacagtttcgcttaagtgatacactctgcttgcatatcgatgatttaactatcaatgaaggagaaagttgggcattcgttggtagcaatggtagtggtaaaacggcgctcgctaatacattatgccaagaggggattttattatcgggtgagcttattaataggtttactcgtccgattaatctctcttttgaaaaattacaaaaaatgatagaggaagagtggctgcgtaacaatacagacttattaagtgaagnnnnnnnnnnatacgggattaaccgtggctcaggtgatccaaatgcaggtaaaagataa

SEQ ID NO: 315198 - DNA, 492 bp, Proteus mirabilis
atgttctatcaagagcaccgagaaaaagttgaggaaaaagtaagtaacactcttcacttcataattgatgaagctcataatattctttcccaacaatcgagccgagaacatgaggtttggaaagattatagacttgaaatgtttgaggaaattattaaagaaggccgtaaatttggcatgtttttaactcttgctagccaaagaccagcagatatctcaccaacgataatgtctcaacttcataatttcttcattcataggctagtgaatgacaaagacttgttccttattgataacactattagcacattagatcgtatgtcaaaaagcttgatacctaacctttcaaaaggggcgtgtattatcacaggtacagcttttgacttgccaatagtaatgcaaattgactacataaaagagaaaaaaaatcgacctgcaagcgatgatgttgatttagcaaaactatgggaactggaaaaagaagatgagtaa

SEQ ID NO: 315199 - DNA, 417 bp, Proteus mirabilis
atgtccccaaaagcaaaatcatggctttggatgctggcggttattatttcagaaacctcagcaacctcgaccttaaaaatgtttgataatagtgaaggaataacaaagacattattattaggattaattattgttctttatattgtttgttattattcattatctcgtgcagttaaaaatattccagtaggcttagcttatgccacctggtccggaaccggtatcttagttgtatctactttaggtatggcattttacggtcaacatcctgatacggctgctattattggtatggcagttattgccagcgggatcgtcattatgaatctattttcgaaaatgggttccgaagaagagtcagaagaaacgacggagttatcaaatataaaacagactgtatcgtcagtgaataaataa

SEQ ID NO: 315200 - DNA, 225 bp, Proteus mirabilis
  misc_feature (9)..(18): n is a, c, g, or t
gtggtggtnnnnnnnnnnggtttactgtatgtgtttgccgatcaagatgctggctttgaagaaagtgaaacaatgaaactgatttctctgcctcatgttgaagagttaattgcgccaattttctatactgtaccattacagttactttcttatcatgtggcgttaattaaagggactgatgtcgatcagcctcgtaacttggctaaatcagtgactgttgagtaa

SEQ ID NO: 315201 - DNA, 795 bp, Proteus mirabilis
gtgctttatactattggtatgcctcgggtattaaccctttctattacagagcagttgggagatattattcatcatcgtcatgtcaatgaagacgatccagtaccagcccttccttttgaaaaagatatgaataatatcgcttttataagtgatcatgattggttagggtattctatagaaattgcaataacatatatagactggaaacatcaaggtatggcgagtaaagctattgatcaattgaaaacaaatttcaatataaaaagtgatacatttattcaccatggtgatgctgtgcatttttacaaaccaacatcaaaaacatctatgtataaatacgtgttggcaagtgttggatatgcaccaagtcttttggtaaatatggaaatagataaaaaacgctatctcgtctctgatactgatgaaaagctctatctcgtttctgaattactacccgatcatcggcttaaacaagaattttttgaactatataagttacccaaaacagcatcacctggtgtaactggtggtggagaccactcaagtcgtaaatatacaaactttattatttctaaaataattagtttagttaaatataacggattaacagaatctgcatatgatattagagcagaattggtcaatcaaaaaagactatcacaagccaaatacgatgaaagcagttatttgctagacttagatcttatggttgcagatacattattacccacattacttatgccagaaggtataacggcgctgaaaaggttcaaatatgctaatgacaatgattaa

SEQ ID NO: 315202 - DNA, 663 bp, Proteus mirabilis; identical to SEQ ID NO: 304087

SEQ ID NO: 315203 - DNA, 333 bp, Proteus mirabilis
atgagtgcatttgaaagggatgctattattcaaaatattattcaggaattaagatatcaatatcaaatttgctcaacgagtcatattaaattaatggcttttgagcaagccgttagttccgctaagttacaattaaatgcaacacgaaaaagctatgttggtggtcagcgaacgatggttgatgtgcttaatgcggaagagcttttatatagagcgcagcaagatttaatcaaagccaaatatgattatattcaagcttgggcattattacatcaatataccaatacactagacattgaaaaaataaaaattattgaaaactattttcagtag

SEQ ID NO: 315204 - DNA, 2268 bp, Proteus mirabilis
gtgaaggtaggaggtcgggttttatcagttaatggtagcactattactgttgatgcgcctatagattggaaatatgacgataaaggcactttctcatttttaggggcatcaggtgggttcgagaaagtagatattcaatctatcgatggtgatattgtcactttgcgggagataccgaatggattgaaacagtatggtgtattttccatttcaaaaagcacattaactacaagattatttcgtgtaatttccattgctgaggacaatgaaggaaattacctatacaactgcattcagcatgaacctcaaaaggaaagcattgttgataatggtgttgattttactggaaaccctccaacgcaaaatgttattcgaatccctaacatagagcgactttccattgcctatgtcaatgacagctcacaagttcaggctagggcaatgtggatgacaacaaccatcaacagaaatatttcatttaatgtcactctttataaagacagcaaggttgtatctactggtaataccacggatttagattactactttaatgggcttgaagctggtgactatcttgtcggtgtgagaggcagagatactaatgggatgcttggtaatgaatcaaaagtccagatggtcattggtacgccaagtgcacctagctcaataattgttgagtctggtttttttgaaataaaactaatccctcatatcgccgtgccacacattctaaataccgagtttgagttctggttttctggcgaaagaagaatagacaatgttaatgaaatagagtcaaaggctgatttcttaggtcgcgctaagttttggacaaaagggcaattaaaggcggggcgcgattactggttttatgtaagaagcgtaaatgaatatggaaagtctcattttgtggaagcaaaggggcaagctgatgataacacggaggctattctcgatgaactagacggtcatttcatgacaactgacgcgggtaagcaactcagtgagcgattagattggaatgctgagacagcgattattcttggtaatgctgactctcagctatcacgcagtttgttagtaaaacacggtcaatcacaggctggtattcgcgagctatggcaagttcgtgcaacggataacgaagcctgggcacaggaagttaaagaaatttactccgcggttggtgataacacatctgcaattaaagaaactcaaacctcaatcactaaactcgatgaggcgttcggtcagcgttttaccgcaatccgaactgacatggataaggctcaagctgatattctttcaaactcccaagccatatctaacacaaataaggcttttgctgaaaacaaaactcaagttcaggctaagtttgatgagcaagagggcatgatacaggagaagatgcaggctacgtttgagcaatcaggcgacggtgttgtgacccactcgattaatatcaccattaaacacaatggcgcgagttataacgcagcagggcaagtaattagtgctcaggttaagaacgggaaactggagtcctatatcggttacaacgcgaataactttgcttggtataaccctgtaaatggcaagatggaattattcatgtatgccaaaaacgggcagttctttatcaaagaagcgtttttagataaagcgaatgtgcgtgaaatggtgttatctgaggctattaaatccaagaattacgaattaggtaaagctgggtttatcattgatgcaaatactggtaacgccgaatttaataatgcgacatttagaggaactatcgacggagctgatggtaatttcaagggcacagtttacgtcgaaaagctacttggtgacgttaattccagcctctactttgatggggttgagaattcaatggttacagggggaaataattatattgatgccagcgtatcagttatttatgcaggcggtatgccgtatgatgtttttattgccttaccatccttatccattgtatctaaatccagccgattcataacagagtctagactacatataacaattgctgaagaaaataaaaccattgaatattacgatccgtcaaatcaaacaacaaaagaatttacaaataacggttcatttgggtttgttattaaggcaggtgagcgtaataaaaaaataacaattacagcaacaactagaggtgtgggtgagattacagccaaattaaaaggatttttaataacagcaggaaagctagcgtcgacatcattctctaaagaatcttaa

SEQ ID NO: 315205 - DNA, 804 bp, Proteus mirabilis
atgaatggattaattgttattgatggttttcaggttcgtagagatgtagccggtcgctattgtttaaatgatttacatcgagtgtcaggtggtgaaaaacgacaccaaccatcgaactggagttcattggctcaaacgaaagagttaattgatgaaatttcgaccgctcctgagatcacaggagcgcctattgccactgtcgctggtggatataaccaagggacgtatgtttgcaaagaattagtgtatgcctatgcaatgtggatcagtgcttcttttcatttgaaagtgatccgcacctttgatgctttagtgtcacaacagcaccaggataaactcagtgataaggttcaagcgggcgtgatactactggaatcgatgtctaaaagtttaaacttctcgaattcatcaaaattaggggcttatcaaaagttacaagcaatggcggggttacctgagttagcccctgtttatgcgattgatgcgccaagtggatctatggatggctccagtcgtcctactgtggctttatcaacactgattaaaaaacacaatttacccatttcagcacctcaggcatttaaacgtttagccgaactcggaattgttgagcgtttatcacgtccaagtacgaaaactgccagcaaagtaaaagagttttggtcagtgactgcacgaggttgtcagtttgggaagaatatgacgagccctaataatcctcgtgaaacccaaccgcatttctttgagagtaaaacggatgagttgatccgtatggtgatgttgaataaacaggtgagcgcatga

SEQ ID NO: 315206 - DNA, 279 bp, Proteus mirabilis; identical to SEQ ID NO: 306370

SEQ ID NO: 315207 - DNA, 348 bp, Proteus mirabilis
  misc_feature (104)..(113): n is a, c, g, or t
ttgggtcaattccgtgtcgctgaattcactaaaaaaggtgatgaaacagtaatatcgcagttatttaatttaatgctaaaaggaatacgtcctgtttcatcacnnnnnnnnnntgatggtgatgcaactgcattcgcattacaaggcagtggcgcagcaaccaatgtagcgttaaaaattaccgattcaagcagcaaaaatgttgttccaggacaaccttcttcaactcaaaaattaatcgaaggtgaaaaccaattaaattataacgcttctcttatttccactgatgatacagtgaaggcaggtagcgcaaacgttacaactaactttatggtgacttactcttaa

SEQ ID NO: 315208 - DNA, 306 bp, Proteus mirabilis; identical to SEQ ID NO: 306412

SEQ ID NO: 315209 - DNA, 2418 bp, Proteus mirabilis; identical to SEQ ID NO: 311265

SEQ ID NO: 315210 - DNA, 531 bp, Proteus mirabilis
atggctaataaaatagaacatctcgacaccttagcatcagaaatagaaaaacaggctggtgggttcagcaatatcgcaaccttaacacattgcatgacccgtattcgtttgatcttaaaagatagttcgctatttaataccgaagcattaaaacaagtcgaaggtgtcaaaggcgtggtatttaatggcgagcaacatcaagtcatagtaggaatgggaacggccgccaaagtttattcaatcatgaataaacgtatgcaaaaaaacacagataatagcgaagaaacccctgcgtcaacaccagtgaaaaaagggttttctattcgtcttatgctaaatacattggcggctatttttgttcctactatcccagcattaattggctgtggtttaattatggggctaattaatattatccgtttagtggctcccggattagttgatcagtttcctgaactctttaagctatttaaactgatcggaagcaccgtatttgcttatctctctattatgataggtatatacggctaa

SEQ ID NO: 315211 - DNA, 744 bp, Proteus mirabilis
atgaaaataataaaatataaactattatctatttttatattattttttaatttttatagtccatgggctaggccggataataatacctttgatttttcgctacagaggatgacttatattgaaggcagtaaaagtatttcactaggactgcgcaataatgaaaatcaaccttatctcgtgcaagccaatatgcggtggttagatgagtctaccggattaaatttattaaataaaaaagaaaaaacaccttttttattaaccccattattacaaaaaatagcacccaaagaatattatgaatgggtaataaaatttgtcggctcagaaacagcattaccaacggataaagaaagtgtatatatagcacaatttaggttgatcccctcaaccacagaaaatcaatcagatatacaaatgacatttattcgcgcacttaattttaaaatttattaccgccccaaggctctggaaaatataaaaattaaagatgctgaaaaaaaactctcatttaccatagagggggattatttagtcgcccacaataattcacctatttatctttcatttaatacgattaaggtcaatagtaaagaaattgaattacaagaactatctaaaatagttccgccttttggaatacaaaaatatatcttaaacaagatagaaaatattacgtctattcattggcaggtattggatgaattaatgtttcctttagaggaaagaacaacatcatttcaataa

SEQ ID NO: 315212 - DNA, 519 bp, Proteus mirabilis; identical to SEQ ID NO: 311279

SEQ ID NO: 315213 - DNA, 543 bp, Proteus mirabilis
atgtccgataaaataaaacgacgcgttgcccacggggtacttactgggggacttagtatcacgctactgcttacgggctgtgtcggggcttttagtctggcacccaaacctcaaccccttgcagccggtattcaagggtttaaccacacccaatacagtattaccggttttacgattaacgaaggctacggcagtatcgggggcaccgtctgttgtgtactgcttcccgaacaatggcggccggatttagtcgcccatatcgaatggaaaaaagtcgatattagtaaacttccccctccgcctaaacttactcacgcagaagccttcaagaaatggaagcaaatcgtagacaacaacacctcgcgccatgaagcttgggtaccgatcccgcaatatgatgaagaagtttgcggtgttgatgtccattttctgccttgtaatgaagtgaaaatcaccacctcttgttatagctacggtgatcctgaatacccgattaatgaaccgcataatatgaaggagccggctgtatgtccgataaaataa

SEQ ID NO: 315214 - DNA, 837 bp, Proteus mirabilis
ttgactctttctattccatttgattggaaagacaaccgtacttcggtagcaataaattatagccaatcacgaaacagtcaatcttcaacgctatctattactggctctagtggagatcaaagtgatttttcttggtcattatatggtggttatgatcaccatcgttatggtaaggaacatttatcgacaaactttggtgctggctttcaacaaaatactcgcttgggaacactgagagcaggttttgatcagggtaaaaattatcgtcaattatccctaggtacgtcaggaaccttagttttgcattctggtgggataactttaggcccttacactagtgatacctttgccttaattcatgctgatggggcgcaaggtgctgttgtacaaaatgggcaaggagccgtcatcgatcattttggttatgccattttgcccactttatcaccataccgtcgcaataatatctcccttgatacccgccatatgaaccgtgataccgaattgtcagggggaagccagcaagttgttccatattcaggtgcagtggctaaagtcaattttgcaacaattacaggtaaggcggtactaatagacgtgaaaaagaaagatggcagtataccaccaatgggcgctgaagtgctcagtgatgaaggggcggtaataggaatggtcggacaaggagggcaagtttatgcccgaattaatcataattcaggaagactacttattcgttggggaaaaagtgttgatcaatattgtcgagttccttaccagattgatttacattcatctaaaaaggtgatttatctaacgacaatttgtgaggataaataa

SEQ ID NO: 315215 - DNA, 786 bp, Proteus mirabilis
atgctaattactatttcaccagctaaaacactggatttcgaatcgcctttagcaacaacgcagttcacccagcctgaattgctaaaatattcccaacaacttattacagaatgtcgaaaactgtcgtccagtgatatcgcaagcttaatgaaaattagtgataaattggcaggactaaatgcggctcgctttggtgaatggcaacctgactttacacccgataatgcgcgacaagccattttagcgttcaaaggtgatgtttataccggaatgcaagccgctgaacttttcacagatgacgactttcaatttgcacaacagcatttgcgtatcctttccggtttatatggcgtattgcgcccactcgatttaatgcaaccttaccgcttagagatgggcataaaactgaacaataaaaaaggcagtgatctatatcagttttgggataacataattactgaaacgttaaataacgcccttgaagctcaaggggataatatcttggttaatttagcctctgatgaatattttaaatcagtcaatccaaaaaaactcaatgctgaaattattaaacctgtttttcttgatgagaaaaatggcaaatataaagtgattagtttttatgctaaaaaagcaagaggcttaatgagccgttttattattcaagaaagattaagtgataaggcacaacttaaagaatttaatctagagggttatcaatttaatgccgccgagtctgaaggcaatacccttgtctttaaacgtgcagaacacctagcaaaataa

SEQ ID NO: 315216 - DNA, 357 bp, Proteus mirabilis
atgagtattagtcgtcgttcttttattaaagggatgggtataggatgtgttggttgtacggtgggaagtttaccaccaggggccctcgcacttaatccagtaacatctcttaagggtcagtctaaattaacaccaagtttgtgtgagatgtgttcttaccgttgtcctatagaagctcaggttgttaataacaaaactgtctttatccaaggtaaccgaaattcaccacatcaaaaaactcgagtctgcgcgagaggaggcagtggtgttagccttatttatgatccgaaacgcattgtaaagcccatgaaacgcaaaggccctagaggggccggagaatgggaagttattagctga

SEQ ID NO: 315217 - DNA, 228 bp, Proteus mirabilis; identical to SEQ ID NO: 308442

SEQ ID NO: 315218 - DNA, 345 bp, Proteus mirabilis
atgatattaattatttattttataatcattttatttatcggtgtatggatatggaatcgtaaaaataaattcgcactaaatgaagaaagtctacataaacaatggcttttttggcttgctattttatttcctttattctctagcctgtattttatgttaacgctaggatttggatatccacccaacattgatattgatggatttaataactttttaaacatacataagttttcactaggcattttaactttatcaccaatattgggtgcttttgttgttagtgcacatagatcatatcctgtctcttatacacatctgacgctgccgacgactccttacgtgtag

SEQ ID NO: 315219 - DNA, 429 bp, Proteus mirabilis
ttggttaaatatttacaaatcacccaaataattgggcaaaatcttaacaaatcatctgctttttgtattaatgtttataaaataattggcacgtttatttatttattaaatattgatttaaaaaataaattaataacggaagattgtagctgtgaggatatattagacttatttgacatcgacatggctaattatcttgataattttagaaataaaacaggttattctgttatagacacaatacttataactcttttagcacccactaaaaattatttagactttgagaaaaaatataccaaagaaataactatcctaaaagacaagtggaagttagctgaggatggctacactcaaaattattctggagatgatattaattctttcaatcatataaaaaatactataaatactctgatgttaatttaa

SEQ ID NO: 315220 - DNA, 252 bp, Proteus mirabilis
gtggctatttatcgacgtataggattgcaagtaattagcagtcttttgtcacttatttctagtacagcattggctttcgatcctaaagttattgagcatgagggaagtacttatctagtgggtagtgttatctcaactccttgttctattgtaatgtcaaatcgttatcaaacggttgatttttcttctttaactttagctatgttatcaagcaaagaaaaacgcgaacagcagcatttacacgtcaattga

SEQ ID NO: 315221 - DNA, 750 bp, Proteus mirabilis
atgctaatgacaatgattaaatcacttatttttatcccttatctattgttaggtggttgtagtgggcttatcaatatatatcttgataataaatttcccgtcaatatgaataatgatggcaataaaatcacggtttattcaactatttcacttgaaacagtagtggaagttattggtacttatacgtcaaataagtgccaacgttctcattttagtgctgattataccgaagtcacttattcctctttaacacaacaagtggaagcagaacgtaaaatagcagaggataataaaaacgcgacctataccgtgcctatcgatgggggaggatggtgtaattggaagctagtagaaataaaactagcgccagtctctaatattcataagatatatacgcgaattagtgaaattattccaattaccgatgataagcattcaaaaatagagctgtttatcactttagctcctgtcatagtggaaaaatataatggtaaatcaatctattactcatcatcaataatggagggtggacaaaatctatccaataaatcaaatggggaaatctattttaattataaagttgaacctaaactaaccacgattatttcaaaggataataaagctattttccctaacggcaatattaaaacactgagtggatcgacttatagtaaaatgattggttttaatgaaataatcgagaatagtgatgaaaaagcgtttacttcttttgttcggtatattgattga

SEQ ID NO: 315222 - DNA, 282 bp, Proteus mirabilis
atggcaatagttcagttttacatagctaacagtaaagatgaagacccatcagaaattactaataaccaccgatatgaattaccagatgaccataacttcagtgctgatgatgacctagattcatgcattgaagcatgtgcagattattatcatgataactgtgacggatgggaagataaatggccgttgttattcatgttatggattgacgaccaatatcttggcatgtttgaagttgagcgtgagtttgacccaatattttcagcaaataaggtggaatga

SEQ ID NO: 315223 - DNA, 198 bp, Proteus mirabilis
  misc_feature (147)..(156): n is a, c, g, or t
atgatagataaaaaaaaactacatattgctgcaggtgtgatttgtgataagcaaaataatgtatttattacccaacgccctttgacatctcatatgggaggatattgggagtttccaggtggaaaactagaagataaagagacaccnnnnnnnnnncaccagagcaggcattataccgtgagttgcaagaagaaatag

SEQ ID NO: 315224 - DNA, 159 bp, Proteus mirabilis
atgaaaagtcattatttaacattaaaccaagctcattgggataaacaagccgcaatgcaaaatcaatggtctaaacccgtggacgataaagaaattatcgaggcaaaaaaaggaaactggaaagtacatttaacgccgaatcccgttaaaaaggagtga

SEQ ID NO: 315225 - DNA, 228 bp, Proteus mirabilis
atgaatgagttattacatactagaaaaataatgcgctttctattatggggaatgctactttttagcggatatacagtattttttactaaagatgcaacagcagaattagctaatacaaatattgttataaaagcgaacattgtggcaaatacttgtagagtcagcactgattcgctaaataaatttgttgcaaaaaaatacaacagagccagtaaagtttacacttaa

SEQ ID NO: 315226 - DNA, 291 bp, Proteus mirabilis; identical to SEQ ID NO: 303339

SEQ ID NO: 315227 - DNA, 450 bp, Proteus mirabilis
atggaaaaagttgcattagcacaatctccccatgtagccgctattggcagtgaagctggcggatcgctttataatttaacaccacttgctagtaatttagctaatcaacaaattaatgttactcgttttattgtgattgcccgtaaacctattgatgtatcagaacaagtacctgcaaaaaccacctttttaatggcaacggggcaacaagcaggggcattagttgatgctttaattaccttaaaacaatacagcattattatgactaaattagagtctcgcccaataaatggtacaccttgggaagagatgttttatattgatgtacaagctaatttacgggatatcaatatgcaaaaagcattacatgacttatcaaaaacatctcgttcactcaaagtattaggatgctatccttcagaaaatattgtacccgttgaaatacaatag

SEQ ID NO: 315228 - DNA, 1014 bp, Proteus mirabilis
atgaagttaactttttcatggataaaagagagtgaacctcatttagtgactaactttacggagttagaaacggccaagctgcatgtaggggatattattcaggccaaaggtgtcggaatgtgttatatgcctccaaacctttccagtaagaataataaaacaatatttgcaccttttgattgttcggggatttattggaacaacagcaacccaatgccaatgcctgagtctagtacgattgaaaaagcggcagcattattatatttggttgaagagcagctacaccccgtttctaacaaccgtgtaaacccaagcttaggtcaagctattactaaatctggcatgaatcttttggataattttgatggcattatcttgaaaacacaagatttatgtccgagagaaaatgaatgtattcggcttaaaatggccttggtaaacctaagtaatgtcaatgattggccatcattagttcaacgtgcagaaagtggcaaattaacaggaaccaatgttttattacgtgctgttagtgctgaggccttggaaaagctcgttgacaccaccacatcatcttttatctaccgagaaatagataaggccgcaatactgttaaatagtccaccaccgggtggtgtgcttttaatcagtgatgaaagaaaacagctcgttgattatgcttcaaataccaattctgtatttgaacctacaccattagagcaatggcgagaattacagcgattatctgatattttattacacacaccttttaatactggaggtgtaataacggggatggtaattgatgcgaatggcacgttacaaatctttttgcatagcatgcctgactcaatgaccctgttatattatatcggtaatacgttattattattcttcgctattggatttttgatcctgaatttattttttatcatccggcgccggcgacaaaataatcaacgcatgcataaaatcagtcaatattacgagcactgtttttatcgccctcctcagtaa

SEQ ID NO: 315229 - DNA, 1557 bp, Proteus mirabilis
atgacaagtctacaacaacgtgctgaattacatcgccaaatctggcaaatcgctaataatgtcaggggttctgttgatggatgggattttaaacaatacgttctaggggctcttttttatcgttttatcagtgaaaactttgctaactatattgaagctggtgatgagagcatcaagtatgcagaattagatgacaatattatcacggacgatatcaaagaagatgccgtgagaacgaagggatattttatttacccaagccaactgttttgcaatgtagcagcaacagcaaatactaatgacagactaaacgcagatttaaacagtatttttgtggcaattgaaagctctgcatcaggctacccatctgaacccgatattaaaggcttgtttgctgattttgataccaccagcaaccgattaggtagcacagtaaaagataagaacagccgccttgcagctgtcttaaaaggggtagaaggtctgaagttagggaatttcgatgcacatcaaatagatttattcggtgatgcctatgaatttcttatttctaactatgcagcaaacgcaggtaagtcaggtggtgagttcttcacacctcagcacgtttcaaaactgatagcgcaattggctatgcatggtcaaacacgcgtcaataaaatctatgatccggcttgtggttctggttcactcctccttcaagcaaaaaagcattttgataatcacattatcgaagatggcttttttggtcaggaaattaaccatacgacatttaaccttgctcgtatgaacatgtttctgcacaacatcaactatgacaaatttaatataaaactaggtaacactctactagcacctgagtttaaggatgataagccatttgatgcaattgtttctaatccaccgtattcggtgaaatggattggtagtgatgacccaacactaattaatgatgatcgctttgcacctgcgggagtattagcaccaaaatcaaaagcagattttgcttttgttcttcatgctctaaattatctgtcatctaaaggacgagcagccatcgtctgtttcccagggattttctaccgaggcggcgcagagcaaaaaattcgtcaatacttggttgataataactatgtagaaaccgttatttcattagcgccaaatttgttttttggaaccaccattgccgtaaatattttagtgctatcaaaacataaaaccgatacccatgtgcaatttatcgatgcaagtgagttatttaaaaaagagaccaataacaatatcctaacggatgagcatatcaaaaaaattattcaggtatttgatagtaaagtagatatcgactatttagcaaagtctgtcgagtataaaactatcgcagggaatgattataatttgtctgtcagtagctatgtggaagccaaagatacacgtgaagttatcgatatcactgcacttaatgcggaactaaaaacgaccgttagtaaaatcgatcaattacgcaaagatattgatgcgattgtggcggagattgaaggtagtgaggaacaggaatga

SEQ ID NO: 315230 - DNA, 171 bp, Proteus mirabilis
atgcataatgttacattatcttttaaatattctcatcatataagccagtatatatatggttttttacttttaagtaaaaacaatataataaaactatctaatatagataaagatacaaatatcactggagcgcagcatatattaagagcaaatattgatggtaaaaaataa

SEQ ID NO: 315231 - DNA, 129 bp, Proteus mirabilis
atgatcgcacgtaaactcgatattactgaaagtacggttaaagtacatgtcaaacatctactcaaaaagatgaaattaaaatctcgtgttgaagtcgcggtttgggttcatcaacaacgtgtggattaa

SEQ ID NO: 315232 - DNA, 411 bp, Proteus mirabilis
atgaaaatgcgacgcccacatcttgttccattatcgactcaagtcatcacggcattacgtgaagttcaagctattaccggacgttataaactagtattccccggtagaaatgacattaccaagccaatgagcgaagcgagtgttaatcaggtccttaaacgtattggttatcatggaaaagcaactggacatggttttaggcacacaatgagcactatcttgcatgagaagggattcaatactgcatggattgagcttcaactcgctcatgttgataagaatacgatccgtggtacgtataaccatgctcagtatatggatggacggagccaaatgatgcagtggtatgcggattatattgatgagttggagtgtggggtagggaatgtgattagtttgagttttaagtaa

SEQ ID NO: 315233 - DNA, 123 bp, Proteus mirabilis; identical to SEQ ID NO: 299922

SEQ ID NO: 315234 - DNA, 1398 bp, Proteus mirabilis
atgattcatagattttttcaagagtattttacaatattggattttcttgaaattcctgaaatggaaatgattgctcatgatacgatcataaatatacctagaagaaatttacgagtattgagtgctcaaaaggaaattaaaattgggagttatcgtgcagatgtgttattaaaaactagtattggtgaaataattattgaaatttgcgttacacataaaagtactcgagagaaaattgattattttaaaataaataacttggcagcaattgaatatgattttagtggttataaagataggccaatagaagaagctatagctgcattgaaatataatattttgaaattcgaatgggtcaggtattttaagagtgaatattatatttcaaaagttataaaagaaagatgctatctaaatgagcttgtaaaaagtaaagctgaaaaaatatttgaaaattatgatgatgctaagcaattatttttaccagaattaaaacattgggttgaaatagattatgaaaataaatctcatagattagaaattactctttttaagcgaggtgtttctagatttgagcacgtatatcagtgtttttttgaggattattatgttgttgtatatacaaggaaaagtggttttttaaaagttctatatttgcctagtggttgtgatattcctcttggttttcgtaaagagaaaaatagtgtattagtaaaaacaatttctcatgatccaagaattattgaatcaagctcatggcttcactatgctcctttacaagaaaggttaagtaatgtacatgatgaagtatatgctaaatttagccatgtaaaaaaagttgaatgtactttatcacatttggctgaaagttatttacaatttaataaggataaggcatttggtttgtattataagaaatggcgaaaatggttaattaaaaataatatggtgagaaatgggataggttatagtataaagattcctgatgttttaaaaacgtatagaaatgatgctagtttctggatgttcaattcttggtctatttttgtgttggtgaatttaattcaaataatagaccaatttgaacttggtaatagtatttcttacggtgaaatatttaagggtttaagtgaacgtttttatttaaataatgaatatattgatatcttaaaagaggggttagagtgtgaatacatgtcagaaaataaaaagaagttaattatagttccgcatattattcgctcaatggtgagcagttttattagtcatggatatattcaagttttcgatgattatttagttaaaaatattaatttgttgcctttattagcttgtgaatttcataaggtaaatgaaattaaatttccttcagaaactggcaaatcgatagttagttaa

SEQ ID NO: 315235 - DNA, 132 bp, Proteus mirabilis
atgaaaaatctcacccgttttattgagaataatgagaagaaagaatttatatatgacggtggtatggtgtgtgaattaggtagtcaaaattggaatgtaaatatattagaattaaatggggaagttgtataa

SEQ ID NO: 315236 - DNA, 375 bp, Proteus mirabilis
  misc_feature (313)..(322): n is a, c, g, or t
atgagaattgaatgttatagttggtcagatgttagtgaacaaattctggagcaagcaatagccttacagaattcagcttttgaggatatgaagggtaatttttatcaggttgatataccttacaagttggtactggcaattgatgataatcaggttatcggacatgtagctgtttatttacgagatgtttacctagattcatttcctgaaaccattggtatattgagttgtgtagtggtggctcacaaataccgaggaaagggcgttgcggcatcattaataaaaatggctcatgctatactgaaagagcatnnnnnnnnnntttatttgctgtttctcatgcttattatctctcctctggatatattccgatga

SEQ ID NO: 315237 - DNA, 1365 bp, Proteus mirabilis
atgagtgatcgctattttattgaagctctattacgccctgcggttgaatttaatactgccatcgttacagcgtgtgcaagttatctttgtattaccgcaccttgggctgtagctttagcgccctctgttagttatgtcacggcatcaggatttgctattttatcaataaggcgagttattcaagggagtcgagttttacgttatcgccataatattcgtcgtttaaaacgttatgcgatgtcgagtaacaatatccctgtaagccatcatcaactcttcttaggaaaagggttcttatgggaacaaaaacatacacaacgattactagatacgttacgtcctgaggttgctaaatatattctcccacctaagctgtatcgtgtggcacgtcaatttgaacaacgctatgagtatcatttcccttcactatgttcattattagcatctgattcgatatttaatcctgttcgcccattaccaccggttggcgggaaccctgcaatacatgggattgagttaaaagaggtaaatgtctctataaacttaagtgaacgagtggggcatatgttggtattaggaacaacgcgagtggggaaaacacgttttgctgagttactgatcacccaagatatacagcgaggtaatgtcaccattgttttcgatcccaaaggtgatgctgatttattaaaacgagtgtatgccgaagcgcatcgagctggacgagataatgagttttacgtttttcaccttggatggccagatatcagtgctcgttataatgctgttgggcgttttagtcgaatttcagaagttgcttcacgtatcgcaggtcaattaagccatgaaggaagcagtgccgcatttaaagaatttgcatggcgttttgtgaatattattgccagagcattagttgcgttagggcaacgccccagttttagtatcattcagcgctatgtgaataatatcgaattattatttgaaatctatgctgagtattggctaacaaagcataagcctgaattatggcaactcatcgaaaacctcaccaaaatattagatgaacgtgatattccacgatatatggaaggacgttccttgcgtgttgttgcgattgaacaagtactaaatggtaatgaaggaaaagcgatatttgatccgatattagagagcttacgctcttctgttcgttatgacagaaagtattacgacaaaattgtggcaagtttattaccgttattagaaaagctgacttcaggaaaaatggctgaattaatttctcctgattactcagatatctctgatcctcgtcctatttttgattggttacaggtgatacgcaaaaaagcattgtgtatgtgggattag

SEQ ID NO: 315238 - DNA, 1212 bp, Proteus mirabilis
atgaatagtgattgtcagcgttttttagatttactacagaaaaagaatgctattacagcatttatttttcagcgaaaattcgaaaaataccaatgctttttatcgatgataaagagtattgatgaaatcaagtctcatcataaacctgagcgacgtgcagctaatcttattgatgtacttgggatctatgaaaatgggcatagtgctattctctctgaaatattaaattttaaagatcagggtaagtatatctttctggaatcatttattaatacatttcttgattatgatgttgtttttaatcatgaaacaacatcaattaaagcagaagaagatcgaatagatattttgatacaggatggaaaaaattgcctcattatagaaaataaaatcaatgatgcagtagaccagcaagagcaactgaagcgttatattgataagtgtaaaggtaaaggatacatagatgagaacatacatctactttatctagtgagtatgaacgctgaaaaagacttaaatgcgaccctttcaacctatgctgaaagtttcaaagagaaaaccaaagtggcttcatatcatccaacgctgattgaatggttagagtcatcagtacttcctaatattaagcataaagacaatgatttttactgtttcaatagccagtatattgatcatcttaatggccgtttttgtaaaagaccacgagacgaaaaaatgaataatgaaatcaatgagtttatttatcagcagtttgatcttaaagaaggttgttctgttgaaaatgtggaaaaattagaaagtgaattaaagcaagcaaacgagcttcagtctcgaataaatactattctttcccagcaaaaagaagatatttttaaaaaatggacttctgcgttaagagaagattttccactattgaatgtccaagaaggaaaggaaggtgaattaactaagactggcgttttgatcgaaaatggatcaaatgcactttctattctaattgagaaaactaactcatcggtttattttggtattgggaagcattttactggacaagataagctgaatgaaaatgttatgtcgcttgtaagtccgttaatgggtagttttagacgctctgaatggtggtatggctggaaaaatacaacctatgaaaaagggtatattgatctatgcaaactcataaaagaatatcttgatatggaagtaggttaa

SEQ ID NO: 315239 - DNA, 1194 bp, Proteus mirabilis
atggtgcctaatggttgggaaacaagaaaactatcaactcttggtgatggctcaaaacctgctgtaaaagcgggaccttttggctctgctataaaaaaagaatattacgtctctagtggttacaaggtatacgggcaagagcaagttattgctgatgatgcatttatcggagattactttatcgatgaggaaaaattccaaagtctaaaatcttattctatatccccaggagacattctaattagccttgttggtacggtaggtcgagtcttactcgttcctgaaaatgcagtgcctggaatcattaacccacgtttacttcggctatcattatgtaattcgaaaataaatggagtttacattaagtatttcttagagactgaacatacaaaaaacacacttaatagttgggcgcaaggcggtactatgggtgtattaaatgcagaaatgctcaagtctttaaatgtactagtccctccactcccagaacaacgcaaaatcgccaaaattctctccacttgggataacgcgattgcaacaacagaaaagctcattgcaaccagccagcagcagaaaaaagccttaatgcagcaattgttgacgggtaaaaagcgtttggttaatcctgaaactgggaaggtgtttgagggggaatgggaaaatactcatctttcaaatatcgcttcgattaaaaaaggaaaagccctaagcgctaaaaaccttgtatctggtagttaccctgttattgcaggtggtaaaagtagtccatattcacatgtccattttactcatgaaaatatcattacagtcagtgcaagtggagcttacgctggatatgtgtcataccacccttacaaaatatgggcatctgattgttcagtcgtaacagcaaaacctgccaattatcttgggtttatttttcaatggttacaactaaaccaaatacgcatttactctatgcaaagtggcggagcacaaccgcatatttaccctaaagatcttgaagtaatgaagttgcgagtacctaaaattgaagaacagcaaaaaattgcctcagttctcaccgctgccgataaagaaatcgaattgttggaagccaagcttgcgcactttaagcaagagaaaaaggcgttgatgcagcagttattgacaggtaaacgccgtgtaaaagttactgaaaccgaagccgcttaa

SEQ ID NO: 315240 - DNA, 876 bp, Proteus mirabilis
atggatatcaaagataaattagaaagccttctacttacagagcatcaacaactctctcaagcacaaagagagaaagtaattcactacttggcaaaccagcagcttaatattttgatcgttggtgccacaggtgctggtaaaagctccactatcaatgcattgtttgcgatcgaacaagctaaggttggtgttggtgccgatccgatgacaatggatatcactcgctacgacttaggaaacctagtgctatgggacacgccggggttaggggatggtgtcgaaaaggataagcagcatatccagaaaattatccatcagttacaacaaaaagacggcaacaacgcttttgtcatcgatcttgttttggttatattggatggaagttctagagatatggggacatcatttgaattgatcaacaacgttgtcattcctcatctgggggaacaacctgagaagcgtatcttggttgcaatcaatcaagcggatgtggcatacaagggtgccaatggttggaactttggcactaatacgccaactgaagttggataccgatttttggatgaaaaggttgaaaatgttaagcaacgtatttatgcctcaacccaagtaatggttgagccaatgtatttttctgcgggctaccaagatcaatttggtaaacagtgtccgtttaatttatcgaagctgctttacatgattgtggaaaaagcaccaaacgagaaacgattagcattgcgcaccaatctttcacagaagaaagaaagctggaagagttctgatgggcgtaaagactataacaagagtacaagagaatctttcgatctgggcaaaataataggcggaattgtcggctttttctttgggttgttttaa

SEQ ID NO: 315241 - DNA, 600 bp, Proteus mirabilis
atgacgcattttcttgtactcggtgctactggtgttggtaaatcatcaactatcaatgcacttacccaaaaaacgatggcaacagtggggtatggctcagagccaaaaacacaaaagctgatggggtatggagcgaatggctatgtgttatgggatactccaggcttaggggaaggcgtgaatgaagatattcgtcatatccaacacatcaaatcacttctttcagacagttcagcctatcacattaatcatattctgctgattgttgaagctaacaagcgagatctcggcaccgtgtataaggtgattgaggaaatcgttcaccccaaatactccaaatcactgtcgattgttctgaatcaagccgatcaagccatgaaaggccgtaattgggatcattcacaacatttgccaacaatgcccttgatagaatttcttaacaatcaagcggaaacaattcaagcgcgagtcaaagagaatacaggggcggtgatcaaatgtcctttatactattccgccgccacaggctttggtgtttcagagcttcatcaatatcttaagcagttgagcttagagtataaaaatgcacgatttcgatag

SEQ ID NO: 315242 - DNA, 1107 bp, Proteus mirabilis
atgcacgatttcgataggatagagcagctatttcagcagacgctggctttgacaacgaagcctcaacaagagttaactattttcggcataggaagccgtagctactatgaaaaccctactacagatatccttgcgttctttttagatgacagtgctgcccatggattggatgcgctggttctaactgcattaatggatattcttccagagccttttaacaagctggattgttctttgtctatatcacctgaacgtgaggtcaaaaccaagagagggaaaaggattgatctcttactagaaagtgaagagtgggtgatgctgatagagaacaaggtatttcataccaaagtgaacccgttcagtgattaccagaaccatttgctaaaagataacatcaatcgctataggagtaaggaagcgatatttgtactgttgtctcctgacggtttggtgccagctaagcaacaggatcgctggataggggttagctattcgcagtttatcgaatcgataaagaaggcattagcaaattgcttcctgtctcaacctatgaataagtgggtcatcttattacgtgagtttattcttcatctggagagtgtgatgtcatcgcctaacgtatcaaaagaagcattggacttcgtgcttgataaccttacgcagattaaaaaaatccaagacttaaaaacgaaaacaattaaacaatatcaacaaagccttcatcagcaacttgaagcaatgttagatacaacattgcattcagcgcttgttcattggtatggctatcctgcgattcgttttgcatatactgattggccaacagattcagatgttgttttatttttagatgggcgagaaagtaaatcattttgtatcaattactattcaagtgagataaatgacgattctgcaagaaaattagcggatgaacattttatggaacaagactgccgtcaaccatggaatgaagttcgtgatacgtgtcgctgctataaagctcattttgataacgatggtatcgagcacatgcaagataagctcgcacacaagttacgactgatgaacgactttgaacataacattcgccctaccatagaaaataactaa

SEQ ID NO: 315243 - DNA, 408 bp, Proteus mirabilis
atgagttttctagatcagttagcgttaaataaactaccaaaacctttgtatacgtttgattttacctacaacctaatgcgagcattcatttatcatacagaagaaactattgatgcaagtatagcgacctataagaaaagcggcccttcctctgaaataatagaaatcagccctgaagaagggatttatcagacagactatcattatcacgggttttttgagcatatgggtgatgtgatattggatgatatcgctgaaaactattttcctagtcttcagaggcgttctgcattactcacgctaattgcaacctatgagcatgaactagaaaaattttgtgacttttactctaaaaaaaacaaaacacctgtgaaactaaatgacttgaaaggtagtggtttagggtga

SEQ ID NO: 315244 - DNA, 516 bp, Proteus mirabilis
atgatgccgatagaaaatgatgggatttttgtttccaatgatacaccaattaagatgggcgtaagtccgaatctaacctttgcagacaggaatggaactgttattatcgtgacggatagatcgcctcaacaaaatattaactatgagcagccgcaacaaacagagagcagaataaacgtgggaagaaaagagttttggcttggcataactggagtaatcatcactgtagcgttggctatagttggctcagtgtggtctatagctaaccatgttaacaactccacaaatgaatcaagaagagaagttcagacttctataaatgcaaacaaacaagaagtggttgcattattaaacgccagtgatagtcgcaataatgatagattcaatcgtgtagattctcaatttgacaaagttgacattaaattcgataaacttgaatcaaagattgatgataactttaaagatacaaataaaaacatcaatgaaataaaagatttaattgtaaaatccaagtag

SEQ ID NO: 315245 - DNA, 336 bp, Proteus mirabilis
atgagcaatgaacaagaaaaaaagatcacgtatccacctgggttttatgtcgatgcagaccacacgctaaacatgaaagatttttttaattacctggaagagaaagaggttagcaacaaatgccctgcgtgtgggaaaatgacaatgtctggggtaatagcaccaggtgatggcaagtcattggttataaatgctgtgaacaaggacgcatcgcaaattctagccaatgagtgtattggaaggatatgtctgtcatgcagtcacgttcagtttttctggacgaacacaataaaatcatggttggatcaaaaacaaaaagaaccaaaagaaaaataa

SEQ ID NO: 315246 - DNA, 216 bp, Proteus mirabilis
atgggtgaaataaatactatgcagagacacatagttataagcgttatcgggataagccctaaaggaatgattgaaaactcgaaaattcaagctgctagtgatgactacttccatcctgaaactttgttctctactgatggattaaggctacttcgcgagcaggttaaagctctcggatggacaaagttctatatctgtggatttgaatgtatttaa

SEQ ID NO: 315247 - DNA, 585 bp, Proteus mirabilis
ttgtcagcatcaaaagtcataacacaaaccttggtgggtgggattatttgtattggagttctttattacgctggcttttttggagaaaaaaaagatccatataaggacgtgatagcatcatatccaagccaagagcgagagttcgttaacttgcttacatcatatatagcaaaaaccaaaaaagcagataacgatcttcaaatagcatcactgaagtcagaaagagatagtcgtatatgcgaaattataaaaacaaataagaatgctatcaattggagtggggtaattagagacttgaactcaaaccaagatggtaaaggtgttatttccgtagagatagccaagggggtaactctaaaaacgtggaataacagtttttcagatacaggtgatgaaaccttaatacctcaagaaaccccattgtttaaagaggctctatcattaaaaattggcgacaagataaagttttcaggcgaatttatcaccagaagaaatgaatgctttagagaagtgtcgatgactcaaaatgggggaatgaaagagccagagtttatatttaaattctcgaatctttctgagctgtaa

SEQ ID NO: 315248 - DNA, 1380 bp, Proteus mirabilis
gtgatacagggattagcaggttcaggtaaaactgaactgctcttgcataaattaaaagaaatttactcaaaaaaccctgactctaaaattgcatttacctgttttaataaaattttagcttccacaatgagaaccagaattcctgagtttatgcgagtcgaaaaacagattgagtggggcactaagcttttttgtttcaactcttggggcttgactagagaaccattttctgggatgtacagatatatttgccattattacgatataccattcggaggttttggaaacggagactttgatgctctatgcaagaaagccattctagatataaataacagtgggagaactgatgaaaaagctcttgattacgtatttatcgatgaaagccaagatttcccacaaagcttcattgatctctgtgaaatggttacttctaaaaaattgtatgtagcaggtgacgttttccaaaacatttttatgccaattagcgataacgtcaatcgagctgatatcgttcttaaaaaatgctaccgtactgatcctaagaacttgatgttttctcatgccctaggtatggggctttacgaaaagccagttctacgttggttaaaagagcctgaatgggattcttgtgggtataaatatgaaaaagtaggtgatagagtgcatttgtcaagagatcccttgagacgctttgaagatatacccaaaaaccataaaagcaccgctattcatttgctagaagggacagacaatggtccagataaaatcgttgatataataaaagatatccaggaacgtaatccgtctttagaacaaggagatattgccgttatttttcttgatgcaggtggctatatttatgactacattcatttgctagaattaaaagttaagcaacaatttggttgggattcaaatatatcgcatgaaacaaaatcaaaacaagaaggtaaactttttatttctaatataaataatgcaaaaggtcttgaatttccatttgttatttgttttgccatgaagttggtaaagagggctaactttcgaaatgcactctacactatgatggctaggtcattcttagaaagtcacttagttttgggtgatgataatgaaaatccggcaatccccacaatacttgaaggtttaaattttcttaatgaaaaaaactatataaaagattttattgttctagatgagcctgtttctatttttcaaatggttaaaaactattgtgcagataaaagatctacacctcgtttaattgctaaaataactaatagagttgaaaagataatagcagaagatgacgatgctgatggaaaatacattgaaggcttgattgaaattgaatatgaaaggaataaaaaactatga

SEQ ID NO: 315249 - DNA, 399 bp, Proteus mirabilis
atgagcctttacttttttaataatgttccaacggaatatctcaacaagttttgtgctgtaagagatgcattttccaatctagaaaatcttctggttaccgcagagattataaatacatgccatgattcttggaataaagaaacagaggaatttgatttattaataagcacaggtactcataaacgtatattagtaaaaaaaacagatggtttttttactatgaatttaccttttcaggtaattgaatatgaaagcaatatttgttttaactatgatgcctatgctcttcctgttaatgctgaatttatttcccgttgtagaaatgttattactacttgtgacaatggttctttttcttatgagaagataactttgacagagatattcagcaagctgtaa

SEQ ID NO: 315250 - DNA, 309 bp, Proteus mirabilis; identical to SEQ ID NO: 314798

SEQ ID NO: 315251 - DNA, 252 bp, Proteus mirabilis
atgaagtctaaggctgcgtttgttatgttggcgctactaggtttggttgggtgttctacaaatagatgggatgcctcagcatcaaaagaagtaccgatggaaagaatgtcttgggagtcggatagatataagaatgaagggaaaagtgaagtggtcataaaaagatatgcgggttatgaggggatggggtgttctcaacaaatttattttaatggaatgaaattgtcagaacgagactgtaaaagattttga

SEQ ID NO: 315252 - DNA, 807 bp, Proteus mirabilis
atgatcattaacactgagggggattacgatactgactttatattacaaatcgacaatacattatggttttctgtgataaaaaatcgtcaatttaagcttggctctatcaccgtggatatggcaacttttcaaaaaatcaatgatagccattatatcgataaaaatgctttctacggctcaaaccaccagcagggagtttttaaaattgaaggagttgatcctggtactgtgacaaaatttgacaacatattttcaatatcgggtaatcaagtcttttattataacggtgtattagaacatgctgacgcagcaacatttcgccaacaagaaaattattatctcgataaaaaacatgtctgggagggaacaaaattattagaaggtttcgatccccacagttttgaaattgttgattggcgtttagggttagtgaaagatgctaacaatgttaggatttgttggaaaaatatagagaacgctgatgcgtcaacagtagaactcattgatgtttatcatggggcttattggcgtgataagcagcatgtatggtacttcaatcaacaacttcaaccattaacactacctgatgatggtgaattatatttttatccaaaaagcaatttttgccgtgttgggcaaaacatctggtgtcaggaacatttacttgaaggtgttgatgttgagacctttacagtgattaagcctactattgggcgtgataaaaattattattactacgaagagcatcgatatacacaccaagagtatgtggaagaggatgttgagcgttattacacttttggttaa

SEQ ID NO: 315253 - DNA, 231 bp, Proteus mirabilis
atgggctatatatttctgggaataccactgacaatttttgtgttatttattcttcctatttggttatggttgcactataacagccaaaaagggggaggggaggttcagttaacccaacaagaaatgcagcgactgagcgcgctggtggataaagctcagcaaatgcaggaacgcattaagacattagaagatattcttgatgcagaacatcctaactggaggcaatcataa

SEQ ID NO: 315254 - DNA, 1251 bp, Proteus mirabilis
atggcaaataatacaaatctttctgaaacgttatttaaacctcgtgctaaacatgcggaaacctcaacgttaatacagtacacacaccctaaatctaatattgattcgtactctgtacttaatgggatgagccagcaaaattggtatcgcacaattcaacgtctacagtggatctggcgaggtatttcccccatagagatcgaagaagtattaagtcgcattgctatttttgatgcgccacgcagtgatgataaatttattgatacagtcgttggttatcgacgtggcaactggtcatttgaatggtctcatcaagcaatgatttggcaacaaaaagcgttacgagagacctcagaggaagcagccgctgattgttggttacgagcggcaaacctttatagcattgctgcttatccatttattaatggcgattttcttgctgatcaagcggtagtattggcgatgaaagcttttgaaaatgccatgaaattctcttcatttgaagtaaaaaaactgacgtttaaattaacaggtaaaggaactactagtggatttttacatctacctaaagggtgtaaaggaccttatccaacagtcattttttgtggtggattagatagtttacaaagtgattatgttaacttttttaggcgctacttatcaccaaaaggtatcgcgatgttaaccgtagatatgccatctatcggttattctgttaagcagaaactcagcgaaaatacctgtcaattgcatggcgatattttacagcagttgggagatattccatggattgatcacactcgggtgggcgtaatgggatttcggtttggtgccaatattgcggtgcgtttagcctatctttatccaaaattgattaaaggtgttgtggcattagggccattaattcatgccttttttactcaagcggaattacagaagaaaatccccattatgtatcttgatgtactggcgagccgcttaggattattaaatatagatgaaaacaatctcagactatcgttaagtagttattcactgaaaaaccaagggttgattggtcgtcgtatgccagtgccgatgatgagtgtttattggaaaggggatgaaattagtcctaaagaggattcgcagctcattgctcgctcttctatggatggcgatatagtagaaataaaagaaaaaccactttataaagggcttgaacaggcattaactaaaagcgcagattggatctatgctaaattaatataa

SEQ ID NO: 315255 - DNA, 504 bp, Proteus mirabilis
gtggatgaatacagtgaaccgcgaacacacttatggtcttttgaagtcaaaaaaagaattaatatgagtaatgtcagagaggtgttctttcaaactctatctaactcgtcatgggccaatgttggctatttagttgctgccgaaatcactggggatgagacgcttaaagagctcacaatgcgttgtgccgcccatagtatcgggggtattttgcttgataaggaagagattgcgaatacgcaaattctcattcaagccacagaaaaagaaaatgtggactgggacattatgattgattacattaaactcggttgcccatatcaaaacgcatacattgaacgatttaaccgaacttatcgcgatgatgtactcaattgctacattttcaacaacctgaacgaagtgaagcaaataaccgaagactggattgagctatacaacaacgaacggccgcacgattcactcaatgacatgacgccatttgagtaccgaagtgcggcataa

SEQ ID NO: 315256 - DNA, 321 bp, Proteus mirabilis
atgaataaagctctatttgccggtattattacaatgtctttaatggcaacttccgctttcgcaacaacggacactaaacctgtaacggacactaaacctgtatcgcaatggaagtgtgaagactttttggtcatcgatgacaacttttatccaaccgccattggtgcagcagagattgtgacacaaaaaggaaaagtagaagaccccactttaaatattagtggtatcgaaacggcaactcccttgattgtcgatgcgtgtaaaaaagcccctaaagagtcatttattcaaaaagtcgaagaatatttgaaaaaatggtga

SEQ ID NO: 315257 - DNA, 570 bp, Proteus mirabilis
gtgcgtgatgatggaaaacccgttaaagccttgacatgcagtatgatgacgttgcacatcaaccaaatgcaaggtcaaaaaattcgatgtaaagacgaagtcggcgcggaatacgttgggtttaacggttggccctctcgccaccttatcgccaaaacgtgccaagtaggagagcctaaatgccccgtttatttaacattacggggagatagccccacgcagcgagatgactctgtggaatttgtggcaaaaaccagcccaaaaccgcgtgaatataaatacagcgatattccaacacgaggctgcgaatgggtcgatatctccatcaaattgggctcaggcaaaaatgcacaatgtcaatccatgggaaaaatgacgtttgaaagaaataaagttactgcaccttataccacgaaaacaggacaaagtggctcattaattgtcaccatagaaaaaagaaattcaacagatatgcgctatgtcagagccacacctgatggcaaagagttaatgcaaatctataaagaagggaggtggatatgcaatcaaaccggaggaaaatgctattaa

SEQ ID NO: 315258 - DNA, 825 bp, Proteus mirabilis
atgtctcgtttagcttcccgttttggcaatgcttgctctattcgtcgtgaccgcccgctaactaccgaagagttatttcgcaccgtacccagtgtgttttcagaagaaaaacacaactctcgcagtgaaaaatactgctatatcccaactattaccttattggatagtcttcaaaaagaaggcttctatccgttctttgcttgccagactcgtgtacgtgatgctagtcgccgagagcacaccaagcatatgttaagacttcgacgccatgatcaaattacaggaaatcaagtgcctgaaatcatcttactcaatagccatgatggctcaagtagctatcaaatgttacccggcttctttagagccatttgctgtaatggcctcgtttgcggtgacacgtttggtgaagtgagagtgccgcacaagggcgatgtggtgaataaagtcattgaaggggcttatgaagtattaggcaccttcgatgccatcgcagataaacgcgaagaaatgcaaagcttgatattaccgccacccgcacaacacatctttgctcaatctgctctcacataccgttatggtgaagcgcatcagccgatcaccgaagcgcaagtattacagccacgccgtgtagaagataagaaggacgatctttggacggtgtaccaacgtttgcaagaaaatttaattaaagggggattatcaggcagaaatgcgaaaggtaaacgcgctcgtacgcgttcagtgaacggtattgatggggatattaaattgaataaggcgctgtgggtgatgactgaaaagatgtatgagtatattaacaaatga

SEQ ID NO: 315259 - DNA, 243 bp, Proteus mirabilis
atggtgtgggctggtggtgcattatgtggaacaggacttggctgtattatcggagctcctttaattgcacatggcgctaatggtatttacgagggtatagaaggtttagtagaaggacgagacgatatcgatggccgactaagagatacattattcaattggagtatactcgtttcagctgtgatcattttattattttatttaaaaatgatatgggcattagagtctttaggacggcgttaa

SEQ ID NO: 315260 - DNA, 564 bp, Proteus mirabilis
atggctataggctattttttacgtgttggtgataaaacaacttgcggtagtcagattctgacgggtgataatacttttatatttcatggaagatcggctgcacgtcagggcgttctagttacctgtggaaagcattctgggacatacaacatacttggtggcgttagcaatgtatggggtaatggcagaatgatggcgggaacactggatagctttagctcctgtccatgcaaagcaagactgataaattcgatcactgattgctacagcaaagaagatgaaccgatgtctcgcgcatataaccctgtagctacccaggctcctattcagcaaacaattagccaaccaagtaatcattatgctcctcctattattgccaataacagcaacaaaattaaaattgatgcgcgacacctaattgattgtgctgatgagctttgtgaaaaacacctctattatccagacataaagaatgcattccaaagtcaagtagaagcttttgcttatcttattgttgatcaagttgaatctggccaaaaaagttatgaacaaggttctgcctag

SEQ ID NO: 315261 - DNA, 351 bp, Proteus mirabilis
atggctcttactgatgctaaagtcagggctgccaagcctttggataaatcgtataaattgaccgatggtgatggtatgcacttgatggtacatatcaacggctcaaaatattggcgtttacagtatcgctttggcggtaagcaaaaaatgttggctctgggtgtttaccctgatatttcactcgcagaagccagagagaaaagagatgctgccagaaagttaattgctaatggatttgatcccagcgaaaaacgcaaagaagtgaaagaagagcaacaaaaggaatttaatacctttgagaaggttgctcgtgattggtacgcgaccaataaggcgcggttttttaactaa

SEQ ID NO: 315262 - DNA, 423 bp, Proteus mirabilis
atgcgttttaatgtaaaagagtggaatgctgtttctgagttatttacaggaagtttattattagaaaatggttcatcaattgctatagatcctaattttaattactctaatttgttttccaatgctaagttaccggaaaatgtgaaaagtatttttgattcttttcactctcaagattttgaatatatcttaagaaaatttacccaagctacagtaataaataacatcttcgatattgattgtaatgatattcatcaggctcatagtcaagtaaaaaaaaccttaattaatacagttaaaggtattcacccttgcattgataaagttagagataaaattaataattgtgctagttttattaagcaatttgacacaatattcagtttgaattatgacattatgctttattgggctatcatgtaa

SEQ ID NO: 315263 - DNA, 126 bp, Proteus mirabilis
atgtactattctaataaatggacggctgattgccttgattatgactttatctcagtaaataaaaacccactacgcgccgctatggaagtttttttaatgatgaaggatacggagaataatcaatga

SEQ ID NO: 315264 - DNA, 717 bp, Proteus mirabilis
gtgcttaaatatgcattacaaaaggattcaaacactttaagacatatagactctgtagaaaatggcttaaaatgcaattgtgtatgtgctggctgcggagaccgccttattgccaaaaataatggagttagtggcacaatacatcattttgctcattactctaaaaacgaaaataatatttgtttaatgacccaacttcacatagtagcacaacactttttccttgaatctcagtccctttttatcccccctgtatcctttcaatacaagggacaagtactgaaccaaagtgaagcacttgcaaatgtatataatgcagacttagaaactcgtattgggaaatatgttgcagatgtgtttttggaaaccaatattggcaacatagtaattgaagtttttgtcactcatagaaatcaatcagataaaacaaagtattaccaagaaaataaaattccttctattgagtttgatttaagtacttatcttaatcgtagtattgaagaagctctttttgatttaaaaaacaacaaagtgccttacaagtggctttatgagtggtgccgagatcagcttgtagataaacatgaaatattactagcacaaaaaacgaaaaaattgaaaaaaaacgtattcgtagtgcaaaagacacagcaagaaaattcatcaaaggcaaccatattcttttgccaagccttacccaaaagtttgagtgtataa

SEQ ID NO: 315265 - DNA, 1674 bp, Proteus mirabilis
atgaagaaatcgcttgtcgctgttggtgttattgttgcactaggtgttgtttggaccggtgcgtcatggtacatgggcagtaaaattgaaagccgcttacaggaagaaaccaaacgcactaacgttcaattagcgcaactcgctaaagaaagccaattaggtgcggatattaaacttgaaattcgtgactataagaaaggcgtctttacttctactgctgatcttgcggttgtgatttcagagcatgccaaatcagatgaagataaaaaagtagaagaagtgctctttaagacggatattgaccatgggccattccctctttctgatattgctcaatttaatctagctcctaagttagcagcaatgaataatactttagtgaataatgagaccactaaagatctatttaagttgaccaaagagccatcatttattgatatgcactcttctttatcgtttgatggcagtgtatcgggtaaagttaacataaatcctattaattacagcaaagaaggtagccagttaacaacatctgcgtttcagattgatttttcttccgataaaaatgcaacaaacatctcaacagcagtaaaaggtgatgaagtcattgttaagaaaggtaatgatgaaacctttacgctgaaaaatattgtaggctctgtcgaaggaactaaagttaaagacgatcaatatctatttgatacacaaacactgaactttggcgatattacctttacgagccaagataagtcatctaatttcactttaaaagatacttctcttgctactaagagccaaattaaagataaattattctttatcactcaagattatagttttaaatctcttaatgttggtggttttgattttggtgcgggtaaatttgcttactcaattgataaagcagacccagatgcgatgttgctattaacaaaagtttataacagcaccttcttaccttggaatcaaaataaatacgataattcagcgatgattgagcaagctgtacgtgatgttttggaaaaaggtttagtattccgtattgatgaagcatcgcttaccaatagcagtggcgcaagtaaactaaactttaagttagatttaaatgcgttcaatgctgatgcactgaaaaaagaagacaaggcgccttcagttctgtttaatgaattgtttaataatatcgattttaatatcgatctttctgtaccaatgctaacggagttccgtagtaccacacaataccttgatgttatgcgttattctgaaaaaggcttaacagacgaagataaagctgaaattcagaaaacaaccgctaacgacatggcacagttaaaaactgaattacagcaaaatatcaatcaaatttctcaagacgagaaagatgctctgccattgatgctgttatcacaagacggtaataaactgtctttaaacctgaactatgctgctgataaatttactatgaacggtaaaacttacagctttgatgagtttatggaagtaacacaagcccctcaaatgttaggtttagcggcgatgttattcggtgcgggtgcttcttcttatgattatgatgactctgattatcctgaatattcagaagagccagatcaaaatgatgcaatagaagagccacaaattgagatcccagcagcacctgctgaaaacaattaa

SEQ ID NO: 315266 - DNA, 375 bp, Proteus mirabilis
  misc_feature (17)..(26): n is a, c, g, or t
atgggaaggattaagannnnnnnnnnaagaagtttgggatttaaagaatcgttattagaacttaatacaagcaatgatacagtaaaaattgaacaaattttacaaaagtggcatcaatatcttgagccttctcaattattagaaaaactcaagcataaaaagcaagaaataaatgcatgcacagtagatcaacaattaaaacaatatatacacgggaaacatttttttaaaaatgtagtttatcctgtgcttatttctcatattggtaatataaaagaaaaagaacttaaaaaacagttatttaactcacaatcaattccggaagatcttgatttcctttggcaacatatgatgactaatatcaatactatttga

SEQ ID NO: 315267 - DNA, 762 bp, Proteus mirabilis
atgccgagacttatgttaacagatgatagctggaagttactatcaaagatcatacacctaaccggacgtatttataacaaaccagaacatagaatgacccttgaaggtattttattccgaataagaacaggcattccatggcgcgatttacctcgtcaatttggtgaatggaatacggtatttagacgttttaacctttggtcaaagaaaggcgtaatgatggaaattttccaatttctatctcgcttcaatgatcctcagtggctatttattgatgccagtatcgtgaaaacgcatcaagatggagccaacgttaaagatgcttcaaagcaggctataggcaaaagtcgaggaggcaactcaactaaaatacatttagcggtagatagcagtggtcttccggttcattttgagttgtcaggtgggcaagcccatgatgtgagttatgcagaaacattggttacctcttcaccggaagccgaagttgttattgcagataaaggctatgactgtgaagccttacgacagttgataaaaagccgtcggggtcagcatgtcattccaagaaaagggaatagtaaacaagggaataaagatattgattggtgcttatatcgatatcgtcatttagttgaaaatgccttcctaaaaataaagaaatatcgagcagtggtgactcggtatgacaaattagcccgaaattatgaaagtgttgttgctttagcattttcaatcatgtggctcccaatgtgggtcgattga

SEQ ID NO: 315268 - DNA, 756 bp, Proteus mirabilis
atgcactacaaagataaacacgctctagctaaccctgaaaaaaattgggtacctcgtgtggtgattttttcaggtaaagcggcctcatcctatagcgcggctaaaaaaattattcatctcatcaacgatgttgctaccgttattaataatgaccaacgcattgattcacggctaaaagtcgtttttatccctgattacagtgtcagtttggcccaaaaaattatccctgcgaccgatctttctgaacaaatatctctcgcaggtactgaagcgtcgggaacgggtaatatgaaatttgtactaaatggggcgttaacaataggcacattagatggcgccaatgttgaaattcgtgagcatgtcggtcctgataatattttcatattcgggaataccattgatcaagtgaaacaaatcaagcaaaactactattacccacgctggtattatgaaaatgatacggaactaaaacaggtcatagaccaaattgcgaacggctattttaaacctgattcccctaatttttatcaagatttaacgcatagcttattagatggcggcgatcaatatttactctttgcagattatcgtagctacattaatacgcaagaacaggtcgatcatctatatcaagacccattagcttggcaagccaaagttgcacaaaatatttgcaatatgggctttttttcgtcagatagaacgataaaagactatgcttctcaaatttggcacattaatcctatcattttgtga

SEQ ID NO: 315269 - DNA, 435 bp, Proteus mirabilis
ttgcagacagataatgaaagcttagatgaagcttatcagcggctatttattggcccttacgcattgccatcaccgccatggggttctgtgtggctagataaaaaaaatgtcatttttggtgattccacactgcaattacgtgaatggatgcaacataatcacattgatatttgtttaacgcaaaatgaacctgaagatcattttggtttgatgttgatgatggtggcatgggttgctgagaatgagccgcttaaattaaatgagttattagctcagcatttattgccttgggcgttccattatctcaataaactgcaagctaatgtcaattttccattttatgtggggttggcagagttagcgcaattgacgctgacaggttggcagaattcattaaagattgatgtggccgacaaagagatctttttccgctag

SEQ ID NO: 315270 - DNA, 210 bp, Proteus mirabilis
gtgaaaagtgaactaattcaagttccaaaggatttgctagaagaattagcatctgagtatcaagcgaaaatattagaatacatgcaggggtataaaggctattacgacacagtgggcacacgttggaacagagattacaacgattacgttgataactttaatgccgccgctgatttattaggttggggtaagatggagaaaatagaatga

SEQ ID NO: 315271 - DNA, 204 bp, Proteus mirabilis
atgaaatttaaagtcggcgataaagttaaatacataaacaatccaaataattataccggagtgtttaatgtgggagacaatctagagattgtcaatatcgttaatgtagttggcgaaaaattgcctttatatgcatgtattaaagacaatcctgaagtatatgaatgttttgatgcatatgagctggagttaatcaatgaataa

SEQ ID NO: 315272 - DNA, 1017 bp, Proteus mirabilis
atgaagaaatataaaataacgagtgaaacaaaagaatataatggtattactttatatagaattagaagagtgtatacagatagtccaggaggatggatagaaaatgaaagtaatttaagcagagatgataattgttttatttttgataatgtaatggtatttggtaatgctaaagtcacagataatgcaattataagaaataatgtgaagatctacggtaatgcaatagttaagggaaatagtaaagtaaaagacaatgcagagatttatggtaatgtgctagtggaagataatgtgacaatatctgatgatgttgtaatatatgataatgctgttattaaagataatgctaaagtatcagaatatgctattgttcgtggtgatgcaatagttgaaaaaaatggttgggtgactggttatgcgactgttgagggaaatacaattgtatcgaaaggtgaggttattaagagccaatttggctcttgggatgatattgatgaactaagagcattttatattgataaaaatggtcgtatcataaaaatagccaaagaagatatttatagaaatacacatattgtaaatgaaaaaaatcttcctattgaccgcaatgatatttctttatctgataaagaaaatggatttgtatttccaagcagtgaagaagcaacattgaactcccctgatgcatctacttgtgttatttatctttctgttaataaagtgatagatacctttagaatttgtgcacagactcacattaaaggaaaagagtatactacagcctttaaaaataattacagtgattatttaaattttatcattctggacgttgcaccaaaaaaaatatttacagaagcagatgtagacatagaaccgctggtaaatcctagaatagaaaaagatgtagaaacatcaggtgatgtcttgacgaaatattatctaaggtttaacggtaataatagaacgataactaagagtgtagagtatgaagaaaataaatcttcagattattag

SEQ ID NO: 315273 - DNA, 252 bp, Proteus mirabilis
atgggatcttttttattaaaaaaagccgttgggttatctaatatttctgatttattagataaaagcgggatcttctataactattcaaccaaagtattaccttcttttgattatgataccgcaggaaaacatatagcccgtgaagattccacttggaatggcaaatatgttattgggcaacccgctgaggtgacttattcattcccaaaatgggaaggcaaatttaatcaatttggtaatgacagtctttag

SEQ ID NO: 315274 - DNA, 426 bp, Proteus mirabilis
  misc_feature (363)..(372): n is a, c, g, or t
atgtcccaaaaaccttgccgtattattttaaccggaggtccaggctctggtaaaagcactattatcaataagttaagaagaaatggctactcttgctcaatagaagcaggtcgagccattattcaagatcaaagtcatattggtggttcagcccttccttggattgatccgatcgcttttgctgagttaatgttaagctgggagctacgatcatggcatgatgcatccaatatagatgataacagcaaaccttatttttatgacagaggcataccggatatagcaggttatttacacttttgtgagcgccctattccccaacatcttgaaaacgcaataaggctatatagatattctacaacnnnnnnnnnnttctacaaccgtgtttattgctccaccatggaaagaaatttacttacaagataa

SEQ ID NO: 315275 - DNA, 603 bp, Proteus mirabilis
atgttgtcagccagacactcagctaaattacaggtgttctaccctgtgcttcttttgcttctttctatgctatcaatacaaagtggcgcatcattggcaaaaagcctgtttcctgttattggcgcccccgcagtcacagcattacgcctttttttaggtactctgatcctgttttttatttttaaaccatggcgtctaagcttttctcgtagtgccataatgccactatttttatatggtttatcattaggggcaatgaactacttattctacttagctcttgaaactattccattaggtattgcagtagcacttgagtttacgggaccgcttgcggtagcgatgttttcttcacgcagagcaatcgattttttatggataatcttagtgattgctggcttagggttattactgccgattggggataatattcacggactcgatcccctaggcattttatatgcattaggtgcgggtgtcggttgggcactgtatattgttttcggacaacgtgcaggaaaaggctatggcgcagcgacagtttctattggctcacttatcgccgcttccctattggtatgctacaaagtagccctgagctag

SEQ ID NO: 315276 - DNA, 303 bp, Proteus mirabilis
atgctacaaagtagccctgagctagtttttagttggtctatattacctattggattagctattgcgattttatctaccgcttttccttatactttggaaatgattgcacttacccgtttaccggcaaaaacctttgggacattgatgagtttagagccttgtatgggggcttttattggtattattttcttacatgaacatttaacgttaatacaatgggttgcgttggcatttattgtgttagcgtcaattggttccactgcaaccatgaaaagaaaaaccaaaattgaaaaagtagaataa

SEQ ID NO: 315277 - DNA, 282 bp, Proteus mirabilis
atggtagaaggcaagaatgagcaatcgatctattattcatcatcgagcacggaaggtgagaaaaaactatctaataaatcaaatggagaaatctattttaattataaagttgaacctaaattaaccacgactatcatctcaaatgataaaaaagctattttccctaacggtaatattaaaacactgagtggttcgacttatagtaaaataattagttttaatgaaataatcgagaatagtgatgaaaaagcgtttacttcttttgttcgatatattgattga

SEQ ID NO: 315278 - DNA, 351 bp, Proteus mirabilis
atgctactaacacatattcctattttaatttcttctataagcctattttttgttggttatttcttttttgaagcatcaaaaggcgaaatttggacacaacgaaatatcaaaacactctttatcggtggaatattagcagtcataacacctatcgtgaatggtatgttaggctcattaacaagtttagcattatcaataagtttaccacctggtgaacgcatttttgtcttttatttagggttttctttaaatgcaatgcgtgagataatttacggcattatgatcctctctcttgcactaataatgaaagaagccaaaaaaattagtgatgaaaatcaacagtatatataa

SEQ ID NO: 315279 - DNA, 321 bp, Proteus mirabilis
atgattaaattactatttattttcatgacctttattattccagttcatagctttgctttgaatgatttaaacaataataatgaattaatttataactatatttacccaaagaaagaccccttaattttcaatgggaagctcggtgagtcaccatccaacaactacatgattaaaaacacaaatcaatcaaaatactttaattttaatgtaactaaatacagacaatatcttgatgagcgacaagagcaattttatcaagggggaactcgagcattgaatcactattcagataacttgggtataataattccatttaattaa

SEQ ID NO: 315280 - DNA, 1269 bp, Proteus mirabilis
atgactattatcaatgcgaatcactatctggagcaactcctggctcccgctgtgctcgagcgcattgctcggctctgcaagttttgtctgcgtcagcgcgccattacccctgccatgctggtccctgcactgctacgagccatggggggcgaccaggtcaatgacattgccggtttacaccgtcatttcaatgccttgcaactggtgagcgcgcatcaggtttcctacaaaccgtttcacaatcagctgcgcaaagagagctttgccctgtttatgaaagccttggttgagcgtgccatcgccttgaagatcgaccctcaactcaaagcggcttccctcggcgcattcaagcaggtgttactgcacgatggtacctcctttgcggtacatcggcgcttggcggctgattttcctggccgattcaagactatcagtccggcggctatcgagtgccatatgaccatgtctttgtcggagcagagcccgctgtgcatgagtgtgtctgccgataccgcaggggagcggcaatttctccctgaggcccacaagctggccaactgcctgctgctggctgatgcgggttacattgacagagcctggtttgcacaggtgaacgatgctggcggattttatctggtgcgaggcacccaaaatctgaaccccaagataatccaggcctggcgcggtgatggacgggaagtaccaaagctggcgggactgtcattgaaagaggccggacggcggcgctgtcgggccgaagtactggatatggtggtgaagtctggcaaagtagaatatcggttgatccggcgttggtttgccgaggaaaagcggttctgcctgtggatgaccaacctgccgcgagcggcatggtcagcagagcaggtgatgagcctgtatcgctgccgttggcaggtggagttgttatttaaagagtggaaatcgcacaaccggctcaaggggtttgtgacgggggagaaagccatcgctgagggattggtgtgggcgagcctgctgtcgctggtgatgaaaagacgggtcgcgcaaagtgtgatgacagggaagctatcgatgttgaaagcgtcaaagaacagtacgacatggtggttgccgctattggaagcagtggcccatagggcactgacagaaataagggaaagactggaatgggcagctgattatttggccaagaacgcttgccgaaccaagcagagaaaatcgatacagaacaggaccttggagggagttttaaaggagctcaatgcttaa

SEQ ID NO: 315281 - DNA, 3003 bp, Proteus mirabilis
atgacagaactaacaccattcgcactcaaggatgcgcccgcactcattgaagcggtctatcccgcgcagaaaatatcattcgaagcgcaaaaagaacgcaaagccaatcttggtcaaacgcttacaggtttggggtcctactggaaaggtagaaagccgctgatccttgttcgctccgtagtgctcggcacgctgctacctcaaaccgaagacactgaaaaagatctcgaaatattcgaaatgctgatgggctttgatatcgaaagcctcgctaagcgcgcgctcattcaaaatgacattaaacccgcagaaatcgcagcacgcattcagctgcacaatccctgggattactttagtcacaacgtcaaagtcactgacgctaatttcaatgatattgatactctgcagtttcccatcaatagcgatgcgctcggtttaaagctgcgctggcgtcgcgacattgaagagaatgaaaagctcgctatttatcgtgactatttagaaaccgtcgaaggctacgaggcaaaggcaagtctttgcaaaagaccggaagaagtagatcaggagtggctctatgaacacatttggtccagcgtcaatcgacactatcaaagcctcagcattaagtccaaatcacatcaagagctgatagagcagcttggtcaacttcgctatgggcaccgtcccaaagtagccgacactttcagtggtggtggctcaattccgtttgaagcagccagattaggatgcgatgtatatgcatctgatttaaacccagttgcacttatgctgacctggggcgctatgaatgtgatcggcgcctcaccagaaagaaaacaagaaattgaagccgcccagaaaaacgtggcaaacattgtcgatcaagaaataactgctttaggcattgaacacgaccaccacggtaatcgtgcaaagtcgtacctgtattgcttggaaaccaaatgcccagaaaccggctggatggtgccaatgtctcccagctgggttatttccaagttaaagaatgtcatcgcaaaactagttcccgatcacgatcataagcgcttcaatattgaagtggtaacaaacgccagtgctgctgaaatgaaagcggcagatcaaggaaccgtaagagatggcgctctggtgtatgagttggatggaaaaacctatcgcactccaataaaaaccctgagaggcgactataaagacgctgatggaaatacgaaaaaccgacttcgtctttgggagaaggaagattttgctccgcgtacggacgacatttttcaagagcgactctatgccatccattggataaccaaagacactttagatcagagccgccaagaaaccttttttacaggtgtcagtgataaagatctagaaagggaggcgctagttaacgatattgttcgcaagaatatcgaaacttggcagcaatctggccttatcccagacatgccgattgaggatggagaagagacgacacgattgaagcgagaaagggggtggtcgcattggcaccaccttttcaatggtcgccagcttttgatgtatgcaatgtatttcaaacattcgacaccagaagactatatcttcaatgctaaaactttggactggaatgcgcgtattgccaactggatgatccattgggaaaagacgaataacgttttttataaccaagcgctcaataccttttataattacggcattcgctgctttaccagtcatgaggctgggcgatcctttggttttgccaatgcgccaattcctgatgtaactgtaaaaattaataatcatgaagcatcggcattaactgagtcgaacgacgtttacatcactgatcctccttatgccgatgctgttcattatcacgaaatcactgagtacttcatcgcatggctacgtaagaatccacccaaaccatttgatgaatggacctgggattcgcgccgcgccttagccatcaagggctctggtgacgacttccgcaaaggcatggtcaaggcctataaagccatggcagaccatatgcccgacaacggcatgcaatgcgtaatgttcacccaccaggataccggcgtttggtcggatatgattggcattttctgggcatccggtttgcaggttgttggcgcatggtatatcgccacggaaaccagtaccgagctgaaaaaaggcggttatgtacaaggtacagtgatactaatgttacgtaagcgtcctgccggtgaaaacgcggggttcaaacagcgactgctccccgctgtacgcgcggaggtaaagcgccagatcgaaaccatgttgcacctgaatgatgaggtgaaagacaggctgggtgagcctgttttcaacgattctgacctgcaaatggccggttatgcagcagctctcaaggtactaacatcctatacccatattggcggtgaggatgtcaccagctttgccctgcggccacgcaccaagggtgaagtgacggttgtggatgagatcgtgcaacaagccgctgaagccgcaaacagcttgctggtaccggaaggtttgtcggctgatacctggcaaaagatcaacggcattcagcgcttctatttgcgcatgatggacattgaaacttccggcgcctctaagctcgacaactaccagaattttgccaaagccttccgcgttgacgattacgcccgggtaatgggcaatatgactgccaataaagcgcagctgaagcggatccctgagtttgcctctcgcgacctgactgacagcactgaaatcggctccacttggctaggtcacttggttattggcttgcaacagatactcaatgaaaaagagccgcagacggttatcagtcaatttcaagcagacttaccagactttatggaggtccggccaatactaatcgacatgctgacctttattgagaaaaaggccccagaaaaagccactcgcgatgccgctgaagtgttaggtgcgcgcttgaagaatatgcgtgctcttgggcaatga

SEQ ID NO: 315282 - DNA, 939 bp, Proteus mirabilis
ttgcaagtagatcaagcgttcatcaacgcactagaggtaacgctttcgaagtcccgattggacacctaccgcacatacttcagctgtcaaaatgatgctgaagctcttggaacgtatctttggaataagtccttatcaacagcattttacccccttcttcaggcgactgaaattactttacgaaattcaattcattcagctgcttccggccatttcagtggtaacaaagaatggtttttaatgaagaaatttccctctgcaaaaaaagaggctgagaagcaatacctgaaaaaagatcgtaaaacaccaattactcccagaccatcttcagataccgttgtagcatctttgagctttggcttttgggttaatttacttacgcagaattacgatgacccagtaaaaaataccaaactttggccgacattgattccacaagtattcccaaatgcaaaaagcacgaacgcaacaaggacctcattacatcatcgatttaaatttataaaagactttagaaacagggttggccactatgaacccatctggaaaatacgtgatactgttgacggtggtggaaatattattcgcttaggtcctacgaccccggaagaaagcatcattcgcttaaacgaatacgttgatctgattgcagagagtttaatgtggatgagctttgaacggtatgattttattgttggtatgggcatcatagatcacataagacaactatgttctcttgaggcattgagccattttcagggaacaaatccaaccaaactaaaagtcaacaagttgaaacatgaactttcaaaacgtcataaagaaaatgattccgtctctgggctttatgaactaacaacatcacctaaaggcgtacataaagggaggagcattgtgcttgaaattaaacagatttacccaccaagaatgatcaaataa

SEQ ID NO: 315283 - DNA, 2400 bp, Proteus mirabilis
atgaaagcctctctgtattcagggcaacgcgcttcagagctcttgccagtattggcctattcagacgatgagcaactgtttttcatggaagaccaaagtgttggctttggttttctatgtgacccattgccgggtggtgatgagtctgttgcagacagggttaatgttctactcaacaacgactggccaaaagacactttgctgcaatttggcctgtatgcatcccctgatattcaaaccgaccttcagcgcatgatgggcttacggcatcgtcaatccgatccattgctcagggcgtcgattcgcaaacgtgcggatttcctcgatgggggcacggttcaaccgatagaagaatcgacccagactcaggtacgcaactttcaactgatcgtcacctgcaaattgcctttggaaagccctataccgacggagcgtgagttgagtcgagcatccgcgcttcgagcttctttctctcaggcgttggcaacggttggttttcgcgtcactgagatgactgaccgaaactggatcgcggcattaagtgcgcagcttaactggggaaaagatgcttcctggcgcaatccatcacccattcgaagtgaggctgataaaccacttcgagagcaagtgttggattatgaccgagctatcaaggtggatagccaaggtctaatgctgggcgattaccgagttaaaaccttatcgtttaaacgcttgcctgagcggatctggtttggtcatgccgcaagttttgcgggcgatatgatgacgggtagtcgcggtttacgcggaagctttttgctgaatgtcaccattcactttccttcagccgaggccatgcgatctcgtttagagacgaagcgtcaatgggcggtcaatcaggcctatggcccaatgctcaagtttgtgccggtgcttgcagccaagaaaaagggatttgatgttctttttgaagccttgcaagaaggtgatcgtcctattcgggcaaatatgaccctaacgctgttttccccaacggaagaggcgtccatcagctctgtttcaaatgctcgaacctatttcaaagaacttggatttgagctgatggaagacaaatacttctgtttgcccattttcctgaatgctttgccatttggtgctgatcgccaggcgatgaacgacttgtttcgattcaagaccatggcgacacggcatgtgatccctctgttgcctttgtttgcggattggaaaggtacaggcacgccagtgattaactttgtttcccgtaatggtcagatcatgagcgtgtccctttatgactcgggcagtaattacaactgttgcatcgcggcgcaatcagggtcgggcaagtctttcctggtgaacgaaatcatctcctcctacttatctgaaggcgggcaatgctgggtgattgatgttggccgctcttatgaaaagctctgtgaagtttatgacggagagttcttacagttcgggcgggatagtggcatttgcttaaacccgtttgaaatcgttgaggactatgacgaagaagcggatgtactggttggattattggccgcaatggccgcacctacgcagtcattaaccgattttcagatggccaatctaaagcgtcagacccgtgaactgtgggagaaaaaaggtcgtgccatgttggttgatgatgtggcagaggctttaaaaaatcacgaagaccgacgtgtgcaggacgtgggtgagcagctctatccgtttacgacacagggcgaatatggccgcttctttaatggtcataacaatattcgcttcaaaaaccgtttcactgttttggagttagaagagctcaaggggcgcaagcacctgcaacaagtggtgttgcttcagcttatctaccaaatccaacaagagatgtacttaggtgagcgtgatcgtcgcaagattgtgttcattgacgaagcctgggatctgttgactcaaggtgatgtcggtaagttcatcgagacgggttatcgtcgatttcgaaaatatggcggcagtgctgtaacggtaacgcagtcggtcaacgatttgtatgacagtcctacaggtaaagctatcgctgaaaactcggccaatatgtatctgcttggccaaaaagccgaaaccatcaacgcgctcaaaaaagaaggccgtttgccactaggtgaaggcggctacgaatacctgaaaacggttcataccgtcacgggtgtctattccgaaattttctttattaccgaaatgggcaccgggattggccgcctcatcgtcgatccgtttcacaagctgttgtactcgtcccgtgcagaagatgtaaacgcgattaaacagttaacgcgcaaaggcctttctgttgctgatgccatctcccagttgttaaaggagcgaggctatgaataa

SEQ ID NO: 315284 - DNA, 891 bp, Proteus mirabilis
atgaccccgtctgaaaaaaagcactttgacgccttatatcaacaacacctcacccaacttaaacttcaaggtaagcgagccaaaaccatctctgcatactctcttgctgtacgacgtatcactgagtactttgatcggtgccctgataccctgaccattgaagacttgcgacggtatttcagtcaactgatcgggcaggtctcatggagtacgattaaaattgaccgctgtgggcttcaattcttctacaaacatacgctcaacaaacagtgggaatggatcggcatcattaagcctccaaaagtcaagcgtctcccgaatatcatttcccctgagcaagtcgcccagattattaacgccacccgtgaaccccgttaccgagtgttattcttaacggtatatacaatgggacttcggattaatgaggctctcaatctcaccatctccgatatcgacagtcataatatgcaagtccatattcgctatggaaaaggcggtaaagatcgactggttccactccctcgcagaacgcttcatgccttacgccgatactggtgtacacaccgacatcccaatctgttattcccaagtaaaggtaagtgttgcgatgtcgcctttaacgatcaaggagcccaaaaagcgcttaaacaggttgtacaggaatgtggtattcataagcgaattacccctcactcactccgacattgctttgcaactcacctcttagagcaagggcttgacctgcgttcactgcaaatccttcttggtcacgcgagtttaaataccactgctcgttatactcaactcacccaactcaagttacatgatgctaaccaagccctcaatcaactggctgaccgcctgcatctcgactgggagttgaccgtatga

SEQ ID NO: 315285 - DNA, 1053 bp, Proteus mirabilis
atgagcacttttatcgacttgttgcgccaacatcgtcacgagcttgaacaagattatgggcatcattttaacagcgatataaaacgagccatctccgccatgttacggtgtaaaacagagaaacaaggactctcgcaatggtactgctcccactgccaccatgacgaccgtctcactctttcgtgtggaaatcgtcactgtcctcaatgtcagcatcgtacaacatccgactggcttgaaaggcagaaaagtaagctgcttccagtgcattactacatggtaaccttcacattaccttatgaactgagaagcttagctcgctctgcgccccgatcactttatcaagccatgttccgtgtggcttcatctacgttaaaagactttgctcacaggcaaacccaaggtgagttgggatttactatcgttcttcatacacacagccgaaagcgagagctacatcctcacttgcacgttatcgttgcgggagggcaatatgatgcaaagaggcatcagtggcttaaagggaaaaagcattacctgtttaatgagttcgccctcgccaaggtctggcgtgcccgagtgttagaatccattaatcagacaacacctgcggttttaccccaagacgttccctcaaaatgggtcgtagactgtcggtgtgttgggtatggattacctgctctgcaatatctgtcgcgctatctctaccgtggagtattaccagacaaagacatcaaatctgtcacagagcatgaggtcaccttcgaatatgtagatggtaagacgaaacagcgaagatcccgaacacttcctataacacggttcctatggctgatacttcaacatgttttaccaaaaggtcttcagcgagtcagagactacgactttcttcgcggaaacgcgcatcaactctgcctacaaatccagttactgtttttatctgcgatcgaactttaccgccctgtatctaggacggcacagcagaaagtgttgcgcagttgcccttgctgccatcatgaaatggcttgtgttggagtcagccgaccgagctag

SEQ ID NO: 315286 - DNA, 1329 bp, Proteus mirabilis
ttgcaattaaccacagcccttaccctcgccaatcgttacgcccctaacactgaacagcttgggaaacttagcgatattctctgtcctgatttcatcaaccaatgcctggaaacctccggtgttgccaccatacgcaaacgtcgtatcccgcttgatatggccgtttgggcggtcattgccatgtcgctttaccgacaagagcccctgtggtcgattgtcgccaaagcccaattaatgctgcctggaaagcgaacgttggttgctcccagtgctatcgttcaagcaaggcaaaggcttggggcagacgcgatgaaagaggtgttccatcaaagccagcgcttgtggaatgagacggctgaccatccgacttggtgtggattaaaactcctcgctgtcgatggtgtggtatggcgaacgccggatactgaggaaaaccgtgatgcatttcaatccgcgtcaaatcaaaatggcgagggcagctttcctcaggtacgcatggtttgccaaatggagttgaccagccacatgctggtcgccagtgctttcgcgagttataaaaccaatgaaatggtgttggcggagcagttgattgatacgacgccggactacagcctcacgatgttcgacagagggttctactctcttagccttcttcatcgctgggtaaacacgggtaccgaaaggcattggctgatgccaatgcgcaagaatacgcaatttaccgaagtcagaaagctaggtcgcaatgaccgcattgtcgaaatcaaaaccacccctcaggcgagaaagaaatccccctcactgcctgaagctatcgaagtccgcctgataaagaaaacactcaaagggaaagaaatcagtatcttgacctcgatgactgaccatcgccgctatcccccgtcagaaatcgcagagctttacagccatcgatgggaaatcgaagtggggtatcgagaaatgaagtcttcgctcctgaacaacgagtttacgttgagaagtaagaagccagagatggtgaagcaagagctatggggcttgttgcttagctataacatcattcgatatcagatggttaatatggctaagactgtgcctggcatctaccccaatcaactgagcttcacaacatgtgcccacgccatcattcacgtgatattagggttctggttggagtcagcaggaaccatccctaagcgtattactcacctgcaggaggaggcgatacatcatgtgttgcccattaagcgagaagagcgaatatacccgagagcagtaaagccaaaggcaaataaataccccaataaaaagaaagccagtcagcttaactga

SEQ ID NO: 315287 - DNA, 2109 bp, Proteus mirabilis
atgtctaaaattacgattaatattcaaaactgcaacagcatcgaaagtgctgagatccagatcgtcaaaggaacacttaatataaagtatgggcctaatggattggggaaaagctcaattgcaaaagcaatattggcatccgtgagcgatgaagaatcgcttcaaaatttgaagccgtttaaatatcgtgcacttacaggccaatttaatccatcagtagtcggggttgaggatatcgactcagttttggtatttgacgacacttatgtgtcgcaatttgctttccagcgggatgaggttctgaaaaatagttttgaaatattcataaagacggatgactttcttgctgctatgcaagagatagaagcactattccaaggaattaaagaagctttccatggtaacgaagacttggataatgctatatcagatttgaaggaacttcgtgatgcctttggggttacaaaaaccggagctctttccaagtcgagtaaaggttataaagcatttggttcaggaaataaaatagagaatattcctaatcatctcaagccatttgaaaaattcataaaatgtgatcaaccggcgacatggatagcttggcagacgaaaggtaactctttcttagaattgtcggataattgcccatattgttcttctagttttgaaggtactgataaaaaggacatcgcgcaagcagttgcaaaagaatatgattcaaagtctgttgagcatttgagtatgttacagatagtcattgaaagactaggtaaatattttgatgatgcttgccgtgacagtttggagaaaattactaaatcgaaggtagcgctttccctagaagaaactaatttcctgagtgccctcagaggtgatattgaaacgctcatttctaagctagagggtttgcgagctatatcgttttttgtgcttcgagatgttgaggaaattaatgatgaaataagtaagctgagaattgatctcagtcttattgcaagacttaattcggttgatacaaaatctgtagttgatcccgtaaataccaaactccaagagttggctgaaaaggtgggtgtgctcaaaggtaagatcaacaagcataaaaagctcattgaaaggactgttgaagaaaatcagaatggaattaatggttttcttaagtcagccggttataaatatagtgtagttatcaagtctgaagctgagtcatacaagatgaagttggtgcaccaggagcatgatcaacatattgaagctgctacgcaacatctaagctatggagaaagaaacgcttttgcgcttattttgtttatgtatcaggttttaagagaaaaacctggattggcagtcttggatgatcccgtttcaagctttgataagacaaagaaattcgccatactgaatgaattgtttagaggtaaggcaagtctgcgtgacacaacagtgcttttgctaacccatgatattgaacctgcaatagatgttataaggggcgtcaaacgattattccaacaccctaaaccaacagcatattttctggcatcaaagtctggtgttgtttccgaagtagagatcagagaagaaaatattcaaacattcgcacaaatatgtatggagaatattcgagagcttgaggatgaagttattaagtgcatatatttgagaaggcactttgagataattaatgatttaggcttggagtacaattatttagctaacctcttacatgctagggatattccaatcttaagatctgatgatggggatgttgatatgaacgctggacagattgctgatgcggatgttggtattaagaaattcatctctgactttgattatgcaagggttatagctgtgattaaggataaggtagagatgaagcgtcgattcactgaagctactgttgggtacgataaaatacagctctaccgcatctttaaggaagtacatggacctgcaaatgggcaacaggatagcattctacagaaatttgttaacgagtcatttcacatagagaatgaatacgtgatgcaacttaatccccacaagtttgacaatgtacctgagtatgtggtcttagagtgcgataggattattcaggcttcttaa

SEQ ID NO: 315288 - DNA, 321 bp, Proteus mirabilis
gtgaataaatacaccgaattatctgacttcgaagttaataaaaaggttgctgaaaagttaggactggcgtacgaagtcacaaggtacggcgtggttacaaggatgagcaataaagagcagtggcgtgaattcgacccatgcaacaatccatccgacgcaatgccgattattaacgaatatggcattagccttatatatcaagatagaaaattccaatttgcaactaatgacgggaatatagagtgctgtattgccaacccattaaaagcagcaatgattattttcttgtgtatgaaggatgcggagaatgaaaaagtatga

SEQ ID NO: 315289 - DNA, 1941 bp, Proteus mirabilis
atgcgcctaaagtcactctatatcagccaatacaaaaaccttcgagacttttcattaaatttcgatggcagcagctttattgatgtattcgttggtaaaaatggcacaggtaagtcgaatctgtttgaagccttgatagagatctttcgtcatattgtggaatacgacaggactaaggcggatcttgggtttagctatcggcttgtgtatgagattgataattcagaaacgacaatagagtggagctggggcgaaattgatgatgttgcatgccgtgatcgcccgaaagatcgcggtttagtgattaatggccgcaagcgaaaaactatcggtcaatctcaggtgccagacaatgtgttgatctattactctgggcacaataaaaccgttgctggcttggtggcgcaatatgaagagagttttcgccagcgaataaagcgtgcggattttgatgaaagccgtttcttcatcggtattgggccggaatacaaagaactgctgctggccgtattgttaatgcagcaagatggctgcaaagcacgccagtttatttgccagaagttaggtatcgctaatgttgcaacagaattgcgcttggttttagagcgaccagagtatgcgggcgattctcgttttgatattgagctgaatgacgaaacagaccgctactggaagccggaaggcattaccaaaacgtttcttgatagattgcacctttgcatcaatactgcatctggaagcccggtgaggtctgaagggtattttgcgtctgatgatcgctacttgctttactttggtatcgaaaagatccagcgagaatttacggatttaagccctcaggagttatttcgccagctagataatttgaagacactgggaatgctcgtagaaattaccattcctttgcagctcgaaaatggctttgatgcttccgtctctcacttcagcgacggtcagtttcagtcggtgtatatctattctattaccgagctgtttaaagatcgaaattgcatcaccttgctggatgagccagactcattcctgcatccagagtggcaatttgatttcttgaaacaagtctttgaaatcacagatactgcggcgaaaacaaaccatgtgctgatgagcagtcacagtgcagtaacacttattccgcacgagaagaagcgagtaaacctatttgatatacacaactcgaatgtggtttgcagatctaccagtaaagattatgcaataagcaagctatcgtcgagcctgattaagtacaaggaagatgagcaaatcctgagtatccttcgaaatattaggattgagggagtcccagtactattcactgaaggaagtactgatcccgacattttaaaagaggcttggcgaaagctttttgatgagccacttccttttgtgcctatctatgcgttttgctgcgattacttgcgcagagcgcttcaggataatcgaataattaatgagatgggtggtcgtccactatttggtctatttgactttgatgaggcgtataacgagtggaattatcttaaccaaaaagatagctgggcattgcagtgtgatgacccctatcttgggttgcgcactgaaaatgctgctgagaaagtgcatgcgtttattcttcctgtaccaagaattgctaaggttgaagcgcaggtaatgaaaacgcccggctcaaaagaacattttgcgcatcaagcaattatgggtattgagcaccttttttatagtgaccacacagctcggtactttgaggctaggcaacttcctggtggaggagagatcgtaaccttctctggcaataagaccaaatttgcaagggaggttgtacctaccttagatgctgccaccttcgaggtattccgacccatgtttgaatttattaagtcaaaatgcccagctccggcagaagcagcggtagccttggtatga

SEQ ID NO: 315290 - DNA, 1698 bp, Proteus mirabilis
atgacccaggccgtgaatgatttgcttgagcagcattttgatgccgccttttctgcacccgacggcattgaaaaattgcgcgaactgattttgactttggctatgcaaggcaaactggttgagcaagatcctaatgagccgcctgccagtgagttgttgaaggagatagaagctgaaaagctgcaacttgtgaaggttggaaaaatcaagaagccaaagattctccccacaattgagcaggtcgatgctccttatgcactaccggaaagctgggtatggactcgcctaggtaacattgggaatattttcaatggcaacagcatcaatgcgaatgagaaagaatccaagtatacaggagttgatggtctgccttacattgccactaaggatgttggttacggccatgatgcacttgactataaaaacggaatctatattcctgaatcagaggggaagtttaaagtagcccgtcaaggttcggttctgatatgtgctgaaggtggtagcgcaggcagaaaatgtggaattgcagagctggatatttgctttggtaataagttattcgccaacgagccctgcggaggaataccctcaaagtttattctttacttgtacctgtcgcccatttttaaaagattcttcagcgaggctatgaccggtattatcgggggcgtatctatcgccaaatttttggagctgcctgttcctatacctccgttaggggaacagtaccgtattgtctcccgcttggatgatctcatggcgcgttgtagtgccttggagaaactgtgtaaaacgcgagcggaaaaacgcattgttgtgcacaaggctgccatcgataaattgtttgatggtgctgaaaatggtggtcccttatttataaagcagtactttgacgagctttatagtgataggaaaaatatcactgaattgcggaaggctattctgaagcttgcgattacagggcgtctttcagatagacttgatggagactcgtctgctgacaaattgttagagaaagttcataaagagcgagttgagttaaagttaaaagtatcgcatgacgatagagacctagaaaaagcgataggttttgaaatacccaagcattggcgttgggaatcccttgggcaaatacttgtttttggaccgaagaatgggtattcacctaaagcagttgactacgaaactagcgttcgctctttaactttaagtgcaacaacttctggcgtttttattggtgagcactctaaatttattgatgcggatattcctagtgattcgcatctctggctaagtgatggagatatccttgttcagcgtggaaatagtatagagtacgtaggggtgcctgccatatatagaggtgagccaaggatttttatttatcctgacttgatgatgaggttacgagtttctgatcacatcaacacggaatatgtctattacgtcatgagttctgagccttctagaagctttttgcgttcacatgcgtctggaacatctggaactatgcccaagattaatcaaaaggtgctgacaggtctccccataccgctaccgcccatcgaggagcaactgagaatagttaataatatcaagagacttctagacctttgtgacgtagtagaggagaaaatagagatcttaaattctaaacagtctgaacttcttggttctgtagttgctcaggtataa

SEQ ID NO: 315291 - DNA, 1467 bp, Proteus mirabilis
atgtcactcactacccttatcaaatccattcaggacatcatgcgcaaagacgtaggcgtcgatggtgatgcccagcgcataagccagatggtttggctgattttcctgaagatctttgatgacaaagaacaggaatggcaactcaccgtgcccaactacaagtcgccgttacctagccgttttcgctggtcatcttgggccaaggacgctgagggtatcaccggtgaagagctcatcgacttcgttaacaacgatctgttcccagcgttaaaaaagttagccaccgcagcgggagtatcaccacacggcaaagtcgtgggttcagtctttgaggatgcgtacaactatatgaagtcgggtacgttactgcgccaggtaatcaacaccatagaagaagatgtcgatttcaataagtcggacgatcgccatttgtttaacgatatttacgaaaaaattctggccgatttgcagtcagcgggtaacgctggcgagtactacaccccgcgtgcagtgacccagtttattgtggatatgattgacccgaagttaggcgaaagcattcttgacccagcttgcggtacagcgggctttcttgcttgcgccattgagcacctgaatcagcaaatcaaaaagaacgaagacaagctgttgctacaagacacgatccacggtgttgagaaaaagcccctgccgcatatgctagcgatgaccaacgtcatgctgcacggcattgatgtgcctaccaatattcggcacgacaatacgcttggaaggcagctacagagctacacccctaaagaacgagtagacatcatcattaccaacccgccgtttggcggtatggaagaagatggcattgaatcaaacttcttaaagaaatatcaaacccgcgaaactgccgatttatttatggctctgatcatgcacttactcaagcatgatactggaagagctgccgtagttctgcccgacggtttcttgtttggtgaaggtgtaaaaaccaccttaaagcgcgaactattggaagaatttaatctgcataccattgtgcgcctacctaaaggtgtctttgcgccctacaccagtatcgccacgaatattctgttttttgaaaaaggtggccctaccaaagacgtgtggttcttcgagcacccttacccagaaggctacaaatcctattctcgttctaaaccattaaccattggtgaatttgatttagaaaaagcctggtggggcggtgctgcacgcaaaggccgtaaagtcacggagtatgcgtggaaggtatcagccgaaacgctagctggacgtaactataatttcgactgcaaaaatccacatgaagccgaagtgattcatcaagatccagcggagttgatgagcgaatatcaagaaattgtgcggcaattgaacgcggcgcaaacagcgctaaaagaagagttgatggcttgcttgggggcaaaagcatga

SEQ ID NO: 315292 - DNA, 2394 bp, Proteus mirabilis
atgaataaaaaacaactcacggagcgagacatctgcaccaagttcattacgcctgcgcttgaacaatccggatgggatattgctacgcaaatacgagaagagttcccgctaaccaaggggcggattatcgtccgtggcaagctacatacccgtgccaaacacaaacgagccgattatgtgcttttctacaagcctaacatccctatcgcaatcattgaggccaaagataacaaccacagcttgggtgatggtatgcagcaaggcttgggttatgcggagatgctccaagtgccgttcgtctttagttctaacggcgatggctttctgttccataacaaaatagccaaagatggagtgattgagagagagctggctttgcacgaattcccatcggccgaaacgctatggcaatggtgggcagagcacaaaggcctgaatcagaaacaaaacgaactggtcactcaggattattacagcgacggcaataacaaaacaccacgctattaccaactactggccattaacaaaaccatcgaagccattgccaatgggcaaaaccgtattctattagtcatggcaaccggaacgggtaagacctttaccgcgttccaaattatctggcggttatggcgctccaaagccaaaaagcgcattttatttctggctgaccgaaatatattggtcgatcaaaccatgaccaacgacttcaaaccctttggttcggccatgaccaagatccaaaagcgccaggccaataaatcctatgaaatctacctttctctctatcaggccgttacaggcaatgaagaagagaaaaatatctacaagcaattcagcccggatttctttgatcttattgtcattgatgagtgtcatcgtggcagtgcagcggccgattctgcttggcgagacattcttgaatacttttcctcagccacgcagataggccttacagccacacccaaagaaaccaaagaggtctcgaatatcgactactttggtgaaccgatttacacctacagcctgcgccaaggtattgatgatggctttcttgcgccttacaaagtcgtgcgcatcgatctggatagagatttgacaggttggcggcccgataaaggcatgaccgacaaacacggcaatgaaattgaagaccgcatctataaccagaaggattttgataaaactctggtactggagcagcgcacacacttggtcgcaaaaaaaatcactgaatttctaaagcagaccaaccgttttgataaggccattgtcttttgcgaaaacattgatcatgccgagcgtatgcgccaggcattggtcaacgaaaacgcagatttagtcgcacaaaacagcaagtacatcatgcgcatcactggcgacaacgaagaaggtaaagccgagctggacaactttatcttcccggaaagcaaatatccggtgatcgccaccacctccaaattgatgaccacgggcgtggatgcccaaacctgcaagctcattgtgctcgaccagcgcattcagtcgatgacagagttcaaacagattatcgggcgtggtactcgcatcaatgaagattacggtaagtactacttcaccattatcgactttaaaaaggccactgagctttttgccgacccagactttgacggtgatcctgttcaggtttacgagccatccggttctgattctcccgttccgccagatgttcctctagatgaaggtgccggggaagcgggagattcaggcttggaataccccaaacccgatagcgagcgcgactggggtggcattggtgagcccggtgaagacgaagacggcggcgtgcgccgttacgtagtagcgaatgtgccggtaaaagtcgccgctgaacgcgtgcaatactttgatgccaacggcaagctcattacggaatctctaaaagattacacccgtcaagcggtaacaaaagaatttgccacaatggatgattttcttcgccgttggagcagtgcggaaaagaaacaagccatcattgaagaacttgccgagcatggcgtgttctttgaagctttagctgatgaagtgggtgaaaaatcaggcaaagcgttcgacccttttgacttggtttgtcacgttgcttgggacatgccaccgctcactcgaaaagagcgggcagagcaggtgaaaaaacgcaattactttacgcaatacggtgatcaggctcgcaaagtgttagaagcgctgctggacaaatatgccgatgaaggtgtggctcagattgaagaaacacagattctgaccatcgcgccttttacccaatttggcaccccgctggaaatcattcgtgcctttggtggcttggatcaataccagcaagccgtaaacgaactcgaacaggcgctgtatagctcttga

SEQ ID NO: 315293 - DNA, 240 bp, Proteus mirabilis
atgaacgaaaacgagatttacgagcgaattaagcaagtactggcggatgcccctcgtaatcaatataccgctgaacttcatctgcaaatgatcaaatatgccgatgagttgaaggacatcaccgcaaaagagttttgtggaggggtggggctgcggagcagtttcggcactgaatttagcaaaatgcgaaacctgactcgccgcctgaaagcggctgggttgcagactgagctgatctag

SEQ ID NO: 315294 - DNA, 306 bp, Proteus mirabilis
  misc_feature (269)..(278): n is a, c, g, or t
atggctgcccgaccacgaacccataaaattattatccctaatctatatcgaaagctagataagcgtaatggcaaaatttattggcaatataaacatcccatcaccggtaaatttcatagcttaggcaccgacgaacaagaagcgagagaaaccgccattcaggccaatacaattattgctgaacaacatactcgacagttattaagtattaatgaacggttatcaaaaattaagacaaacaagtctgaaatatctgtcgatatatggannnnnnnnnngtcgatatatggctggataaatatttag

SEQ ID NO: 315295 - DNA, 594 bp, Proteus mirabilis
atgaacaataaaaatataaaacttacagaatggttgagagacaagaaaacaattggattaataatattttcagttattactaatttaggaaatttaatatctacaatcgatactttttccggaaaaataaataatttttacacttggctaggtgagtcaagccaattttcaggtaactggagtaataatactgagggatatatcgacggtattgtaccagatatattattagagaataaaagagacgatattattaatctaaatttagatgtaaaagattttattgttgaaggagatatccactctgatttcagagaaaaagtatgtgataaaatagaaaaaaatcaaagaagtatgtgtaaaatcattgcgtcaacgccttttataatagaaggggaaaaaagtccttttatgaatagttttgatgcatatgtatatgaatacaggaatggaaaaaaaataattatagcaattttaaatatgaaaattaacagtgataatagtatgaaaataactaatagtatgagtacacaagaatcaaatacatttccacgtgaaatatatttgataaaactaagtaataataaaaaataa

SEQ ID NO: 315296 - DNA, 219 bp, Proteus mirabilis; identical to SEQ ID NO: 307860

SEQ ID NO: 315297 - DNA, 144 bp, Proteus mirabilis
atgtcattaaaaattactaccgccccgacgacgaatgaaatcaacgaaatttatgaaggcttattaacacataaccttcagtatattcagatggagcaatatacgccctgtctcttatacacatctccgagcccacgagactag

SEQ ID NO: 315298 - DNA, 993 bp, Proteus mirabilis
  misc_feature (937)..(946): n is a, c, g, or t
ttggaaaaaataatagctacagagattgaacctcaaggtatagataatgaaatactacactacctagaggttaataaggaaatcttaaaaatcgagaattcggtactctattacggtttccctgtgttcaaagattatgaggatcattcagtaaaatcaaaaattgctttgttatctaaaaatcacggaataattttaatttccacatcttcacaagcaaccatacaagaagatgatgaaaacctgagtcaagtatataatttcattgaagctgcaattaagaaaagtaagttactaaggctcaataaaagagaacttgctgttgatattgaaagcttcttattttgcaatcaacagattgattttgaaggtgaaagtgaagttttagattcactacctgcaattcaaaaagagctatccgattcggaacgaggtacacctctgactgatgagcatttcaatgaggttagatctataattgagggtgccaaagccctaagtaagtcagtaaaacgacataaaatatctgaagatcctgcttcaaaactcaacattctaattcaattagagaatgaaattactaattttgatattgagcagagaaaaatagctatcagcttaattaatggaccacagagaataaggggtcttgctggttctggaaagacagttgttcttgcaatgaaagtcgcacatattcatttacaacacccgactaaaaaaatactcttcactttctatacaaaaagtttgtatggactaatagttgaaatgatcggtaaattttatcgttactttgcaggttcagaacctaactgggaaatgatagatgttcatcatgcatggggaggaaagtcaatagatggtgtttgttacaatgcttgtatagataactctataaaccctttaccatttcaagaagctaaatctttaaatnnnnnnnnnntccttttgatgaggtatgcaaacatcttttgtctcgccctattctaa

SEQ ID NO: 315299 - DNA, 243 bp, Proteus mirabilis; identical to SEQ ID NO: 297991

SEQ ID NO: 315300 - DNA, 210 bp, Proteus mirabilis
gtggatgtcggtttgccttgtgcggtattaatcataacaattgggcatattgggatgatggatccgatgggaggaaaaacgattagagtaactctttgtgagcgaggtaaccgtattatccctcattccatgatagtggcaggacagatgtcaacaacctcactaggtaagcagtatttttattttgatgtgagggagtatggtgggtga

SEQ ID NO: 315301 - DNA, 144 bp, Proteus mirabilis; identical to SEQ ID NO: 289928

SEQ ID NO: 315302 - DNA, 219 bp, Proteus mirabilis; identical to SEQ ID NO: 307860

SEQ ID NO: 315303 - DNA, 612 bp, Proteus mirabilis; identical to SEQ ID NO: 300820

SEQ ID NO: 315304 - DNA, 456 bp, Proteus mirabilis
atgataaatttatcaatggatataatagatataattaataaaggatcaatattcaattctatcacttctaatgatgaaagaatacgcttgctatcatattcacatgaagagtttttcagaaacgctaagatttatactattaatattaatggtttttatattgaaatctgtattgctaaactatctaatagaagttatgaaagtatttgtttgaatcaagatgtaaatgtttcagatgttgatataaatatatcagataagtttagaataatgacgcaaacaaaagaacaactattaaaacaaaaaaatataccattacccgattattctatatttatagattctaaaatagaacaagtagaattacattatcataatgggtgtaagcttatttatgaaaacaaacactcatttccatcagttttgattaatcctttatttataatgagtaactaa

SEQ ID NO: 315305 - DNA, 612 bp, Proteus mirabilis; identical to SEQ ID NO: 297829

SEQ ID NO: 315306 - DNA, 618 bp, Proteus mirabilis
atgcaggcattatcggtttcatttcctgatatggcttattgtggaccaccagtattactggcaacagtcggctcatctggtttgattgctatggtggtgggaaatttgatctacacggtaattattttaccttttactatcatgatcattagtggtgccaaacaaggaaaaagcattttacagtcattgcttaatgctatctctcagccattagttttcctgcctattttgggggctatgctagctatttttggcgttaagctaccagagattttacaaaactcagtgaatgaaatagggaaaacatctggtggtgtagcattatttttcttaggactattaatttcagggctcaaactcaaagttaatactgaaattgtttttaatgtgataataaagaatgttgtacaaggggcattaattttaggacttggattagaaactgaattattaaaagccgtctttctaattggtgtattgcctactgcaacagcggtgcctgctttagctattacaaataaggcctatgctgatatggcaacgggcactgtattattaagtacgctatgttcattactttctattattggtggtatcactattgtagaaatgatgtaa

SEQ ID NO: 315307 - DNA, 849 bp, Proteus mirabilis
atgtgtagtgatgaccaacataaaatatggatttgttcgtcttgtatcaaagagtcatatctacaagaaaaaatcaacattaataataacaaagaaaagtgccattattgcaataatatacgagcatgtttttctttggagtcagtaggtgacatagtagagggtgatggtatagatgatattatccaagaattacttgaaacagaagatataatagcatatgacatccgtgagtatattgaagataaaaactatatttacgatagtaccggagaggaaacagagttttcatctgaatcatattatatagaacgagaaaaagtagatacagagtatctagatactatatgggataattttgtcagctcacttcaaactgagtccagatatattaatcacactgtaaaggacaccttagacagtatttttagtggtattgaaaggatgagtgctggtggaggccaagctataattgttaactctggacccggcactaagattgattccttatacagagctaggtggagtaataatcaagcgacatcggaacaaatgatagttatccctgataaagagctcggtcctccaccctataagttcagcggctttaaccgcatgagtgccagaggcatatcagtattctacggcgctagttctgtctcaacggcaatttcagaaattcgcccacctgtcggtagtgaagtgatatctgcaaaatttcgcatcatacgcccactaaaactgttgaatcttaaagcgttaaaaaccgcttgggaacgtggcagtatgcttgaccccgactacattatgaaacgagagcaaatcacctttcttcggccgagtacctag

SEQ ID NO: 315308 - DNA, 162 bp, Proteus mirabilis
atgaatgaagataaagaggttttggcggcaaagattttaggatttatgaggcagcatgacccgattgaatattcttatgatgaaattggatctaaatatgcgcaccaattttcccaaaaattagctgagcacctgttgcaagaaagcaatacgggaaattga

SEQ ID NO: 315309 - DNA, 417 bp, Proteus mirabilis
atgcgatatccggtaaaattagataaagcaaaagaaggcgggtatgttgttagcttcctagatatcccagaaacattaactcgaggtgatgcgcgagaggaagcgttagagatggctcaagatgctttattaacagcatttcagttttatttcgaggataacgagaaaatacccgagccatcagaaattactggtgactatatagagatagagttgccagtcagtgtcgtagctaaaattttaatgttgaatttgttcgttgattcaaaattaactcggtcagaattagcgagaaaaatgggtgttaaaaagcaggaaataacgcgactttttaatctccagcactcaacaaaaattgacactataaatcaagctattatagctatgggatctaagctatctatctcattgtcgtag

SEQ ID NO: 315310 - DNA, 1500 bp, Proteus mirabilis
atggaagagtctactaattataaattgcttgtctggggtttgtccgtgatccagcctgcaacccctaacgaagttttgaattatcttatgtccactttaaatgataatggattattacctgatattaaaaaaatgatacattatttcgaattacttgatcaacttggctatatacatcaagtatcaaaacgaaataacctctattctttaactcctcgaggaaatgaacgtctaactccagcgttaaaaagacttcgtgataaaattagactatttatgcttgacaactgtcactccacaagtaaattaggagtgctggcctcaactgatacagagaatatgggcggtgattcgccgtctttacagttaaggcacaatttaaaagaggttccgcacccaagcctgtcttgggctgcaggggccctgcccagcagcccaagacaggcttgggtgcggatctacgagcaattaaatattggttcgatgtccagtgatgaggccagcaccccaacaacagcgagaaatgcaccattatcttctgttggccgattaggcttttctttgaattattattcatttaataaaatcgatgaacctttatttaataatgatggcgtgactgctatttcttcctgcattggtatatctccagggttgataactgcaatgataaaatcaccaaagagatactatcgaacattcaatttacgaaaaaaatcaggtgggtttagaccaatactggctcctcgtaaatttattaaaacgatacagtactggttaaaggatcatgttttaaatcgtctgaaaatccattcttcttgttactcatatagaagcggagtaagtattaaggataacgctatcaatcatataaagaagaaattcgttgcaaatattgacattgcagattattttggctcaattaataaaaaaatggtcaaagattgcttttacaagaataatataccagagcatgttattaatactatttctggcatagttacctataatgacgtgctaccacaaggtgctcctactagccctataatatcaaatgctatactttttgaatttgatgaagaaatgagcttccatgccctaactcttgattgcatatacacgcgttattctgatgatatatctatcagtagtgataataaagaaaacatagcgatacttataaatattgctgaagctaacttactatcagctggttttacattaaataggcagaagcaacgcatcgcttcagataatagccgccaagttgttaccggaattcttgttaatgaatcgataagacctactagatgctatagaaagaaaattcgttctgcatttgatcatgcacttaaagaacaggatggaagccaattaacgattaacaagctaagaggttatttaaattatctaaaatcttttgaaccctatggttttacatttaatgaaaaaaaatacaaagagactctggattttttaataacgcttaagcaaagctag

SEQ ID NO: 315311 - DNA, 675 bp, Proteus mirabilis
atggaaaataataaccctcaaaatgttgatcagaaaataaagtccactgtcgttggggctaacaacacgacaattattgcgcaagtcattgtcaatgctagtaatccacacatcgatgtaaatacaataaaaaatagtctaattaaagagataagaagctctttgaaagaagagtttgtatccacagaatataatattttactttgttaccctaacaagataattagagatgaaccaactataagaatcattgaggaactcaaacaaaaattaaatgatataggtgcaatagtttatgagggaggtgggaaggcagcattgccaaaaactcaaataatgtatccgcatcttgcggaattggaattcataaaaaccgtcaagtgtgacacggttataatttttgcattagatgaagtaacactatcacaattgacattaatcagttattttaaagtatcaaaaaaaattgacactaccgatatgataataatatccagcgatgatttaaaaaatagtgacgtttttttatctaatggcacgttccaatactgtgatgataacaactgcaagttatactctttgagttcactagatgatgctgggttaaactctgtaatttcaagaattgaaaataaaaaaataattcagcggaaaggcggcttgttaggagattaa

SEQ ID NO: 315312 - DNA, 192 bp, Proteus mirabilis
atgacatggttacataataatgctgaatgggtattctctggtattggcgtttatgtcatatcacttgtggttttaatcataacagtgttggtatttaggaaaaaaataaaagcaggcgttcaaaaaatcgctaaagtttttgttttcggatggggtaatacaacaaatatcaatcaagacgatggaaaataa

SEQ ID NO: 315313 - DNA, 462 bp, Proteus mirabilis
atgttaactggtgtccgaacccaagagatgcgctttgctacgtgggatgaggtaaatcttgagaaaggtatatgggaaatccccgctgaacggatgaaaatgcgtaggcctcacattgtgcccctatctactcaggtgatcgatcttttcaagcaactcaaaccaataaccggtcattatccctacatttttattggtaggaataaccgtagtaaaccaatctctaaagaaagcgtgtcacaggtgattgagttacttggttacaaaggacgcgctacaggtcacggatttaaacatacaatgtcgacaatcttgcatgaacaaggatttgatagtacatggattgagatacaattagcacatacagataaaaatgctattcgaggaacctataatcatgctatatatttggaaaataggcgaataatgttacagtggtattctgataacttaataacttga

SEQ ID NO: 315314 - DNA, 327 bp, Proteus mirabilis
atggcacttacagatatacaaatcaaacgagcaaagccccaagacaagccatatacattgaacgacgggcaaggcctatcattgcttatcaatcccgatggctcgaagggctggcgttttcgtttccgctttgccgggaaagcgcggttaatgtcatttggcagctacgatttggtaagccttgcagaagcgcgtgagaagcgttacgccgtccgtaagcaagttgctaatggcattgacccagtagaggaaagtagaggaacgaaaagcattaaaactcgctcaaaagctatcaacagaaaactctttcgaatcagtaagccgtga

SEQ ID NO: 315315 - DNA, 252 bp, Proteus mirabilis
atggcaaataatacacgtcaagcttcaggaactatggagcttcgctatgaatggaacgagtctagtagtgggcatgtagaacatacacatgaaattattttatctgctcaaggtgcaaccgtgattctacaagaagtaacaaatacaacaaattttatcaaaaataatgagtcagatagttcaaatgtgagttatgtaatacctgtgtctctactcatatctttaattaaagataatggaacacgccagtag

SEQ ID NO: 315316 - DNA, 948 bp, Proteus mirabilis
atgattacaggaacgctagagagttatgatacaataattaaaaatatagatgagcttatttcttatcttcaatcattacaaatagaagctgagttaaactctcacctagaggatgattatttggatgctcatttgttttatgagtcatataagaaatcacctagtgatatatcttgttcaaaggggctgcaagctcttggtggattacatgaattatataaatggatttggtcggttaaagatactagcgaatttgataaacttaagtctcatctagctcttcttgttcaggctgctccaaggattaattctagtactccattcttaagtccggttaccaataagcaagatgataagactaataaatttattgaggcaattgttggtttctttgctgttgcatatggtcgcgatgtagatcttgatgaccctataaattcttctgggggagaaaatcctgatgtgattttcacataccaaggtaaacgagtatctattgcatgtaaaacactacatagtaagaatcctacaacaatacttcaaaatatagattcagcagccaagcaaattactcgggcatcttgtgacaaaggctatatattactaaatggcatgaacattattgaccatggtaaaattcaaggaaaagtatttaatacagaaaaagaaccattcaatatattaagattagatcttgaaagtatttaccaatctgtattaaataattgcaagtgtgaacttgaagaaatattttctttaaatcctaaggctattcctatcgtaataacgactattcattctgttactcaactgaatagcaattttggtgtactatcgacatccttgaaaggaactatcattacaaactttagaaatgaagatgagtatgatgaacaatatctaacattaccaatacagtttaataattttattcataacattatttga

SEQ ID NO: 315317 - DNA, 393 bp, Proteus mirabilis
gtgaatgcagccttaactcaggttgaaaaagaactcaaacaaacgggattggcgcatcagaaacccgccgtcaatgcgctgaatcaggtggttacagcagctaatgaatccgtgagtgcaatgcgacgtgaaatgtcacgttatacgtggaaatccgcgatttatatcgccctgacaatggttgctgtcatggggggctgtctctgggggatgttttattttattgacagtggctatgaccgaattgcaaaaatgcagcgcatggaagctgtctggcagaaaaaagccccgctggctgatatctctacgtgtgacggaaaaccctgtgtgaaagtggatacccgtcagtcgtatggtgataaaaaagacacctatctgattatcaaacaataa

SEQ ID NO: 315318 - DNA, 2637 bp, Proteus mirabilis
atggcgaagaaaccgaaatccgccggcggagagaagctgctgtttaacaagcttaaccaatttgatgagccggggctgttccacgaccattatgagacgccggattatattcaggcaaatctgaaagataccctgcgcccgtatcaacaccgcgcgttgcgttacctgcattacacgcagcgtaaacgggatgaggcgcaactgcattaccgtcacctgctgtttcacatggcaaccggtgccggtaaaaccatggtgatggcgggcacgatactctatctgtttaaagagtacgggtatcagaattttatcttcttcgtgcataccgacgcgattatccagaaaacccgtgaaaacctgcttaatccgctgtcgcctaaatacttattcagtcaggaagtcgaaatcgacggggaaaaaatcaccattgcaccggtggagacgttcccggccgcgccggagcgcaacacgatttacctcaagctctcgaccatccacaagatgcacgatgagctgaacagctaccgtgaaaacagcatcacctacgaggatttaaaagaaattccgctcgtgctgctcggtgacgaggcgcatcacttcaacgccggcacgaaagccaaaggcaaagcgaaaaactcaccggaaaacgaggagcagacgtgggagcgcacgattgagaacatccttaacctacgcccggataaccgcctgttcgaattcaccgccaccattgacctcgccaataaagacatcgggcaaaaataccgtgacaaagtagtgtatcagtatgatttaaaacagttcatgtcagacggttactcgaaaaaagttatgttactggaagcgaaccagaacgacactgacaagatgctcgatgcggtactgttaagccagtaccgtaaattggtcgcagcggatcacggcatcactggtttcaaaccggtcattttgttcaaatcgaataaaatcgccatctcgaaagcgaagcaggatgaattttcgcaactgattgccgcactgacacccgagagcgtcagacgccatctggcgaataaaaaagtacaactcagttctgacaccagtatctggcacaaagtgatacagcgttatgctgacagcgatttggtaactgttaccggacagattcaggaagattttaacgatttcaacctgctaaacgtcaataaagtagacctgctggaagaaaaccccgtcctgctaaacacgctggaagaagccgataatccggtgagagcagtattcgccgtggcgaaagtcaacgaaggctgggacgtccttaacctctacgacatcgtccgcatcagcgaacaggcgagcagcagcaaaaccggcacagacagcgaagctcagcttatcgggcgcggtgcgcgttactacccgtttgtttatgacggtaaacgcagcttcacccgccggtttgataacagcgcgaaggatttaagcgtactggagcaactgcactaccacaccatcaatgaaccagcgtatatcaaaacgctgcacgcatcccttgaacaagcagacattgacgcacatcaggatggcggcggcacaattgaacacgccagactgaaagccgactttaaaaaatccacggtgtatcagaccggaaagctgtatttcaacgaagtggaagaaatcgagagcagcagccgtaactgggaaacgtactcactggaaacgcgctttgaaataccgtatcaaactgccggtgaggagtcgctggacaacctgacagaaacaacacataacgtcaccaaacgcgaagaactggtgctggatgcgcgtttttaccgcaaggcgatgcagaaaatccgtttctacgcactggataacctgcaacgttttttcccgaagctgaccagtattcgagagtttatcaacagcaaggcctatctaggcaagctggtcatcactgtcaccgtgccgcagtcactggatttctccgccgtaccggcaaaagacaaactgcaccttctggaaaccgtcctgctgcgtattgcagagaacgtacgacgcaatgaccagaaagtgaaaggcacgtaccgctttatcagtcagccggtgaaagacgtcatcaaggactacagcctgcacattgacccgtcggttatcattaaccagaaaatcacggccacaccgacgatcggtaaaaaatggtacgtgtatgacaatgcgatactgaatcagctcgagcatcgtctgatgaaaacgctggaaacctttatgccgaaactcaaagcccgttacgacgatatttacgtgctacgtaacgacgagcagtcaacgcgctttaagctcacagaattcggcggtgtacgcggttttatgccggatttcatcatgatactgacgcgccatgcggataatgcttactggcaggttttccttgagccgaaaggggatgacaggttgcgggaagacgcatggaaagagcgaatgctggaaaccctgaatgaccgtgaacgcattgtgattgatgaaaatgaggacgtcagactggtcgggattaagttctttgccaacagtcagatggacgcattcgtcaccgacatgcagaaccgactgaatgaaggcgaaccacttgaaaccacctcgctgtcactgcctttgtag

SEQ ID NO: 315319 - DNA, 1935 bp, Proteus mirabilis
atgaaaactgaattaatgaaaaatttaatattagttttatctaatttcccacatttctgggatggaaatgaactaaaccgttcgatggttattaatgctattaataacaaagaacctgatattataaaagcattggttaataataagaaaatatcatcaatttacggagtaaaaattgataatatttttatttttgatttcgacggattatgtagattacttaaatataaagagtattgggatagcagcttcactaagtatagaaataaaataggtttaactgttgaaaataaatatattgactacaattctgatgttgtattgagttttccttttaaggattgtgtgcttgaaggaggaatgacaaaagaggatgaacctaaaaacgaagtctattataataatataatagcaaaagatgaaattgaccgtattttttcagagaaagttttaactaatacgaatctttacactaaagatagtataaccaatgatattatagacgcacaagcttctaataactttatcattaaaggaaataacttaattgcattacactctttaaaaaaaaagtataaaaataaagtaaagctaatttatattgatcctccatacaacccaccaagtaataacaatacattttcatacaataataaatttaatcattcaacatggttaacctttatgaaaaacaggttggaagcagctaaagacttgttaagaaaagatggtgtattcataatagcaatagatgaaaatgaggttcattatttaggcgtattgataaatgaattattccctgattatgaaagccactgcataacaataatacataaccctagaggcgtgcaaggtactaatttttcatattgtcatgaatatgctttttttatatttccaagaggtatgaaggtaatcggaaatagaaagatagaaaaagaagatatagatttttctaatttaagaaactggggttctgaaagcgaaagaaaagatgccaaaaattgtttttatggaattgttgtaaacaaaaaaaacaaccagataatcgaatttatggatatatcagatgataattatcaccctgatatgaacgtacatttaaatgatgaattggttgtaatttacccaatagataagagtggagtagaaagaaaatggagatatgcgagacaatcagtagaaaaagtaaaagatttattaaaagtaaaaaataacaaagggatttatgacattcaaattgggaaagattttggttcatataaaacagtttgggcgaatccaaagtatgacgcaaatgagtatggaacaaagattgtaaatagtctagtaaaaaacaataattttagttttcctaaatcattatggaatgtttatgactgcattcatgcagtaactgcaaacgataaagatgcaattatattagactaccacgcaggttctggaacaacagcacatgcagtaatggaattaaacaaagaagatgatggaaacagaaaatttattcttattgagcagatggattatataaaaaatataacatgtgaaagagtttactctgttataaagaaaaataataataatactagttttatatatacggaattaatggagctgaacgcctacttcgtgcatgaaatccagaaagcgcagtccactgaggaactcgaaaaactctttgcggtgatgaaaacagaggcgcacctcaattatcaggtggcgttggaaaacgtgctgtctgccgagtacgagatggacggcattccgcgtaaagtcgcgttcagtgaactggagttgcacgaacagaaacaactactgattgagatcctcgataaaaatcagctttatgtgaacgcctccgagatggatgacagtgacctgaatatctcagaaagtgacaaagcctttacccgcagcttctacgggatggagtaa

SEQ ID NO: 315320 - DNA, 423 bp, Proteus mirabilis
atgattcttagtatagaagatgttgagctgcgtttgttgcatattggttataagaatgtaaatcttaaagagttgatggatgtgtttttttctagagttattagtagagatcataatactagaagtcacggggttcattcaattggtgttgctcaagcatttttattagacaacccagattgtgttggcattataaaaaattcctcttttgaaccttttaatctaaggggtaatccttctgtcatgactcgttttacagccttcatgtcagataaaacagggcgttttggaccagagttaaagtattcttttgatatattcaaaaacattcttcctctgaatttaggagggaatgtttctggcggaggcggtggtgggcacgaatttaaaatcgcattaaggttaatagctgaaatgtattaa

SEQ ID NO: 315321 - DNA, 231 bp, Proteus mirabilis
atgagtaattttaataaaacctatgaccgtacttcgacaggaaaaaagcgcaattatcgaaaaactcaataccgtttttactggcgtaatccatcatggtggaacaggatttatacaaccaaaaaaagacgggaagatgacagaaaaaatctgttaaagatcataaaaggttgtgatcctgagtgtttcatatggatgcctgacaaaaaaccagacagttatttctggtaa

SEQ ID NO: 315322 - DNA, 414 bp, Proteus mirabilis
atggcacaggtatcaatcagtgaagcagctaggcttataggtaaaagtagaacaacactacaccgttatatatcaacaggaaaattgtccacatgtacagatgaacacggggcaaaaaaactagatacatcagagttattgcgcgtatttggtgcattcaaacatgttcaccaatcacacagtgacaatgtaacaactgaacagcatgtaacaacccaaagaacaactgacacagataaaacatctcaattggaacaagagattgaacacttaagacaactagttactgcgcagcaatcacacatagatagcttaaaacaagccatgttgttaattgaatccaagctgccgacaacacccgaacctgttgtaccagtaccaacaaaaaaaccgtggcaattctggaaaaaatag

SEQ ID NO: 315323 - DNA, 945 bp, Proteus mirabilis
atgtctgaattagtggtgtttaaagcgaacgagttggccgtaagtcgctatgacttaaccgaacatgaaactaagctgattttatgtggtgtagctctactcaatccaactgaaaaccctacggaagaacaacgaacggttacattcacctatcaacaatacgctcagatgatggggattagccgagaaaatgcatacaaagcattagttaaatcagcaagggatttaatgactcggacagtagaggtaaaagatcctctggtgaaaggctttgaaatttttcagtgggtcaattacgccagatttaccagtgagcatttgatgctaatttttagtcctcatattgtcccatatctgttccacttaaaaaaattcataaaatacaatctggagcatgttaaagcctttgaaaacaagtattccatgcgagtgtatgagtggttactcaaagagttaacgcaacgcaaaacgcacaaggcaaacattgaaatcagtattgctgattttaaatttatgctgatgctggaaaataactatcctgaatttaaacaccttaagtatagggttctagagccagtcactaaggatttaaatacttacagcaacatgaagttgaatatagataaacgaggtcgccctgccgatactctgatttttcaagttgaactggataagcaaattgaccttgtgactgaattagcaaaagatccagcatcaaaaaaagaagataagacaatccgtttaacgcctgaaaatcgtcttcatgaggggctaaaaacaacattgcatgatgctttaactgcaaaaattcagctgactagttttgaagcaaaattcctgagcgatatgcaaagcaagtacgatctcaacggctcatttacatggctgactcaaaaacaacgaaccacgctagagaaaatattggcaaaatacagacggctctga

SEQ ID NO: 315324 - DNA, 456 bp, Proteus mirabilis; identical to SEQ ID NO: 281511

SEQ ID NO: 315325 - DNA, 2319 bp, Proteus mirabilis
atgcaacaagaagaaaacaacacacaggcaacccaagccgaaatacgtcgcaaacgtaaaatttcgactttttggttactccctgttatcgctatttttattgcgagttggttgcttttccaacactggcaagaaaaaggcgtacaaatcaccatcgattttcaatcagcctctggtattgtttcagggagaacacctatccgttaccaaggtgttgatgtaggtattgtacaggacgtgacgctcagtaatgatttacgccgagtcattgttaccgctgatattcgaaaaaaccttgctaatgcattacgtaaaaatacgcaattttggcttgttaccccaaaagccagtctttctggtgtttcgggattagatgccttagtgggaggcaactatatcagtatgcttcctggagatggggaaaagcagtttcaatttgttgctcaagaggttcgtcctaaagccaacattgataaaaaccaacaaattatcaccttaacggcggataatttaggctctcttaatgtcgactctcaagtttattatcgcaaagttccggtcggtaaagtttacagctatgccatacgtccagataatcaaggtatttttatcgagctgagtattgataaacaatatgctcatctgatccgtcaagatagtcatttttggaatgtatccggctttcagggcaactttaatctaaagagtggtgcttctattaaaatggaaagtgtttctgctttaattaatggtgctattgcctttgattctccggaaaatagtcccccagcccaagaaaatcaacaatttgtgctacagtctgccacttccgtggatgcaggcaaagccttatatggtgaagatggattaattatctcattaaccagtgaagagagctggggtgtagatgccgggcaacctattctatttagaggcattacgataggacaaattattcagcgcaacatcagtgatgatggggttattttcgatgccatcattgcacctgaatataaacactatatttacgaaaacagcaaatttgtcgctaatagccgaattaacgtcaatatgggcttaaatggtattgagatccaaggagccacacctcaagagtggcttgaaggcggtatccaccttattccgggtagccaaggcgcccctaaagaacaatatcgcctttatcgcaatgatttttatgctaaagcaagtattgagggcaatgagttacctgtcactttgacacttaaagcagctagtttaccgggtattcaaaaaggttccgtggtgctttaccaccaattccaagttggagaaatcgtcgatgtacggcctttaatggatgaatttgatattgatgtccatatttctaaacaatatcgtcacctgcttactgaaaagagtgtgttctggactgaaggtgctgcgaaggtttcattaaatggtgcgggattaacggtagaagcaacgccgctaaaccgtgccttaaaaggcgcgataagctttgataactttgaaaatattaataacaatgtttcaagatataaactttatcctagcgaaacgagtgctagagccattggtgctcaaattactttaaaaacctacgatgccagtaaactttctgaaggaatgcctattcgttatctaggtattgatatcggtcaggtggaaacgctaaccctttctgcggataaaaaagcggtgagtgtatcagcggtactctaccctgaatatgtgaaaacttttgcacgttcaggaagccgatttgcggtagtcacccctgagttaaccgcttcaggcctcgataatttagattctcttattcagccttatatcaaggcagagccaggcaatggtggcgtataccgcatatttgaattacaaacggcaaatattaccgactctcggtatctagacggccttaaccttgtattgaatgcgactgaagcaggatctgtgcaaattggcacacctatctattatcgtggtttagaagtaggtgcggtaaccggactagaattaggtaatatgtctgacagagtattgatccacattagaattagtcagaaatatcaatatctggtacgtaataacacagagttttggctttcatcaggttataacttctcatttggtttaactggtggagtattccgcagcggtacatttaagcagtttatacgtggtggcattacatttgctacaccgccatcaaccccactccaggctaaagcaaaacaagagcagaatttcattctcaatgctaaagagccaaaagagtggaatgaatggggtactgcgatacctaagccataa

SEQ ID NO: 315326 - DNA, 1407 bp, Proteus mirabilis
atgtcaaaacagcaaatcggcgtggttggtatggcagtgatgggacgtaaccttgcgctaaacattgaaagccgtggttacactgtatctatctacaaccgctcgagcgataaaaccaatgaagtgatcgctgaaaatccaggtaaaaaactggttccgaattactctattgaggaatttgttgattcattagaaaaaccgcgtcgtattttgttaatggttaaagcgggtgaagcaacagataaaaccatcgcagcgctgacaccacatttagataagggcgatatccttattgatggcggaaatactttctttaaagatactattcgtcgtaatcgtgagctatcggctcaaggttttaactttattggtacgggtgtttctggtggtgaagaaggggcattaaaaggaccttctattatgcctggtggtcaaaaagaagcctatgagttagttgctcctattcttgagaaaattgccgcggtggcagatggcgagccttgtgtcacttatattggtgcagatggtgcaggccactatgtgaaaatggtacacaatggtatcgaatatggtgatatgcaactgatagcagaagcttattcagtattaaaacactcactaggtttaactaacgaagagttagcggacacttttaccgagtggaataaaggcgaattaagtagctaccttattgaaattactgctgatattttccgtaagaaagatgaagaaggtaactaccttgttgatgttattcttgatgaagcggcaaataaaggcaccggtaaatggactagccaaagctctttagacttaggtgttcctgttacgttgattacagaatctgtttttgcacgttatatttcttcactgaaagatcaacgtgtggcggcatctaaagtattatcaggtccaacaccaaaagcatttactggtgataaaaaagcctttatcgagaatgttcgtcgtgcactatatttaggtaaaatcgtctcttatgcgcaaggcttccaacaattgaaagctgcatcagatgaatataactgggatctaaattacggtgaaattgcgaaaattttccgtgcaggttgtatcattcgtgctcaattcttacaaaaaatcactgatgcctataatgacgatgcgaatatcgctaatttattattagcaccttactttaaaaatatcgctgatgagtatcaacaagcattgcgtgatgttgtttgttatggtgttcaagcaggtattcctacgccaacattctctgcggctatctcttattacgatagctaccgtgcgcaagtgttaccagcaaacttaattcaagcacaacgtgactattttggtgcgcatacttataaacgtactgataaagaaggcgtattccatactgagtggatggagtaa

SEQ ID NO: 315327 - DNA, 1329 bp, Proteus mirabilis
atggatacaaccaaagctggttctatcgcacagggtaatacccaaagtgattacaaaacatggcgtaagtcagacacagtatggatgctcggtttgtatggtacagctatcggtgctggcgttctgtttttacctatcaatgccgggattggtggcttaattcctctgttgattatgttagtacttgcttttcctatgaccttttttgcacaccgtggtatgtgtcgctttgtgctatcaggtaaaaatccaggtgaagatattactgaagtggttgaagaacactttggtaaaacagcaggtgtattaatcactctgctctatttctttgctatttatcctatcttgttggtttacagtgtcgctatcactaatacggtagaaagctttattgttcaccaaatgcatatgacagcaccgcctcgtgcgattttatcactggtactgattgtcggtattatgtgtatcattcgctttggtgaacaagctattgttaaagcaatgagtgtcttagtattcccattcgttgccatcttgatggtacttgctttatacctcattcctgaatggaatggtgccattcttgatacgctctcttttgatcacgcctcaacttctggtatgagccaaggcttgttagtaaccttatggttagctatccctgtgatggtgttctcttttaaccactcaccaatcatctctgcttttgctgtggcaaaacgcgaagagtacggtgacaatgcagagaaaaaatgttcacgcatcttagcttatgctcatattatgatggtgatcactgttatgttcttcgtgtttagctgcgtatttagcttaacaccagaaaatttagctgaagcaaaagagcaaaacatcagtattctgtcttatcttgctaaccactttgaagcacccgttatcgcttacattgcacctttcattgcctttgttgcgattactaaatctttcttaggtcactatttaggggctcgtgaaggtttcaatggcttaattatcaaagggatgcgcggaattggtaagaatgtcgaaaaagatcgtttaaacaaaatcacagctctgtttatgttggttacaacgtggatcgttgcaacattaaacccaagtatccttggtatgattgaaacactgggtggcccaatcatcgcaatgttactgttcttaatgcctatgtatgctatccgtaaagtaccagcgatgaaaaaatatcaaggccatattagcaacgtatttgttgttatcatgggtctgattgcaatctcagcggttttctacaccttaggtaatactttcattaattatttctttaactaa

SEQ ID NO: 315328 - DNA, 732 bp, Proteus mirabilis
atgacaaactatgatttcagagcactcaataatgaagagtttgaaagactagctacagacctcttaagcaagagagaaaatatacttattgagcgttttaaatcaggaaaagatggtggaattgatggtcgtttttatcactctggcgaagtaataatccaagttaaacactatgttaaaactggttatagtggattattaagtaaacttaaaagcgaagaagttgcaaaagttgaaaacttaaaacctaatcgatacattttcatcacaagcgttggtttatcccctgctaataaaaaagaaatcttcgatttatttaatccttacattctaagcaataatgacatcattggtcctgagcatctaaatgatcttttaacactttaccccgatatagaacggaaccattacaaactttggctttccagtacaaattttttaatgagtgtactaaataatgctgcgattcaaaatagtaacttcctgattgaagatgctaggaaagaatcatacaaattcatcgaaaccaagcaattaaaaaaagcgttagagattttagatgaaaataaagttgtaattataactggtttacctggcgttggtaaaaccactcttgcaaaacaagtgatgcttatgcattgtaatcgcggctatgaaatttaccacattgaaggatcaatttcggaaatagaatcctgtctcttatacacatctccgagcccacgagactag

SEQ ID NO: 315329 - DNA, 423 bp, Proteus mirabilis
atggagcgcagagaagcggagcgacaggctcagcactgtcgtgatgaatgtaacagcgtgattgatgtgaccaccacgctacgggaagccctcagcgagcgtgataatctgacactgaaacacgagcagacgtcagagcctcagtcgaaagcgacttcagacaaagcgtttgattttgaaaaagagtctgaaaaactgacaccgttggtcaatgatgccttgagtgagatacaagacgaaattgaccttcaatccttgattaatgactcgatggcagagtttcagaatattcatcaggaactggtcaggcagcaggcgcgtgagcgactggctgagaagcaacgccagcaggaaaaagaacggcagcgactcgccgagcagaaacgacaaaagccggataaaggctggtcattttcccgatag

SEQ ID NO: 315330 - DNA, 150 bp, Proteus mirabilis
atggcgatgctgacactctaccgcgatgtggcactccgcgtgattgaaacacagaaatttgatatcgatataacgctggcagataaaattattgcactggtcactgaccggctgaatgccgatgatttacttgcgccggagaatgaataa

SEQ ID NO: 315331 - DNA, 735 bp, Proteus mirabilis
ttgatacaagataataccaccgttgaatgggatgaaaagcgcggtacacttcttgcgtggcaacagcgccaattaggtcagttaaccgttagccaaatgccattagataaacctaataaagcgcaaatgcaaacggcattattaaattggttacgtaaacaaggattaagtgctctacccttaagtgaagagagcaagcaattgtttattcgccttgctttagcgcaaaagtggtgccctgaggccaatttacctgtattgaatgaagccgttttattagactcattagaattgtggttacaacctgaattaggcgatacccaatcacttaaggcactgctacaaatggatattaatgggataattaaaaatcagttaacttggcatgagcaacaattattgcaagagctgttcccaacacactatattgctccaacgggcactaaagtgatgattaaatatgatttagataatccgccgattattgctatcaggatccaagaggtttatggtgaaaaacaaagtcctattgtggcaaaagggcaattacctgtagtgatggagttactttctccggctatgcgacctatccaaaaaacacaagatctcgctactttttgggccggaagctatacacaagtgcaaaaagagatgaaggggcgatatcccaaacatttgtggccagattcacccgcaacaacggcccccactcgacgtgtaaaaaaatggagttag

SEQ ID NO: 315332 - DNA, 498 bp, Proteus mirabilis
atgcttttttcaagttcaggaaaagacaagattcttggaagtgagtattttgataaagaaatatcatccattgtaagcatagcaggtttatctcttaatacgcgaaaaaaaatttttaagaaaagtattatttcactcaatggttatgtgattgaaaataaaaatggtggcggcgagcgaggaaatttaagaatatctaatcggaaaacatacttaatacgaaaagcattggataaatataaaaaaggatattctaaagaatatatatgtaaaaaagtattttcagtcaaaccgcctgttattaagtatagaaataatgcgaccttattcaagaaagagttctataactctcaattttctaataagttcgcaggttaccgctcatacttaatatcattaattaaatttaataataaatttggatgttttcaagataaggaaattacaaaatactctgtacttattgaggaaatatctcaagtactactaaaatcctaa

SEQ ID NO: 315333 - DNA, 3228 bp, Proteus mirabilis
atggctaaaagaacagatattaaaacaatcctgattttaggtgcaggcccgattgtgattggtcaagcgtgtgaatttgactattcaggcgcacaagcgtgtaaggcactgcgcgaagagggatatcgtgttgttttggtaaattcaaatcctgctaccattatgacagatcctgaaatggcagatgccacttatattgagcctattcattggcaagtggtcagaaagattattgagaaagagcgccctgatgccatattaccgacaatgggcggacaaacggcattaaactgtgccttagaattagagcgtcaaggggtgttagctgaatttggcgtaacaatgataggtgcaacggctgatgctattgataaagcggaagatagacaacgctttgataaagcgatgaaaaaaattggtctggatacggctcgttcaggcatcgctcatactatggacgaagcatttgcaatggctgagcaagtgggtttcccttgtattattcgcccttcatttactatggggggaacagggggcgggatcgcctataatcgcgaagaatttgaagaaatttgtactcgaggcttagatttatcaccgaccaatgaactattaattgatgaatcattaattggctggaaagagtatgaaatggaagtggtgcgcgataaaaatgataactgtattatcgtttgctccattgaaaactttgatgcgatggggatccataccggtgactctatcacggttgctccagcgcaaacgctaacagacaaagaatatcaaattatgcgtaatgcctcgatggcagtattacgcgagattggggttgaaaccggtggctccaatgtgcaatttgccgttgatcctaaaacagggcgtttaattgttattgaaatgaaccctcgtgtttctcgctcatcagcattagcgtcaaaagcaacaggtttcccaattgcaaaagtcgcggcaaaacttgcagtaggttataccctcgatgaattgatgaatgatatcactggaggaagaactccagcctcttttgaaccttctattgattatgtagtgactaaaatccctcgctttaactttgaaaaatttgccggtaccaatgaccgtttaaccacgcaaatgaaatctgttggtgaggtgatggctattgggcgtactcaacaagagtcaatgcaaaaagcattacgcggactagaggttggtgcaactgggtttgatcctaaagtaaacctcgacgatcccgaagcgctcaccaaaattcgtcgtgaattaaaagaagccggatcggatcgcatttggtatatcgcggatgctttccgcgctggaatgtcggttgatggggtgtttaatctcaccaatatcgatcgttggttcttagtgcaaatagaagagattgttcgcctagaagagcaagtggcacaacttggtttagctggtctaaatgctgatttcttgcgtcaattaaaacgtaaaggttttgcggatgcacgcctagctaatatcttgaatgtgaaagagcaagtcattcgccaactacgggaacaatatcaattacacccagtttataaacgggttgatacttgtgcggcagaatttgctacggatactgcttatatgtactccacttatgaagaagaatgtgagtcggatccaaatcaagacaaacctaaagtgatggtcttaggtggtggtccaaatcgtattggtcaggggatagagtttgattattgttgtgttcatgccgctctagcattacgggaagatgggtatgaaaccattatggtcaattgtaatccagaaacggtttcaacggattatgatacttccgatagactttattttgagccagtcacccttgaagatgtattagaaattgtacggatcgaaaaaccacaaggcgtgattgtgcaatatggtggtcaaacaccattaaaattagcaagagctttagaagctgaaggggtgcctgttatcggtaccagtcctgatgcaatcgataaagcagaagacagagaacgtttccaaaaggccgtggataagttagggttaaaacaaccagaaaatgccacagtgacgacattagaagaagcggtagagaaggcaaaatctattggttacccgctggtggtacgtccatcttatgtccttggtggacgagcaatggaaattgtttacgatgaaattgatttacgtcgttatttccaaacggcagtcagtgtttctaatgatgctcccgtactgttagaccgattcctagatgatgccattgaagtggatgttgatgcgatttgtgacggtcagcaagtggtgataggcggtattatggagcatatcgaacaagcgggtgttcactctggagactctgcttgctctctacctgcttatactttaagccaagatattcaagatataatgcgcaagcaagtacgtgaacttgcttttgaattaggcgttaaagggttgatgaacgtacagtttgcggtgaaaggtaatgatgtttatcttatcgaagtgaatcctcgcgccgcacgtacagtgccttttgtctctaaagcaaccggtgtgccattagcaaaagttgctgctcgagtaatgataggacaaagtcttgaacagcaaggcgttaccaaagaggtgatccctccttactactcggttaaagaggtggtactcccctttaataaattctcaggtgtcgaccctattttagggcctgaaatgcgatctaccggtgaagtgatgggggttggtgctacctttgcacaagcttttgctaaggcgatgttaggtagcaattccaccatgaagaaaaaaggaagagcgctactttcggttcgcgaaggtgataaaaagcgtgtcgttgatttagcaactaagctattgaaaaatggttttgagttagatgcaacacatggtactgccattgtcttgggggaagccggtatcaatcctcgcctagtgaataaagtgcatgaagggcgacctcatattcaagatagaattaaaaatggtgagtatgactatattgtcaatacgactgccggtcgccaagctattgaggattcaaaactgatccgccgtagtgcattacaatataaagttcactatgacactacattaaatggcggatttgcgacaacactgtcattgagtgctgatcctactattgatgttatttcagtccaagagatgcatgcaaagataaaaaaatcttaa

SEQ ID NO: 315334 - DNA, 348 bp, Proteus mirabilis
atgccacctcgcataccccgcgcgtgtcgtaaacagggatgcgccaagacaacaacagaacgtaacggttactgtgaagatcatcagaacctaggatgggaaacccaccagcgtggtaagtctcgccatcaacgtggttatggtacaaagtgggataaactacgagctcgcatactcaagcgtgataagtatctgtgccaagaatgcttaaaagcagggcgagcaaccgaagcaaaaacagttgaccatatcattgctaaggcgcatgggggtaccgatgcggaagagaaccttcagtcgttatgtattccatgtcatagagctaagacagcaaaggaagggaaataa

SEQ ID NO: 315335 - DNA, 963 bp, Proteus mirabilis
atgcgtcttaacctttacacgaagcttgtcaaaattcagcctcggaatcgtaggcaaattgatagcttcttatataatgcgcccaatcgttataaagtttacagtattcccaaacggaatggtggtgaaaggattatcgcacatccatcacgtgaacttaaaaacttccaatacaatcttattgatattttggaacctcttctaaaaatacacccaaatgccctcgcatacaggaaaggcttaggaataaaaaaaaatgcgagcttacatgcccaaaactcttacattcttaaattggatttttctgatttttttaatagcattactcccgatttactttttacagcatgtactcaaaatgaatatgagttatcttcagcagagaaaagggtcttaacaaaaggattattttggaacaaagcaaagagccaatcagcaagactttctctcagtgttggagctcctagttcaccacttatatcaaatattataatgtattattttgatgaaacatttactgatatttgtaatcaacgagggattgtttacactcgttatgcagatgatcttacgttttcaacaaacaaaaaaaatatcttgtttaacttacctgatgaaataagatttttcctcaataaggaatataaaaacctaataacattgaatgagcgaaaaacagtatttacatctcgggctcataaccgccatataacaggaataacgataacaacggaaggttcgttatcggtagggcgagagcgtaaacgattaatatcttcgcttattcatagatatacacttgatagtctctctcccgatatgacttattatttacagggattattgtcatttgctatttatatagagcccgattttcgagataggatgtctaaaaaatattctagtcatattattacaaaactaattaaattgaggaaagaagatggaacctattgtgaatag

SEQ ID NO: 315336 - DNA, 156 bp, Proteus mirabilis
atgttaaaaattagaatatcacgcccctcagaagcacctgaaatcatacaaatctggaaaaattcagtcgatgctacacatgactttctgacagctgacgatcgccaagagattgaaaaagaagttatcggttttttttccgaaacaccggtatga

SEQ ID NO: 315337 - DNA, 630 bp, Proteus mirabilis
atgagggagattcaaaaaaaacaagaacctcgtttacttacagaatatcgctcaaacggaggtgaatatgatggacctaattttacacccgtaaaagaagcaataaaacaatcattattacaagagcaaggtcatctttgtgcttattgtatggctagaataacatccgacaatatgaaagtcgaacactgggcatgtcaatctctttatccatcgcttcaactcgattattctaatttattaggctgttgtatgggagctgaaggaagtaaatatgttgaccaaacatgtgatagtcgaaaaggtaatcaattaattaaattcaatcccagcaaaccacaagatcgaattaattcactaataaaatatgatggtcaagggactatattttctatagacgacgagttttcaattgcaataaataaagttctaaaccttaataaggctcgtcttatcgagaatagattatctatacttaactctattcgaaaagcactttcaaaccgcccaggaaagagaagcaaaaatgaaataaaacagctacttcaagaatatatgacagctaatactcaaaacaaattgaaagaatattgtggacttgtgtattattatttgtcatctaagctataa

SEQ ID NO: 315338 - DNA, 636 bp, Proteus mirabilis
atggaaggatttagtaatctgaatatagaattaaagccaactctacatctttctattgaaaaatataataaaaaaataaatatacttcaactttcacaaggagaaaaatctctacttgctttaattcttgatatttgcagaagaatgatgattttaaatccattttcagaaaatccattgctaacttcaggaattattttaattgatgaaattgatttacatcttcatcctaggtggcaacgagagatattaaaaaacataaaaaatgtttttcccaattgtcaactaatagttaccacccactcaccgcaaattataagtgaagtaaaacataatcaaataattatacttggtaaagatgaccagaataattttagttttcattctccaaaccagtcctatggtttgacatcaaaccaaattctcaatgaaattatgaaaactgataataaaagattagatcgtccagcagaagtacaaaaagaaatagatgctgtatttaaactaatcactaatggtgaacttgaagaggcgaaagctaaaattgtgagaatggaagctgaactcaatggtgaaatccctgaatttattagtgctaaatttgatattgagatgtatgggtgggatgaaaaatga

SEQ ID NO: 315339 - DNA, 1038 bp, Proteus mirabilis
gtggaactaaatgatttaaaaaaacgacttcaacaacatctgggtgatggcctagttctaattattggttcagggttatcttgtgcagaagggatccctgggatgggaaaactcggggagcatctgctctctcatgtccctgataatctttctcctgatgacctaaaactatggaatgagatcaacccctcaatcggaactgatggtttagaagcagccttacttaaacgagccccgacaccatccctcgaagcgatcattgtcaaatctactgggaaatacatttcagcagccgaagccattattatctcggaagtgtttaaaaatgagagaactcttcgacttacaacgttacttcctcatttattaaaaccagataaaggcatacccattgtaacaactaactatgaccgcttagttgagcttgcctgtgaagaagctggcttaggagttgatactatgttcaacgggcattttgctgctcggctagaacctcttaatagccattggcttttttgccgtggggcaaaacttgttggtaagcatgtgcgatataaattcacaccaaaagtgaacgttttcaaaccgcatggcagcttagactggtatcaccgtaaagggaaccctgtgcgatataccggagatctccctcttcctcgtctaatcattacacctggcttgaataagttcaggagcggctacgatagtccctttgacaaacacagggaaaaagctaatgatgcaatcgataaagccagccggttcttgatcataggctatggattcaatgatgatcatttggaaacacacctaacccctcgtattcggtcaggagtaagaactgtaattttgacccgtacactttccgaaaaagctaaagaaatagctaagttaaacaagaatgtaattgcagcagagttccataacgacgcaggaactgatggtacgcacttcatcatcgatggaaatgaaatattttaccctgatattgattactgggatcttaaaggattcgtagaaggagttttatccgtatga

SEQ ID NO: 315340 - DNA, 1749 bp, Proteus mirabilis
atgactagtcctgttcttatatttacagaaaatgaacaaataggccgtgtagctggggtagataccagccgtgtggctattgatgtcaccaactccgaaatgctgacacgtgttggaattggccagttaatagcaatcaagggggctacacaggccgaattcctgattggaatgacagatcgagtaactcggtcattacgagaagaattacctgatccagaagaggatgagtctggaatgctaaccatatcaccgtctgactatatgcaggcctttgtcatcggtacttataggactgttgatggagataaaactgatatattcaaacgaggagccgatagttttccacagatcgatcgtgaatgctttgtgatagaaggcgttaatcttcagcgttttatgggcatacttggtgctggtttacccgacgaagaacgccttaaacttggtactttcgtggcagatcgaagtgctgaggcgattgctagtggggatagatttttccagaggcatgcggccatcctaggaagtactggttccggtaagagttgggctgttgctctaatattagagcgggctgctaagcttaaatatcctaatattgtcgtcttcgatatgcatggtgagtacgccacactggctgataaagccaaaggaggctatgcacaacgattccgcatcgctggaccaggagaccttactgcacctcaagatgatgcactatttctgccatattggttactaaatcgagatgaaatgttgtcgatgattcttgaccgtagcgatcaaaatgcaccaaaccaagcctctcgcttcactcttcatgttcgggatctcaaaggcaaaactctggattcatctggtaagctaaaagtcaaagagacatttactgtagactcaccaataccttacgctatttctgatttagttgatcgtttaactaaggataatataacgaaaggtatcggtaaaactggacagcctgtaaagggggattgggaagacaaactgacacgttttctttcaaggctggaagcaaagcttgatgatcgccgatatggttttatgttttcacctccacctgaagctctagattacggatggcttgctaaacaaattataaaactacttcgcgctgattctggtaacggtattaaaattattgatttttctgaggttcctgctgatgtcctgccagtagtgacaggaactttagcccgtctactctatgatattcaattctggatgagcgcagattctcgaacgccagtcaccttactttgtgatgaagcacatctttatcttcctgtaaaagatgacgcagattcagttcaaaggcaggcactatggtcctttgaacgcattgcaaaagagggtcgtaaatatggtttctcattattagtcgtaagtcagaggccgtcagatgtaagccggactatcctttcccaatgtaacaacttcttagctctcaggttaacaaatgatagcgatcaaaatgtcatcaagaggttggtacctgattccctcactggtctaaccgctatgcttccacttttagatacaggtgaggccttgttactcggagacgcggttcttctaccaacacgtattaaacttgatcaaccgcaggtaaaacctgacagtgccactcgggatttctggaaagaatggggttctcttaatcctgatctagatttattagaaatggctgttgaatgtttaagaagccaatcaagaattaataaataa

SEQ ID NO: 315341 - DNA, 783 bp, Proteus mirabilis
atgcaatttgttaatactgctaaatttctaaaaaatcaagatggaagaatggtgacatttagtaataatggtttaagattcaatcagtttagaattgacagtataattaatagcattaatttcttatcttccaaagataatgttttttacacatcaacaactatagagggttcattgataaataaattttctctaaaactatttgctttatgggttggtgatgtaatcatgaaagactttggtataaaaaatagaaatccgtctagaatgattgatgccttattgcaaaaatatgatataaaaactcaatcaaaacaacttttttcaaaaatattctcaaactgcaaaactactcataacttgtcattgcctcacatgaggttattaaagatcattaaaactagatttgcgaaagaaataattgaggagtttagagaagaaattccagatataaatgatcaggtagcaattcttcgccttgctttttatggtaaaacagaaactctagtgagtatagaaatgcatcacaaaatcgatgaaaaaccgattcataaagatatactagatcttattaacaacttgaaatcgaatagtttctcttttttaacgccttacatgggaaaaacttctggatgggttacaagtttcattaattttagcttaagttactatacaaacttagataaagaaaatgctgaaaaaaaattccgcttggctttccctgagttatcgcatatcttagatcacgcttcttcttcgatagaagctggggaactcaaatga

SEQ ID NO: 315342 - DNA, 135 bp, Proteus mirabilis
atgttgatatcttttttattttctaatatatcgacctgctttgttaacttcttctcatctatccaaaaatcatctccttcacataaagcaatgtatttaccattagaaaaagaaaaagcattaatcccaggctga

SEQ ID NO: 315343 - DNA, 183 bp, Proteus mirabilis
atgatggaacacattattcgctcaagtagtcgtgaaggggatctggttgctgatttctttatggggtcaggtgcaacactgaaagcagcactaaaacttaatcgaaaggttttaggtgtggagcttgagagagagcgatttgaacaaaccgagcaagaaataaaagcatcaatccgtaagtaa

SEQ ID NO: 315344 - DNA, 210 bp, Proteus mirabilis
atgtttggatctgtttgtgtaatattttttgtttcatgtttaactatatcatcaaggcgtttataccaacgaaagaaacttttaaaatcggctttgccagaaagtgtgttattatatccgtcaaaacgattagaaacttctatggatgcagtttcatcaaaatctaccatatcttttgtatttatatctgtagagcgcatgactccataa

SEQ ID NO: 315345 - DNA, 408 bp, Proteus mirabilis
ttgagaatattttttctaattattatcattgctttatcaggttgtgtaacaggtgataaaatatcatcaatacattctgggatgagtaaagacaatgttatatcaataatgggcaaccctgatggagcctcgtcaagcaatgagtatgaaatattaatttatgctaacaggctgatgtctggttggtcttatgataaagccgactataagtttatatttaaaaataattctcttattgaatatggaccagaaaaaataagacaagacaatggcgcttcggctattagagcgatatcagcacaacaaagcctgttattatggcaacaacagcaaaacatctataaaaaaccagtaacagcaacgaactgtacaaaattaggttctaccgttaactgcacgtcatactaa

SEQ ID NO: 315346 - DNA, 180 bp, Proteus mirabilis
atgcagggaactgaaccaacaaaagaagaattgaaagagatagcattcaaaaaacatcgtgaagccgaactagcgtttcatgcgtattttcaagcctgtgaaggtgatgaaagagcttacgcacatgaatcgtatgagaacattagaacggcaaccagaaagagccggaggtatgcataa

SEQ ID NO: 315347 - DNA, 204 bp, Proteus mirabilis
atgaacttactaacacataccgttaccaatgttttaggtgatcctgtacgtcatacctacaaatcggatgatggaacagaaaatgaatattacctaacgctggtagagtgcaattgttatggggtcatttctaacacggaagtgatgactaataccttagagcaagccaaggcaattagagctggctatgagtgggaatcgtga

SEQ ID NO: 315348 - DNA, 366 bp, Proteus mirabilis
atgacagataaagatattgaaaaagagattcaagccaaaggtaaaacagcggcacgtatcacgccagaccatattgaaggcgtaattgctagtgaacattacttcacagctaaagatggtgtcatcggcgttcatgctccgactgcaaaacgttatccagaagatagcgagcttccagagtcattgggtattcttactttttgtgttctggttctaagtaatggtttcactgttactggtgaatcggcatgtgcaagccctgaaaatttcgatgcagaaattgggcgcaaaattgcccgtcaaaatgcggttaataaaatctggatgcttgaaggttatttgttaaagcaaaaactatctgagtga

SEQ ID NO: 315349 - DNA, 228 bp, Proteus mirabilis
atgaaagaaattacacctaaacagcaattagcattagatattttccgattggttggtaaggactcttcagcaacacaagcagcaatggagtttattggtgatagtgaaatcaaagctgagttattcaaagatatgtatcacgcctgccaaactgaatctcaattcttagctcgtgcacagaaatcagtccgagaagtaagccaaatactagacctgttcgcagaatag

SEQ ID NO: 315350 - DNA, 423 bp, Proteus mirabilis
gtgacaaagaaaaataaaggtggtcgcccgtctgattacatgccagagactgctcatgatatctgcgcaaagcttgcagagggagaaagtttacgctctgtgtgcaatcgccaaggcatgccaagcaaggcaacggtatttcgctggctatctgaaaatgctgagtttcgagaccaatacgcgaaggcaacggagcaaagagcggacgcgttattcgaagagatgctagaaatagctgatgatgtacttcctgattctgctgaggtagctaaggctaagcttagaattgataccagaaaatggtcattggctagaatgtctcccaaaaagtatggcgataaggttacacaagaaattactggcgctgatggcggcgcaattcaaatagaaacatcacctatgagttcattattcggtaaatag

SEQ ID NO: 315351 - DNA, 1413 bp, Proteus mirabilis
atgacacagataaaccctatctttatgccattcattgaggcgcaccgttacaaagtcgctaaaggtggcaggggtagcggtaaatcttgggcaatagctaggcttctcgttgaagcagcgaggagacagccagtccgtatactttgcgctcgtgaattgcaaaacagtattagtgactcagttatcaggcttcttgaagatacgatagagagagagggctataacaatgagttcgaaattcagcgcactatgattaaacatcttggcactggcgctgagtttatgttttacggcatcaagaataacccgacaaagattaagtcacttgaaggtgtggatgtttgttgggtggaggaagcagaggcggtaacaaaagagagctgggatattctgatcccgacaattcgaaagcctaactctgaaatatgggtgagctttaacccgaaaaacattcttgatgacacctatcagcgtttcgttgttaacccacctgatgatatttgcttgcttactgccaactataccgacaaccctcacttccctgatgtattgcgattagagatggaggaatgcaaacgcaagaatccaacgctatatcggcatatctggttgggtgagccagtaagcgctagtgatatggctattattaaacgtgaatggttagaggctgctaccgacgcacacaagaagttaggatggaaagctaaaggtgcggtcatttcaactcacgacccgtctgatactggcggtgatgccaagggatatgtttcacgcaggggatcagtagttaacaaagttgcagaaggtttgctaatggatgttaacgagggcgctgattgggctacggagcaagctattaaagatggcgctgatcacttcctatgggatggtgacggattgggtgcggcattacgcaggcaagttactgacgcattcactggaaagcaaataacagtaaccatgttcaaaggtagtgagtctcctttcgatgaggatgcgttatatcaatctggcgcatgggctgatgaagtagttagcggtgacaatagtcgaaccatcggcgatgtattcagaaacaagcgcgcacaattctactatgcattggctgacaggctctatttaacttatcgagcagtagagcatggcgaatatgcaaaccctgacgacatgattagcttcgataaagaagcgattggcgaacagatgttagaaaaactattcgcagagcttacgcaaattcaacgtaagtttaacggtaatggcaagttagagctaatgaccaaggttgatatgaaagtcaaacttggcattccatcgcctaacttggctgactccctcatgatgtctatgtattgtcctgtgattattcatgacgatacagagatttacgttccatcatcttctagttggtaa

SEQ ID NO: 315352 - DNA, 252 bp, Proteus mirabilis
atgaataaagaatttgacagagagcaaatgaaattaggcgttctatatgctcgtaatcatttaattagcgcatactttgcaaactttattaactgtgaagaaaggcagttcgcttacatgatggctcaattaactcatgtagctaaagaatcaattgatattgaattaaagatgggtgatgtattagcttgtaatgatgaagctgaaaaatggattagagaaacattaattcctgcgtgtaaaaaagattaa

SEQ ID NO: 315353 - DNA, 555 bp, Proteus mirabilis
atgaacgaaattaaatcattagcagatggtgataatttaaataacgaaacatggaataactttattgagcggcttaaatatcacaaccaaggcgaaggagttaattatcactacactgcaagcccaatattcacagttagagagaaagtcaaagtaactggtagcgacgatgacgaagttgggatttattgcgaagataattattacgatgatatcgacgaagcatttaatgaccttgaagaagatgtagcatgtaaggttcgtgaatatgtagatgagtttgaagtgtacgaatgggatgaattagacgaccacagtaaagctaatgcaattaataatgtcatatctgattcatatatttactactggaaatgggattacagaacagtaaattcacatctaacaaaagaagcagcagagcgatttattaagcgcaaacaacatgaccacggcaagttatcaatatatgtcgagtctgcttattggtgctgggaattgcgaacaataattgacgcaatgatggatggtaaaattaaatacgttggtgatgaataa

SEQ ID NO: 315354 - DNA, 204 bp, Proteus mirabilis
atgaaatttaaagtcggcgataaggttagactgaaacaatcaagtaaatacattaacaataaagacaaaatatttactgtgacttttgttcattctctttatgttttctgtgaattagaaggcgctgaacatgcgtttaaaccatacaatttggagttaatcaatgaaacaagttcaagcaatgacgacgttagtattaattga

SEQ ID NO: 315355 - DNA, 195 bp, Proteus mirabilis
atggatattatagactcagcaaacgaactagaacaattacacattcaagccgcattatcaaatcgccagccagtaattaaatcaataaatggaatgtgcatctggtgcgaagaaatgccagcagcaccaaatagcgcatattgcagtaaagattgcggagatgatgatgagcaatataagcggaaaaatggatga

SEQ ID NO: 315356 - DNA, 261 bp, Proteus mirabilis
atgagcaatataagcggaaaaatggatgatgtgacgcttgagaacggacgtcgaaagattgcaagggaatgcagagacaaattaaagcaactcaaaaaactcagcgataaacaaagcacagcaatactcaaagattacctacctaagtttaaattaacactcaccaaagaacataaaaagtttccaccaatcatgtggctaacttggtacgtcaatagcatagataaggagattaatggtgacaggaataaccatatctag

SEQ ID NO: 315357 - DNA, 171 bp, Proteus mirabilis
atggaaattaaaattccagatagtaacgacaatgaatggcaagtgaaaatgttacgtcagttgtcaaccaagcttcacgatctgaaagactgtgatgataatttattgttagagcgtattgaaaaatgcgagcaagtcgtcgaagcgttacgtgagtattcaggccactag

SEQ ID NO: 315358 - DNA, 573 bp, Proteus mirabilis
atgaaatatattattgggatcgcggtattgatgctgacggcttgttcaagtgtgcctgataaagcttattatcaattacctgatgtttatcaaggtgcaaataataaggttgttacaaccactgagagcgcaaagcaagatcagatttggattcagcctatccgtttatctgatatgttagttaacacgggcattgtctatcaaaccagtgatatcaattataccgttgctaaccaacatttgtggataaacccgcttgatcaacagctacagcaaaatctggttgtgggattagcaaaagaattccctaatcgagtggtctcgacacaacctattgaagataaacttgctaaattgactgtcaatgttaattattttcaaggtcgatatgacggcaaagtgattattgctggtgattggatatacactcaaggcaataaagtgattagtcagcctttttctgtcgcgttaacacaaacggaagatggctatccggctctggtacgtacgctaggggaaggatggcagaatgtcgtcgctgagatcgcaaaaacaattaaatcacaatattaa

SEQ ID NO: 315359 - DNA, 1674 bp, Proteus mirabilis; identical to SEQ ID NO: 295521

SEQ ID NO: 315360 - DNA, 1047 bp, Proteus mirabilis
ttgagcttttttagcttttacgcgggcaatagcagcggcgacagcagctttacgcggatcggtttccacctcagcctgagcctcagcaggagtgtctatttctgcagttgcttgcgcttgttgagctttcttagcttttacccgagcaatagcagcagccacagcagctttacgcggatcggtttccacctcagctggagtttcagcgggtgtgtctacttttgcagttgcctgtgcttgttgagattttttagcttttacgcgggcaatagcagcagccacagcagctttacgtggatcggtttccacctcagccggagattcagcgggtgtgtctacttttgcggttgcttgcgtttgctgggattttttagcttttacccgagcaatagcagcagccacagcagctttacgcggatcgatttccagctcagcatcagcaggagtttcagtaggtgtgtctacttttgcggttgcttgcgcttgttgagccttcttagcttttacgcgggccaatgctgccgctacagcggctttgcgtggatcggtttccacctcagcctgagtttcagcaggagtgtctacttttgtagttgcttgcgcttgttgagctttcttagcttttacacgagccaatgctgccgctacagcggctttgcgcggatcactttctgcatcggcggtggtatgggtattttgtggtacctgttgtgccaatttagcagcttgttttgctcgggcttcttctttacgttttttgcgtgcagcaatagccgctgcgttgtcaggttgttctcctgctttaacagcaataattttgccaatgccatgtttttcttttacacgagaaagtgcagattgcacttcattttgttggtgatcatcaagcttaactgcagcacgttgatgtcttgcctcacgttcaagcttttctcgttccatacggatttttttcgcttcaaagcgagccttagcttcagccgctcgcttagcttccgcatcaatttctcgtatttctgctttttcttggcggtaatattgcactaa

SEQ ID NO: 315361 - DNA, 480 bp, Proteus mirabilis; identical to SEQ ID NO: 313483

SEQ ID NO: 315362 - DNA, 753 bp, Proteus mirabilis
gtggtcaccgatcaccaaggaaccccgcgagagatattcagtgaaggcggacaagccagttgggcaggaaggttgaatacgtggggccaaatgcagttttggcgttaccgagagggtaaggcggagaatgaccctaattataccgaatgtccttttcgctttgcggggcaatatgaagatgaagaaagtggcttgtattataatcgctttcgctattatgataaggagacaggacagtatctttctccagaccccatagggctattgggtgggctgaatccatatgggtatgtgcattgtccgacggggtgggttgatccgtttgggctggcgggtggagttgggaataaaggggagcctaaaggtacggtcactgtatttagggttcaaggaggcataccgcctaacgcgagccatcgccgaataaaaatagatgatgcgaacaaccctaagattcaaaatgcaactttaaatattagtatcggcgattctaagcatgccgagcacttcaaaaatattagaggtggtgatgcagaagtggtttcattcgaaataccaaaatggtttgatgactttattaaagagaatgctatccctcaaaaaggttacaggacgaatccattaaatcaacaaggaatggctcctaaaatagtagatccaacaacccctggtgattcatatgagctgcctaaaatatgggctaaatggctagaagaaaattctgttcctggttctggaaaagtaaaaaaataa

SEQ ID NO: 315363 - DNA, 1770 bp, Proteus mirabilis
atgaaacctgccatgtcacaaacatttattcccggcaaagatgccgcactggaagactctatcgctagctttcagcaaaaattaactcagttaggttttaacattgaagaagcttcatggttaaatcctgttcctaacgtttggtctgttcatattcgtgataaagattgtccgttatgttttactaacggcaaaggtgctactaaaaaagcagcattggcttcagcattaggcgaatattttgaacgtctctcaaccaattatttcttttctgatttctggctaggtgctgatattgcagaaggtgagtttgttcattacccaaatgaaaaatggtttccactgacagatgatgatgctgtacctgaaggcttattagatgcacgtttacgtcaattttacgatcctgaaggtgagctatgtggcagtgaactggttgatttacaatcaagtaattcagaacgtggtatttgtgccttaccgtttattcgccaatcagataaaacacctgtatatatacctgttaatatcattgcaaatctttatgcatctaatggtatgtcagcaggaaatacgcaaaatgaagctcgagtgcaagggctttctgaagtgtttgaacgctatgtcaaaaatagaattatcagcgaaagaattagcttgcctaaaatcccccatgaagttttagctcgttatcctgctgttattgaagctattacgacattagaaaaagaaggcttccctatttttagttttgatgcatctttagggggacaattccccgttatttgcgtcgtgctgtttaacccacaaaatgggacttgtttcgcttcttttggtgctcaccccgattttggtgtggcattagagcgtactgttactgagttattgcaaggccgtagccttaaagatctcgatgttttcaatccaccgagttttgatgatgaagaagtcggtgaccacactaatcttgaaacccactttatcgactctagtggtttaattagttgggatctgtttaaaaaagatgcagactatccatttgttgattgggatttcagtggttcaaccgaagaagaattccacacattaatgtcactgtgccagcaatgtgatgcagaagtgtatattatggattatgaccatttaggggtttatgcttgccgtattttagtccctggcttatccgatatttatcctgctgaagatctgcaactagccaataacattatgggtgtccattggcgtgataccattctttctttaccaacaagtcatggcacaaaagaagagtacctctcacttattggccaatttgatgaagatggcttagatgactttactcgtatcagagaaatgattggtattgcaccgggtaaagataatggttggagtcatttacgtgtaggtgaattaaaatcaatgttagcactcgctggtggcgatttagaacaagcattagtttgggttgagtggacacaagatttcaacgcatcattatttacaccagcgcgtcaaaattattatcgttgcctgcataatcttttactcctacgtgaagagcatgagcgtgagcctgcacaatatatggaggcattttctcgtatgtatggcgaggaaacactgcaagctgcattaaatgcaattgaaggtaaacaacctttttatggcttgcaacccatagatccatcattagcgaatttgcctgttcatcaatctttattagccgcgtatgaaaaattacaacaagcaaaacgtcaatcgaataaataa

SEQ ID NO: 315364 - DNA, 771 bp, Proteus mirabilis
atgctcaataatgctatcgcgatatctacagcatctaaacgtgttatggagttaagattcaatacgacatatacgcctaaaaaagtcattaatcgtctaccactaaagtctagtaacatagctaaaaaactgcacaataatcaaattacgctaggaacagcctctcgcttagtaggactgaaggggatcggaattagtattctctgtttatcagaattaataaaattaaatataaaggcaaagttaattattgctggtgatggtgaacaaaggacagaattagaacaattagcaagacaaaataatgtacaaaaccatatcagctttattggctatcaatcagatatggataaattttattcagatatcgatatttatttaagtacaccagtaacagagccttttggtttatcttgcattgaagctttagctcaaggtatccctgttatctatcctaatattgacggacaacccgaagcaataaaagataagtattgcggtctaggtattgctcccaaattatctattgatgaatatcataaattaacaaatttagatatcaacttcccctataaagtttatgatcctatctcagatacattaattttacccaaattaatatctccccaaaactgtgctacggctataatagaaataatgaataattatactaactttagccagaatgcgattgaatggtcaaaagaaacgacagattacaatctatttattaaagaatttgaaagtacgataagagatagtcaaatatag

SEQ ID NO: 315365 - DNA, 729 bp, Proteus mirabilis
atgatgatctctttgaaagttatttctctgttattggattatcccagcgaagatctctgggaacatcgtaatgagatcattgatgcattgcaggaagctgacgagcttcctgtcacgcaagtcgcaaaattaatggcgtttattcgtgaactcacgcaacaagatctgctggatgcacaagcgaattacagtgagatttttgatcgaggtagagcgagatcgctattgttatttgaacatgtacatggtgaatcgcgtgatcgtggtcaggcaatggttgatctgctgaatcagtatcaacaagcagggatcaccttaagtagtcgtgaattgcctgattacttacctacttatattgagtatttaacgctattgcctaccgatgaaagtattgaagggcttaataatattgcccctattttggcattgctgagtgagcgtttaaaacagcgaggcagtgattatcacgctctttttgatgtattgctttgtctctcacaaagtgagttagacgcttcacaactggcggctcaagtagaaaaagagcctgtagatgatacgccggctgcattagatgctgtatgggaagaagagcaagtgacgtttctaggtgaaagtgcgcaatgtggtagtaacaatattagccagcatcagcgacgttttgcgcaagaaacgcctgttcaatatctcaacgtcggtaattcgctggatatgggagcacaaaaatga

SEQ ID NO: 315366 - DNA, 1830 bp, Proteus mirabilis
atgaaaatgcacaacattcaatggcattatcgcttttcaattattaatcaaatcgctattttaatgttgcttttcacactatttggtgtggtaggtatggctatttctaaccacattattttaagcgtacaaggcaatgcccacgccattaataaatccggctcactgcgcatgcaaagctatcgtttactatcagccttaccccttgatgataagcaccgtgattatctacaagaattagaaaatgatttagatagtaaagagttacgtcaagtattaagcacctcatcactgcaatcacaatatgtacaactgactcattactggaaagagacattaaaaccgactttgtcagcagccaaacagcctaatgatgcgaaacaagaagttatcttttttgtttctcaactcgatacattagtatcaagtattgaccaacttactgaacaaaaaatccgcctagtcgcttatactcaacttatctttaccgctcttaccttattactgctgtttggttctgtttggcattttcgtcgtcgcttattactgccttggcaacaattgatgtctatggctaattctattggacatggtgatttttcaactcgttttcggcctcgtcctcaccatgatgaaattgccaccctaggaattgcacttaacaccatgtcagaagagctatcgacgctctacagtgaattagaacaacgagtcattgaaaagacccatgatttacaacagaaaaataaggttctctcttatctttatcactcaagtcaacaactgcattcccaagcgccactttgcgctcgcttaaggcagatccttgcagagctacagcatattattcctgatagctatttgcagatccgtctatatgaagataatcaacatacattatttaatgagataagcttagccccttcctcacgccctgaatattgtccaacgccagactgtgagcgttgcaatgaagatgccaacatcactacaccgttaaataatcgcttattacattgggaattgaccgatcagatccatcgctacggtttattcgtaatgcagttaccggaaaatagtgtacttactgacgaacagaataatttaatgctcttattgactaagcaaatttcggcaatgcttgccatggagcaacaaaatgaacagcaacaacagctattattaatggatgagcgttcagcgattgcacgtgaattacatgattcgattgctcaatcgctatcatgtttaaaaatgcaggtcagttatctacaaatgcaatcggaaaccttgccagataactgtcaaaaactactaaaagagatgcgagaagagctaaatgtggcttatcgtcagttaagagaattactgaccacatttcgcttgaaattgacagagcctggcttattagccgcattagaaaatacactaaatgaatttaatcaacgtttagggtttgctatccattttgattatcagttacctgcaaaatgtgttaattcacatcaaagtattcatgtggtgcaaattgttcgtgaagcattaaataatattctgcaacatgcgaatgcaaactgggctgaagtcgcattaacacttaataatggcatcgttgaactgcaaattaatgataatggtgaaggtattacgcctaatcccgaaaagataaatcactacggactgattattatgcgtgaacgcgcgaatagtctgaatggctcttatagtataagggttcgcaaagaaggtggaacgcaagtatttgtcacatttccgttaatcactacccataaagatcctatcgaaaagggagcaaatcataatgaataa

SEQ ID NO: 315367 - DNA, 210 bp, Proteus mirabilis
atgatttcaaggaaatctgattggcatcctgccgatattattgccgcactcagaaaacgaggcacaacactggcagccatctctcgccaagctggtttaagctcttcaactctaggtgtagcgccttcggaaatttggcccagtcgttattttcatcctgaaacaggcgaattacttgaacggaagatacgcgacaaaaccaataattaa

SEQ ID NO: 315368 - DNA, 123 bp, Proteus mirabilis
atgtccaaacaagaaagcattgcaaaaatgttaaggcttgcaaatcgtctggatgaaattatagcagacttgactgcaaagaaagatgatatgattaataaatcatataataaagcagcctaa

SEQ ID NO: 315369 - DNA, 345 bp, Proteus mirabilis
gtgaaaaataacttcaaagatgcagttttggttaaggatgcgcaagcctctatcgaagaaaggcagttaaacagcataaaaatgactgtgcaaggcttgataaactttgtaataactagctttgagcagttagggatagataggctacacgaacttactgacccttcacttgatgaattgacacttattgttcaagagttaagttcagaagctaaaaaacaccaagatatgaaccttcaacaaacattattaatagcagaaatactgcttaatgatattaaaatgaaaaatccagaaatgtgctcaaatagctctcaaatgctaaagaaagccaatattttctga

SEQ ID NO: 315370 - DNA, 1125 bp, Proteus mirabilis
atgagtaagttgagctatatggaaaagttgttggatggggttgaggttgagtggagagcgctaagggacgttgtaaaaacaataacggcaccagcaaagctaaagagagaaagttatcgagaggcaggtcaaacaccaattatcgaccaaggtgaaaaattcattacgggctatacggatgaagatgttaaagcattacctttgggggaatatgttatttttggtgatcattctgagcatatcaaatatgtggatttttcttttatccaaggcgcagatggcttaaagattttgaaatctatttcggataacccaaaatatgtttattactcttttctaaacttttatcagaaggaacttaattacaaacgacattgggctagagcaagtgagacgctaatccccatcccctgcccagataaccccgaaaagtcgctggcaatccaatctgaaatcgtgcgaattttggataaattcactgccctgacagccgagctgacagccgagcttaacatgcggaaaaaacaatacaactactaccgcgacaagttgttgagttttgatgagggtgaggttgagtggaaggcactagggaaaatcgcagaaataaatactggtcagaaaccatctgaaatcttggatacagaggcggagtttgattacatcaatgctgggacaactaggtctggatattgttctctgagtaattgtgagggcgatactgtgacgaccccatcaagagggcaaggtggcattggctttgttggttaccaaaataagtcattttggttaggtcctctttgttacaaaatacggtctatagataacaaagtgctaatcaataagtacctattttatattcttcagtcgaaaaatcagctgttattaggattaaaaaaagaaggtggtgttccagcagtgaataaatctgatttagctaagttagaagttccagttccttctgtaacagaacaggagcgaattgtggaaattttagataaattcgacacattaacaacttcactgcaagaaggcctcccacgcgaaatcgagttacgtcaaaagcaatacgagtattatcgtgacctgttgttgagcttccccaaacctgaggcggcagcttaa

SEQ ID NO: 315371 - DNA, 1002 bp, Proteus mirabilis
atggcctatcaaccgccttttaccatcaccaccgatattttgaacttggtggcgcaaatcagccaacaggtgggtgagttaaacgccagccagctcaatgcgtcgccgcaattgcgcaagcaaaaccgcattaaaaccattaccggcacgctggcgattgaaggcaataccttaactgaagagcaaatcactgccattgttgagggtaagcctgtgctgggcagcgtgcgcgagctggccgaggtaaaaggtgccattgcggcttacgatgcactgcccacattcacacctagcgccattaatgatttactcacggcgcacggtttaatgctgtcagatattctggtgaatgccggtgcgtttcgcagtaaaggcgtgggcattcataaagggggtgtggtgcaccacgttgcgccgcctgcccatcaagtgtccggtttaatggcggatttactccaatggctcaagcaaacaaaagatcacccattgatcgccagttgtgtgtttcattacgagttcgagtttattcacccgtttgccgatggtaacggtcgtatggggcggctatggcaaacgctgattttgtccaagtggcatccgttatttttatctttaccgcttgaaagtgtgattaaagaccatcaacaagattattatcacgcactggaacaagcagataaccaagcagacagcacgccttttattcattttatgttgtcggttattcagcaaacactcgcacaaaacgcctctgtaaatgcccccttaagagagggtgaaaacgcccctgtaaatatccctgtcaatttaacgggccttaaaacaccggaggctattttagcattgctcagtaataagcccgagctgacccggcaacaactcgccgataccttgaataaagacgtgagaaccattggccgcgccattagcaagctgcaaaaagaaggcaaattaacccgaataggctcagataaaaccggccattggcaagtcattgaataa

SEQ ID NO: 315372 - DNA, 1734 bp, Proteus mirabilis
atggagcggaaaaagtggttttccccgtatgatccaacaagacggattggtagtgtcattagtgtatctgcaaccgagttaatcattaacttatctaaagcgggatctggtgagcccagttggtcattcggaaatcgaatagcagctggcgaagtaaatgaatttgtattcatcgatataggtgaaacagcgatacttgggcgcttagtgaaagtgtggattgagggaggagagagattaagtgttgacggtttggctgataaaccatctgaaaatcaccctattggactggttcaattattggtgagtctgaatccagctaatggtcgtaactacaaaggaattaagcaacatccgagattaggtagccaaatatattcagctcacccgtatctggtatcaataatcgctgaaggtaaacaagatgagaagcctggccaaatccatttaccattagcctcacttccgcatgatgaatccgtaactgttcatattactccagaaaaattattttcacgccattgcgctattttaggggcaactggtggcgggaaaagttactcaatgacaaacatcattgagcaagtgattaaagctggaggcaaagcaattattatcgacccaacgggggaatatgagtcactgggctgtgatagttattatgttggtaatcatacaaatgcaacaccgttgaatcagttaacttttccacattggcagtttacagactcagatattagagcatttttaaggccttcagcgcaaagccaagcgcctaaattagaggcggctatagagagtcagaggcttgtttcacactattatcagaataactatttggggttaggcattacttcagagtatttactgaataagtcagggcagctgaaagcgacttataaatctgctctcgtacaaatgaatagccataatcagcttttaccatggtcatttgcacttacagcagatcaaattgagtgtgagtgtgtgtatccaacagcaaattatgggaaagaccctacgaaatggggagaaaggtctgaggcagacgttggtcattgcctcaatttaatttctcggatgaaagcatacgctagtaatacaaacttaaaatggatgattgatgctgctggtgagctaaaaacgttgcctgacttgattgatgaattctgctcattagatcaaaaaaacaatgtcattagactggatttgtcggcagttccatttgaagcaaactcaagagaaatacttgttaatgccataggtagaaagttgttatctgtagcgaggcaaggcgcaataaatcatggtgcacctctattagtatttattgatgaagctcatcaatttcttaataagcgtatcggtgaagaaacgaatagatttgagttggatgcctttgggaatatagctaaagaaggtagaaagtatggtttgaatactatcattgctacccagcgccctcgagatattcctgaagatgttttaagtcagattggtacactgatagtacataggttgactaatcagctggaccaagaaattgtaaaaaaagccgttggtgctattgatcaacgctcagcctcttttctgcctgtattgggacaaggagaagcgctgttgttaggagtcgatttcccattccctatgacagtgaaaatgaaacgtcctataaatgcaccaacttcgaaaagtgctagcttttctaaaagttggaaacctttgcaaaattag

SEQ ID NO: 315373 - DNA, 288 bp, Proteus mirabilis
atgaatggtttttttacggctgtatattgggtgttaaacattattcagattattgctgtaatatcgggctttcatgaatggctaggctggaatattgttatatctattatatttgctgctattattggatggtttcctctgattggtacattcatgggggttatgggagctgtagaaggatggggttgggaatactggcaggcaatactattattcatttggcctttaattttagtatttttcttcggtacactgagtgctgtaactgataagttttctaggaactaa

SEQ ID NO: 315374 - DNA, 540 bp, Proteus mirabilis
atgaaatatttatattttttatttttagttgtttccagtgcttgttacggatatacgaaagaaaatttttatagtgttaatagtgacggttgggagatttatgaagttccaaagcaggatcttgcaaatgtttttagatgtaaggaatgtaacggaatagttcagatacaaatatcttatggaccaaagggtgctagtgagttttttagcgatacaagcgaaatgatagctcaatttaaatcggaaaagtctctgggttttttcgtggatatgatgattgaagaatctactccttggctagaaaaagattatataaaggtattaaatattaataaaaatagtgaattaggtggattaccagcacttgaatattccatgtgtggcgaaagtaagttgattaaaccaacaatagaaaaaacatatgttgcaatacagaaagatagaatgcttagactgtcagttcactattcgcaaggtgaagaaaaatcaattaaaaaagataaaattaatgctttcattaattcgtttaagtacctatag

SEQ ID NO: 315375 - DNA, 768 bp, Proteus mirabilis
ttgcaacagtgccgtgtacatcgaaatacggcttatcaggcgttaaaagatgcttgcgatgacttgtttgcaagacaattcagttatcagagtcttagtgaaaaaggtaacactattaatcacaaatcaagatgggtgagcgaggtggcttatattgataatgaagctgtcgttagacttatttttgcccctgctattgtgcctttaattactaggttagaagaacaatttacaaagtatgaaatacaacaaataagtaatttaacaagtgcttatgctgttcgtttatatgaaatattgattgcatggcgtagtactggaaaaacgcctctcataactatgtatgattttagacaaaaaataggtgtactcgagactgaatacaaacgaatgtatgattttaaaaaatatgttttagacattgcattaaaacaagtaaatgaacataccgatattattgtcaaagttgaacagcataaaacaggtagatctattactggtttttcatttagctttaaacagaaaaaatcagccacgcattcagtcgaatctaaaagagatccgaatacattagacctcttttcaaaaataacagataaacaacgccatctattcgccaacaagctctcagagcttcctgagatgagtaaatattcacaaggcacagaaagctatcagcagtttgctgtacgtatagctgccatgctgcaagatgcagagaaatttaaggaattacttcctttactcagaaaattaggatttcaatga

SEQ ID NO: 315376 - DNA, 543 bp, Proteus mirabilis; identical to SEQ ID NO: 84313

SEQ ID NO: 315377 - DNA, 885 bp, Proteus mirabilis; identical to SEQ ID NO: 48589

SEQ ID NO: 315378 - DNA, 1476 bp, Proteus mirabilis; identical to SEQ ID NO: 48588

SEQ ID NO: 315379 - DNA, 1176 bp, Proteus mirabilis; identical to SEQ ID NO: 48587

SEQ ID NO: 315380 - DNA, 186 bp, Proteus mirabilis; identical to SEQ ID NO: 48586

SEQ ID NO: 315381 - DNA, 774 bp, Proteus mirabilis; identical to SEQ ID NO: 48585

SEQ ID NO: 315382 - DNA, 738 bp, Proteus mirabilis; identical to SEQ ID NO: 48584

SEQ ID NO: 315383 - DNA, 498 bp, Proteus mirabilis; identical to SEQ ID NO: 15298

SEQ ID NO: 315384 - DNA, 1407 bp, Proteus mirabilis
atgtcaaaacagcaaatcggcgtggttggtatggcagtgatgggacgtaaccttgcgctaaacattgaaagccgtggttacactgtatctatctacaaccgctcaagcgataaaaccaatgaagtgatcgctgaaaatccaggtaaaaaactggttccgaattactctattgaggaatttgttgattcattagaaaaaccgcgtcgtattttgttaatggttaaagcgggtgaagcaacagataaaaccatcgcagcgctgacaccacatttagataagggcgatatccttattgatggcggaaatactttctttaaagatactattcgtcgtaatcgtgagctatcggctcaaggttttaactttattggtacgggtgtttctggtggtgaagaaggggcattaaaaggaccttctattatgcctggtggtcaaaaagaagcctatgagttagttgctcctattcttgagaaaattgccgcggtggcagatggcgagccttgtgtcacttatattggtgcagatggtgcaggtcactatgtgaaaatggtacacaatggtattgaatatggtgatatgcaactgatagcagaagcttattcagtattaaaacactcactaggtttaactaacgaagagttagctgacacttttaccgagtggaataaaggtgaattaagtagctaccttattgaaattactgctgatattttccgtaagaaagatgaagaaggtaactaccttgttgatgttattcttgatgaagcggcaaataaaggcaccggtaaatggactagccaaagctctttagacttaggtgttcctgttacgttgattacagaatctgtttttgcacgttatatttcttcactgaaagatcaacgtgtggcggcatctaaagtattatcaggtccaacaccaaaagcatttactggtgataaaaaagcctttatcgagaatgttcgtcgtgcactatatttaggtaaaattgtctcttatgcgcaaggcttccaacaattgaaagctgcatcagatgaatataactgggatctaaattacggtgaaattgcgaaaattttccgtgcaggttgtatcattcgtgctcaattcttacaaaaaatcactgatgcctataatgacgatgcgaatatcgctaatttattattagcaccttactttaaaaatatcgctgatgagtatcaacaagcattgcgtgatgttgtttgttatggtgttcaagcaggtattcctacgccaacattctccgcggctatctcttattatgatagctaccgtgcgcaagtgttaccagcaaacttaattcaagcacaacgtgactattttggtgcgcatacttataaacgtactgataaagaaggcgtattccatactgagtggatggagtaa

SEQ ID NO: 315385 - DNA, 507 bp, Proteus mirabilis; identical to SEQ ID NO: 294261

SEQ ID NO: 315386 - DNA, 1152 bp, Proteus mirabilis
atggccagttcaacattttatatcccttcagtaaacaaattaggcgcaggttgtcttgcagacgcgataaactcaatgaaagactttggctttcataaagcactgattgttactgatagtgttttaaatcaattaggtgttgtaaataaagtgagtgaattactggcgaaatcaggtattgctagcgttacttatgatggtacagcgccaaaccctaccgttgaaaatgttgaagcggggttagccttattaaaagagcatcaatgtgattgtgttatctctttaggtggtggctctcctcatgactgtgctaaaggtatcgcactagtcgctgccaatggtggtaagattgccgattatgaaggggttgatcgctctgagcatccgcaattaccactgattgcaattaatacaaccgctggtactgcttctgaaatgacacgtttttgtatcatcacggatactgcgcgtcatattaaaatggctattgttgataaaaatgtaacaccaatcttatctgtaaatgattcagagttaatgattggtatgccaaaaggtttaaccgcagctacgggtatggatgcgttaacccatgctgttgaagcttatgtctctactgccgctaatcctattactgatgcatgtgcgttaaaagcagtgacgatgatcagtgagtctttacgtaaagtcgttgaaaacggtggtgatacagcagcacgtgaaaatatggcttatgcacaatttttagcgggtatggcatttaataatgcttctttaggttatgtgcatgctatggctcaccaattaggtggtttttataacttacctcatggtgtatgtaatgcagtattactgcctcatgttcaagcttataacatccaagcagcagcaggtcgtttaaaagatatagcgcaagctatgggtgttgatgtttcggcaatgaatgatgagcagggtgcgcaagcttgtattgaagagatccgcaaaatcgccaaagatgtcggtattccagcaggcctgaaagaattaggcgtgaaagaagaagatttcaaaacattagctgaaaatgcattaaaagatgcatgtgccatcactaaccctgttcaaggtagtgaaagtgatgttatcgagatattccgccaagcaatgtaa

SEQ ID NO: 315387 - DNA, 618 bp, Proteus mirabilis
atgaataatacaaaactcgcccaattagattggcaaaaagtcgataacctaatgcctgtcattatccaaaatgctatttctggtgatgtcttaatgcttggttatatggataaagccgcattagaaatgacgctaaacagtggcaaggtcactttctattcacgaactaaacaacgtttatggacaaaaggtgaaacatcaggcaatttccttaaattagtgggtatttatcctgattgtgataacgatactttacttattttagctcacccaatcgggcctacttgtcataatgggactgaaagttgttttgctccggctcaaagccaatggggatttctttatgagcttgagaacttactgcgcgagcgtaaaagcgcctcgccagatagctcttataccgcacaactttatgccagcggaaccaaacgtatcgcacaaaaagtcggagaggaaggtgttgagactgctttagctgcaactgttaatgatcgtgaagagttaaaaaatgaagcttctgatttgctctatcatttaatggtgctattacaagaccaatcgctatctctatctgatgtgattgattgcttacaaaagcgtcataaaaaagcgcaataa

SEQ ID NO: 315388 - DNA, 774 bp, Proteus mirabilis
atgttggcaaaacgcataattccttgtcttgatgttcgtgatggacaggttgttaaaggtgtgcaatttcgtaaccatgaaattattggtgatattgttcccttagcagaacgctacgcgaaagaaggtgccgacgagctggtcttttatgatattaccgcctcttctgatggccgagtggtcgataaaagttgggtatcgcgggtagccgaagtgattgatattccattttgtgttgcgggtggcattcgctcagtagaagatgccgggaaaattctctcttttggggcagataaaatctcaattaattcccctgcactttctgatccaacactgatttctcgccttgccgatcgctacggtgtgcagtgtgtagttgtgggaattgatacatggtttgatgaaaaaactggggaatatctcgtttatcaatttacgggtgatgaaaaacgcacacaacaaacgccatggaaaacgctcgattgggtacaagaagtacagcaacgaggtgcgggggaaatagtgttaaacatgatgaaccaagatggtgtaagacaaggctatgatttaaaacaactcgcactggtacgccaagtcactcaggttcccatgatagcttctggcggtgcaggtgaaatgtcacactttctggatgcgtttaaattagccaatgttgacggtgcccttgccgcttccgtattccataagcagatcattaatatcaacgaattgaaacagtatctcgcagaaaatggcgttaaggtaagaatataa

SEQ ID NO: 315389 - DNA, 738 bp, Proteus mirabilis
atgattattccggcattagatttaattgatggcaaagtcgttcgtcttcatcaaggtgattataataaacaacgtgattatgatgatgatccgatccgccgctaccaacaatatcaacaagacggagcaaaattattgcatctcgtcgacttaactggcgcgaaagatccacttgcacggcagatcccattattaaaacagctagttgcctgtgttaacgttcctgtgcaagttggtggtggtattcgtagcgaagaagatgtgaagtcactattagccgcaggagcaagtcgagtggtgattggctctacagcggtgagccagcccgaattagtcaaaacatggtttgagcgttatggtgccgatgcgattgtactcgcccttgatgttcgtatcgacgaacaaggtaaaaaatgggtggcggtaagtggctggcaagaaaactccccctatacactagaagagatcatcgcactttatcaacctgtaggattaaagcatgtgttgtgtactgatatttctcgtgatggcaccttagccggttctaacgtcgaactgtataaagaaattagccagcgtttccctgatattttattccaagcttctggcggtattggtgatttacaagatatcgcagcacttcctggatcgggtgttgcgggcattattgttggcagagcactattagaaggcaaattcacattacaagaggcgatatcatgttggcaaaacgcataa

SEQ ID NO: 315390 - DNA, 591 bp, Proteus mirabilis
atgaaagtcgtcattcttgatacaggttgtgctaatttagcctcggttgcatacgccgtacaaaggctaggttacgatccgattatttcttatgaaaaaaatatcgtgttatctgctgataaactgtttctacccggggtgggaacagctagtgccgctatggaacaactaaaagcccgtgaacttatccctttaattaaagcgttaacccagcccgtattaggcatttgcttagggatgcaaattttggcctctctgagtgaagaaggtcacaatatccctctattaggattagttgacggtaatatcaataaacttgataccaaaggattacccttaccgcatatgggttgggatcaggtattagcaaaacccgctcaccctctatttcgcaatattgacagcgacgcttggttctattttgttcacagctatggtttagggctcaatgactcaaccatagccgaaacagaatatggttcacgctttagcagtgccattcagaaagataatttctatggggtgcaatttcaccctgaacgctcaggaaaagcgggtgctcaactgattaagaattttttggagatgtaa

SEQ ID NO: 315391 - DNA, 1068 bp, Proteus mirabilis
atgagccagaaaattctttttatcgatcgtgatggtactttgatcactgagccaccaaccgatcaccaagttgatagtctcaataagcttgcctttgaaaatggcgttattcccgcattactcaacttacaacaggcgggctataagcttattatgatcaccaatcaagatgggcttggtacagacagttttccacaagctgactttgaaccccctcataatctcatgatgcaggttttttcttcacaaggtattgtttttgatgaagtattaatctgccctcataaacctgaagacaactgtccttgtcgtaaacctgaaacagggttagtcacccaatatctggttgaaagtgctcttgataaaaccaatagctatgtgattggtgatagacaaaccgatctacaattagctgaaaatatggggatcaacggattacgttataacgccaatgaattaagctggtcagctatcagtgaattgctgacgaaaaaagatcgctactcccacgttgaacgtaaaaccaaagagacacaaattgccattgatatctggcttgatcgtgaaggcgagagccaaattagcactggagttggtttttttgatcatatgctagatcaaattgccacccacggtggctttcgtatgaatatcaatgtacaaggggatttagtcattgacgatcaccacaccgttgaagatacaggccttgcactcggcgaagcactgcgagaagcattaggtaataaacgcggcattgcacgttttggttttactttgcctatggatgagtgcctagcaagttgtgcgctagatatttctggacgccctcaccttgaatataaagcagaatttaaatatcagcgcgttggtgatttaagcacagagatgattgagcactttttccgctctctctcttacactatgggctgcactctacacttaaaatcaaaaggcaaaaacgatcaccacaaagcagaaagtctgtttaaagtatttggtcgtaccttacgccaagctattcgtgttgaaggaaataccttacccagttcaaaaggtgtgctgtga

SEQ ID NO: 315392 - DNA, 1083 bp, Proteus mirabilis
atgaacacgccctttgatattaccctattagccagaaaaaatgttcgccagttaaccccttatcaatcagcgagacgtttaggtggaaatggctcggtttggttaaatgccaatgaataccctaccgctcctgactttacgtttaatgaaaaaaatttaaaccgctaccctgagtgtcagcctgttaacgtaattaatcgctatgcagcatatgcaggcgtccaacctgagcaagtgttagttagccgaggtgccgatgaagcgatagaactactgatccgtgctttttgtgagcctggtaaagatgctgttctctattgtccacccacttatggtatgtacagcgtcagtgcggaaacctttggtgtagaacagcgtgttgtccctgctcttgctgattgggagcctgatgtcaaagccattgcatcacaacttgataatgtcaaacttatctacctatgtagccccaataacccaacgggcaatatcgttgagccttcactgatccgcgaagtattagcattagcaaaagataaagccattgtggctattgacgaagcttatattgagttttgtcctcaagcatcactagtcgcttggttaaaagagtatccgaatttagtcattttgcgaactctctctaaagcttttgcattagcgggactgcgttgtggctttgcacttgccaattcacctgttattgaattattacttaaggtgatcgccccttacccactttctaccccggttgctgatattgcggcacaagcattaactgacccaggtatagaagcgatgaaacaacgggtaacggaaattgtacacaatagagcatatttagcagatgcactaaaaaatttacccaatgttgaacaggtttattgtagtgaaaccaactatattttagtgaaattcactgatgctgattgtgttttccgcagtttatgggagcaagggattattttacgcgatcaacagcgtcaatatgggctggcaggttgtttacgcatctctatcggtacgcgtcaagagtgtgatagcgtgataaccgctataaaaaatagacaaacggcaaacgtataa

SEQ ID NO: 315393 - DNA, 1317 bp, Proteus mirabilis
atgatgaaaacggcgtttaatacattaaacttctgggataaatgcacccaacagcaacaacaacagctactcactcgcccagcgatatccgcatcagcgtctattacagagcaagttgctacgattatttctcaggtacgcaacgatggggataaagcccttaaggcactgagtcaaaaatatgataaagcggctcccgatagcgtattggtgacaaaaacacagattgacgcggcttgtgcaaggctcaataacgaaatcaaacaagcaatagcgcaagccatgagcaatatacgccgttttcatgaagcgcaaattcctaaaaccattgaggtagaaacgcaacctggtgtattttgccaacaagtcagtcgccctattgatgcagtaggactttatattcccggaggatcagcgcctttactctcaactgtgatgatgttggggctaccggcccgtattgccggttgtcgcaaaataattttatgctctccgccaccgattgctgatgaaattttgtatattgcgcaacaaattggtattgatgaaatattccaagtcggtggtgctcaagccattgctgcgatggcttttggtacagagtctatcccaaaggtagataaaattttcggcccgggaaatgcctatgtgacagaagcaaaacgccaagtcagccaatcgctacaaggtgcagctattgatatgccagctggcccttcggaagtattagtgattgctgatgccgatgctgatcctgcctttattgccgctgatttactatcacaagcagagcacggccctgactcacaagtggtgctattaaccccagacgaagcccttgccaaagcggtcattagcgagacgcaaacccaattaacacaattaactcgcgcagaaatagcacaacaagccttagccgaaagtcgtgtcattatcacccgtgatctcaaccaatgtattgaaatcagtaatcgctatgggcctgaacacttaattattcagactaatgatgcagactcacttgttgatagcattactagcgccggctcagtgttcttaggggcttggtctcctgaatcggcgggagattacgcttctggcaccaatcacgtactacctacatacggttataccgccacctattcgagtttaggcttagccgattttatgaaacgtatgaccgtacaaaaactgactgctcaaggtttggctgatttagccaataccattgaaatattagcgcaagcagagcaattaactgcacataaaaatgccgtcacacttcgcgttaacgccttggctcaaggagataactag

SEQ ID NO: 315394 - DNA, 900 bp, Proteus mirabilis
atgttagataaagcaagattacgaattgccatgcaaaaatcaggtcgtttaagtgatgattcacgagcacttttagcgcgttgtggcattaaaataaacttaaaccaacaacgccttatcgcttatgcggaaaatatgcctatcgatattttacgtgtcagagatgatgatatccccggtttagtgatggacggagtggttgatttaggcattattggtgaaaacgtattagaagaagaattactaaaacgccgagcacaaggagaaaatccaagttatatcacactgcgtcgtcttgactttggtgcttgccgtttatctcttgctgcaccggttgattttgattatcaaggggttgaatgcctcaataatacccgtattgccacctcttaccctaatctattaaaacgttatttagaccaaaaagggatcacctttaaatcttgcttattaaatggctccgttgaagtcgcacctcgagccggtctggctgattctatttgtgatttagtttctactggcgccacattagaagccaatggattaaaagaagtagaagttatttatcgttctaaagcttgtttaattcaacgtgacggtgaaatggacgcaacaaaacaagcccttatcgatcgcttaatgacgcgtattcaaggagttattcaagcgcgcgaatcaaaatacattatgttacacgcgccaagtgattgccttgaagatgttatcgccctattaccgggtgctgagcgcccgaccatccttcctttagcgggtgatcaaaatcgagtagcaatgcacatggtcagcagtgaaaccctcttttgggaaacgatggaaaaactaaaagcattaggggcaagttcaattcttgttttaccaattgaaaaaatgatggaataa

SEQ ID NO: 315395 - DNA, 822 bp, Proteus mirabilis
atgaaacggatcacgatagtcggattaggttggttaggattaccacttgccaatgccttgcgtgaagcggggtatcaagtaaaaggaacaaaaaccacagaagatggtgtagaagcagcacgaatgagtggtgttgattgttgtctaatgaatttaacaccggctattgagtgtgatagagatgattttgattacttaatggaaactgacgtactgattattacattacctcccagtgcggcggggggaggatatgattatgttgaagggatacaaacattagtggatagcgccatgtctcggcatgtgacaagagtgatttatattagctctacttcagtatatggcaatcaaagtggtgttattacagaagaagttgatattaggccagaaacgcaatccgctaagatgatagcggaagttgaaaattggttacatcgcttaccacttacgaccgtcgatattttacgtttggcggggttagttgggccaggtcgtcatgcaggacgctttttatccggtaaaaaacaggtcaaaggtgcacatcagagtgtcaatttagtgcatttagacgatgttatttttgcgatagagcaactgcttgctcaaaatgaaggaggccgtttatataatttatgtgcccctattcatcctaaaaagaaagatttttacagccgtgttgctgcacagttagatcttactccccctgaatttgctctagaagataaaccgccagcacgagagatcgacggtcaggagatttgccgagatctcggatttcattatcactatcctgatcccgacaaaatgccaatgagttaa

SEQ ID NO: 315396 - DNA, 621 bp, Proteus mirabilis; identical to SEQ ID NO: 311373

SEQ ID NO: 315397 - DNA, 1203 bp, Proteus mirabilis
atgaaaacaaatcttccatccgtattggctaaggttaccgcgggaatgggtttactgctaattatttctagtcctacttttgcggtgaataatcctgtgccgcctcaaattgaggctaaatcttacgtattaatggattataacagtggaaaaatacttgcttcagagaagcctgaagagcgcctagatcctgccagtctaaccaaaataatgagtagttatgtggtaggacaagcgataaaagagggacgtatgtcgcccgatgatattgttattgttgggcgcaatgcttgggcgacgggtaatcctgttttaaagggctcatccttgatgtttttaaaaccaggcgatcgagttaaagtgatcgacttaaatcgaggtatggtgatccaatctggtaatgatgccagtattgcgttggcagagcatgttgccggtagccaagaaacctttgttgatcttatgaatacctatgccgcgaatttaggtttaaaaaacactcactttaaaacagtacatggtctagattctgaagggcagtacaccacagcacaagatatggcgttattaacagctgccatgatccgcgatgtaccttcagaatatgatattcataaagaaaaagaatttaccttcaacaatattcgccagccaaatcgtaaccgtctattgtggaataaaaatatgaatgtcgacggtgtaaaaaccgggcataccaatggggctggctataaccttgtctcttcggcaaccgaaggaaatatgcgtctgattgcagtggttttaggggcgccatcagataaagtgcgttttgctgaaagtgaaagattactcggctggggtttccgcttttttgaaaccgtgacacctgtaaaagagaacgtgcccctgactacgcaaaaagtatggtatggcgataaaggtgaagtggctttaggtgttgctaaagatgcatcaatcaccattcctaaaggagagctaaagaacttaaaagcctcttttacattgactaaccccgaattagaagcaccattaacacaaaatcaagtagtaggaacagtgaatttcttactaaacgatgaagtgattgagcagcgcccattagtggtaaaagaagcggttgaagaagggggtttctttagtcgtatctgggactttgtggttaaaacagtctctggttggtttaatgcgctttttggttaa

SEQ ID NO: 315398 - DNA, 1194 bp, Proteus mirabilis
atggctttattaaccaataccaaagctaagaatatacaacctggggataaaccattacctcatggcggtatcacgggcctcactctacatccatcatcaacaaaaggaagaggaaagtgggtacttcgctatatgagcccagtaacacaaaaacgccgaaatgcgggtttaggtagttaccccgaaatcacaatttcagaagcatcaaatattgcttcaacaatgagagagcaaataatcaaaggtattgatccccttgagttcaaaaaatcaatttctgagaagccatcaatcccttcttttgaagatgctgctcgtaaacttcatacagaattacttcctggctggaaaaatgaaaagcacggtaaacaatggatcactacacttgaacaatatgtatttccgtttatcggctcaatgacattagataccattgcacccgctgatatagcggacacattacgccctatctggttaactcgctccgaaaccgcctctcgcgtcaaacaacgtatccatgcggttatgcaatgggcatgggcacatagttattgttctgctaaccctgtcgatgtggtcgcccatttattaccacaacaaatcagcgttaatgtccgtacagaacatcaacctgcaatgccatggaaatcactccctctttatattgcaacctatgtatccacagatgaacgatacaatgtcactcgtgccttactcttatttgtcatactcaccgcctcacgttctggagaggctagagccatgcgatggggagaaattgattttaaacaacgaatttggactatcccagccgaaagaatgaaagctggcatgcagcatcgagttcccttatcggatcaagctatgtcgctactccatagcttaaaagggctacatgatgaattagtttttccttcccccagaaaacaagttgtcctttccgacatggtgctcactgcattcttacggcgtacgaaagccccaagcgataatcctaatcgcgttgcaacagcacatggctttcgttcaactttccgggattggtgctctgagcatggctattctcgggatttagctgaaagagcactcgctcatacagtcaaaaataaagtggaagcagcttatcaccgaacggacctattagatcagcgacgccctatgatgcaagcgtgggctgattatctcttgccttaa

SEQ ID NO: 315399 - DNA, 231 bp, Proteus mirabilis
atgtcttccaatactaaaaatcttaaaaaagttatttattcaaaatttggtgctcagattccagttaatactaatttttcaacattgtttggtcaggcatatgcagctttgcaaatggcaacacctcaaaactctaaaacagataatgagccagtaataaaagattacgagcgtgctttgtttaaactggcattatctattaatagagtttgtaattatgtggtcatataa

SEQ ID NO: 315400 - DNA, 165 bp, Proteus mirabilis
atgaacaagaatgaattaactcaagcaacaaaaccaacacgtactcgacttattcgagcagtgacaacttctacggctattgaaacaaggcaggagtctcgccgtgttgaagaaaaaatgaaatctaagcgtgagaattttgggaacttgaaactcgcggtctag

SEQ ID NO: 315401 - DNA, 1365 bp, Proteus mirabilis
atgggcagttatgcatatgattatcttaacgattcactacttttagatggggcattggtatcacagctataccagggtatatctgatttgatcttagagagggagctaaccagatatcgcgagtactgccttaaaattcttccggaagtacgaaaagatgttaaagccagtaatgatgcacttagctgtatggctactgatacgatgtctcatatctcacgacttaaacaagcagcgttatacttagaggaagctatagtctcagatcctattttcaaactaactgactttagaagcgcttcgactgaagctataacttcatttatgggtgtgacatcaacaccgatgattgatcgcagagaattagctaatgctgcaatcagacttattgaattgcgtccattagtagtaggtggttacgttaagttgtatcccgtaagtttcgagttagaacgtggcgaagagattcctttgctttattctaataaagggttcgaagattgtttaccatcaaatatcctaaaacaatacaaaacaaatgctgatgtacgaagtgtccaaaacgacaatggacgcatgttggttatgagagatctttatctatgcagaaatattagtattcactttaaagggatggaaggtgggtttgtaatgggatatatgcttaatcctactgaaattaaaccgacaaataaagaaaatgtatacaccttcatacaaaagaaatcatcagaaccaccatcaaaagaagattttgttgcatgggtaaggcaatctgtaaatcaaactgccagaaaccattatatcgatctgaataaacggatcgctctatgcgaatatcttggatgcatgtttggtactgagcatccgtttgaaagtaatttactaaacatgaactttgactccagtgatattaaagcaaatactttaaattgtactcttcaaatggatgttccctttctagaacaaatatcgtcggctgatttaatgtctatccgaaacaatgatggtgaagcatttcaatcgttccgctcggaactagagagaggtttacgtcaggctaggcatgaatcagatcctagtcgtgtacgtgctattatagaggacacacaacatgaactatttgaagttcaaatgagtcagattgccccccaggttagtcacataaaaaaaacacacttgactgaagttgctatcgcaactgctggtttagggctgagcgtgttgactggcggcactagtttactcgcgacagcgatcgcagtggcacacggctataagtcacacagtgactacaaatcaaaagtaacagcgaacccatgccattttttatggaacgtaaaaatgaaggcagaacaaaactga

SEQ ID NO: 315402 - DNA, 141 bp, Proteus mirabilis
atgtctaaacctagcacgattttcatcggcatggatgtgcacgaagaaaccacagatgttgcgtttgtttctaccgaggatagtgctgtctctttttacggcactatcctaccaacagtcgttctgctctcaacattatga

SEQ ID NO: 315403 - DNA, 669 bp, Proteus mirabilis
atgttagaaattgaatcaactagcaaatttaagtatccagaacactttccaccagaagacttttggattcagcctggaatagtgaatgatggactggcagagtttactgaattggtagatgcacgtaagggtgagaaagtaattgatgaatatctgcaaaaatatcgcggtttattagctaaatttatgaactttactcagtttggtcaccatgggacatgggtaattcctcaacaacaagtgcgtccgcctttaacaagtgaacaacgcgggcttaaacccgactatatagttggtggaaagggatctgatggatataaatggtttgtcgttgaattaaaaggagcggaccaaaatatctttactgaaagaaatggcaatgttgttttcagcaatgcagttaacgatggtatttgccaactattaaattatgtggattattgctcatcagcacaaagctatctacgagatactttgcgtttgaatgatttccgggagcctgaagggtgtcttatagtcgggcgcgagagtgaactattagatgaccctagaaaacaaagtcttaaggcggcttggaatagattgagtggtggtcgcttgcaaatcagaacgtatgatgcatttattcgttcaacaggaagctcgtggtcagtagaaaaaaatggctaa

SEQ ID NO: 315404 - DNA, 1431 bp, Proteus mirabilis
atgagttcagaattgattgcaaaacctggaacaggactgctttccacagatacaacaaaatttgaaggatacttatcctatcttggtttaccaaccgaaaatataattgcctctctccctgagcgccaaattattgaaaaaaatctcccagaattcatagattctttacctgctgaggtaaaaagagatgcgcgatatttatcaaagtttgttgctggtgcggctataggactatttgatgcatcgttaaattatgtttggaatgaagttgtactgaatttaagggaaaaagtggtagtttatggcctcgatatgttctttgatgctgcagtcggcggaggacgtcgagagttttattctaccgaagaagatctttcgggtttaaaagacaacacccttattaatacatgccgcaaacttgaattaatatctgacattgtttacaccaaactcaatcatatattgactatgaggaatgacattggtgcgtcgcacccaaattcatactccataaatgcttttgaacttcttggctggctccaaacatgcgttcaagatattttgaacgacaaaccgtctgcatctgccatacaaataaaatcattccttgagaatctaaaaagatccactgatgtccttgatgaagccacaattcaaagcatggaaagacctttgaatgatctgtcgcttcagaatactgacaatctactcaatagtattttcggcatatatacagctgattcaacaggaaatgttatcagaaaaaatattgctctttttgctccgcatatttggaataaaagcagtgagaacgtaaaatacaagctcggcgtgacgctagacggatacaagaataaccttcataacgagaaacatgctttaggtattgaattttttacgttttgtgatggtaatcgttatcaatcattagactctagaattatatcactggacggccatgccgacgatctcttagaggctaggtatgcttgggataacttttataatgaaccccctcatatgcggaagattctttcgtatttaaagactgaaaatgacataccattagagagggttcaaaagcttataaaaacagttttgatttgccgtgttggtaaaggaataccatataatacaggtgtttctccggcagggcgacctttgtatgatcagttttttggcatgcttggcgatcaaaacattatcaagacagttatagcaatgcactctaatgaagtgagagtgaatttagacaataaatactgccagcaacatatggtaagcgttttgactttgttaagaaccaatgctcgtagcgaaagaattcaagaaattatagattttttgatcgccaaccaaacgatcctccataaagtacacaacgataagagatatagagatctaactaagaatcacatcagtttcagctaa

SEQ ID NO: 315405 - DNA, 654 bp, Proteus mirabilis; identical to SEQ ID NO: 83611

SEQ ID NO: 315406 - DNA, 351 bp, Proteus mirabilis; identical to SEQ ID NO: 83610

SEQ ID NO: 315407 - DNA, 396 bp, Proteus mirabilis; identical to SEQ ID NO: 83609

SEQ ID NO: 315408 - DNA, 1308 bp, Proteus mirabilis; identical to SEQ ID NO: 83608

SEQ ID NO: 315409 - DNA, 951 bp, Proteus mirabilis; identical to SEQ ID NO: 83607

SEQ ID NO: 315410 - DNA, 2088 bp, Proteus mirabilis; identical to SEQ ID NO: 83606

SEQ ID NO: 315411 - DNA, 510 bp, Proteus mirabilis; identical to SEQ ID NO: 83605

SEQ ID NO: 315412 - DNA, 1542 bp, Proteus mirabilis; identical to SEQ ID NO: 30088

SEQ ID NO: 315413 - DNA, 738 bp, Proteus mirabilis; identical to SEQ ID NO: 48584

SEQ ID NO: 315414 - DNA, 774 bp, Proteus mirabilis; identical to SEQ ID NO: 48585

SEQ ID NO: 315415 - DNA, 186 bp, Proteus mirabilis; identical to SEQ ID NO: 48586

SEQ ID NO: 315416 - DNA, 1176 bp, Proteus mirabilis; identical to SEQ ID NO: 48587

SEQ ID NO: 315417 - DNA, 1476 bp, Proteus mirabilis; identical to SEQ ID NO: 48588

SEQ ID NO: 315418 - DNA, 885 bp, Proteus mirabilis; identical to SEQ ID NO: 48589

SEQ ID NO: 315419 - DNA, 543 bp, Proteus mirabilis; identical to SEQ ID NO: 84313

SEQ ID NO: 315420 - DNA, 768 bp, Proteus mirabilis; identical to SEQ ID NO: 315375

SEQ ID NO: 315421 - DNA, 555 bp, Proteus mirabilis
atgagtgaaattaaatcattagcagatggtgacgagttaaataataaaacatggaataactttattgaacgccttaaatatcacaaccaaggtgaaggtgttaattaccactgcactgcaaacccaatattcacagttagagagaaaatcaaagtaactggcagtgacaatgacgaggttgggatttattacgaagataattattacgatgatatcgacgaagcatttaatgaccttgaagacgacatagcatgtaaggttcttgagtatgtcgatggatttgaagtgcatgcatgggatgaattaggcgaccatggcaaagctaatgcaattaataatgtcatatcagattcatatatctactactggaaatgggattacagaacagtaaattcacatctaaccaaagaagccgcagagcgatttattaagcgcaagcaacacgactacggcaaattatcaatatatgttgagtctgcttattggtgctgggaaatgcgaacaataattgacgcaatgatgagtggtaaaattaaatacattggtgatgaataa

SEQ ID NO: 315422 - DNA, 228 bp, Proteus mirabilis
atggataaatcaagacagcagtttgaagaatggtctgatggtaaagatttatacaatatctcgccatttgatatatggaaagcatcacgtgattcgctcttattgcacctaccagtaagagagaaaagtacaggtaattatgattattttactgatggatataacagtggaatatctgcatgtgaaacagcattgttagataacggagtgaaaataaaaaatgaatga

SEQ ID NO: 315423 - DNA, 210 bp, Proteus mirabilis
atgtttggttctggtgaaggacccatggtgtacagggtatttaagaaacggaaagtattcttagttaccaaagtacgaccatctaaacccataccacctaatgattctgttgcccagattgggtcaccagagaataattcatcatactcaggagtacgtaagaaacgaaccatacgtaatttcatgactaagtggtcaattaattcctga

SEQ ID NO: 315424 - DNA, 336 bp, Proteus mirabilis
atggtttgtcttgcagtttggatgagttatgcaggtcgaactttaattgataaactctttgcacttattttacctatcggtatgtttgtggcgagtggctttgagcacagtatcgctaacatgtttcttattcctttaggtattgtaattaagaattttgcaccggcagaattctggactacagtaggtgcatcaccagaacaattttcaaatctaacagtatcaaatttcctcgttgataatttattgccagtcactatcggtaatattatcggcggagcagtcctagtcggtctggtatactggttaatgcatctgcgcggcgataaacattaa

SEQ ID NO: 315425 - DNA, 402 bp, Proteus mirabilis
ttgaattcagttaaagttaagtttgttaattactatgtgttattaggtgaaaactataaagcgccaaatgcattaataacggaaccgatgggtatcgactttattagtaacaatgtcgattttaataaatttggagatataggttattttgttgcaagtggtgcaccacaaggtatggtgtttagtttaaataattctccttctaatcttgttattaaagttgacagtgatgaatctcctgaatctataaccataataggtactcaatttaaatatacattatctaagactagaacaataggtaagtcttataaaatttctattggtaatatttcatcaatccccgatgtaaaaggtagtgtttgtataagaagtagaaaaggcgaatttaattactggtag

SEQ ID NO: 315426 - DNA, 417 bp, Proteus mirabilis
atgttctcaaaaaaatctcgttctacaactgcactactcttttcatcacttattctgactataggaagaggtgcaacactgccttttatggcgatatacttatcacgacaatataaattgcctgttgatgatattggtatcgcaatgtctatttcactgactacggggatagtatttagccttgcctttggtatgctggcagataaatttgaaaaaaaacgttatatggttttttctattattacctttattatcgcattttctgctatcccaatggtcaatagtactattttagtggttatctttttctcaattattaactgttcctatttagtcttttctacggtattgaaagcttatttttctgaaactttatcaatatcagcaaaggcccacctattggcacattattattaa

SEQ ID NO: 315427 - DNA, 276 bp, Proteus mirabilis
atggaggacggttctattctcgtgagaacgtatcatcgaactcaccctaacgcacctaaattcgcccgtaatgatattgatggttacaaagacggagacccaattgatatccctgatggtcgttttatttccgttcgtgtacagatgccagagcaatccatctataacgtgagaatgcgtgagatggaagaggcacagaaagcggaagaagaacgcagacaaaaagaagaggaggaaaatcaggacaccaataagacaccagaaattgataattga

SEQ ID NO: 315428 - DNA, 906 bp, Proteus mirabilis
gtgtcagggtctgctattgtctctggcacaggtactaaatggacagttaataatcccgctattcgctcaggcaccattattttaattaaaaatggtaattctaattttatttacatggtggatagagttaatagcgatacagaattagtcatttcacaaccagctacatttaccgtaaaaaacaccagttacagtattaatctcactgagccgaactcatacagcgacgctaataatcgtatgaccgctattgcatcagatacgacgtattttctgcgagcaatggaccaatggatgatggagaacgatgtggtgacagtggagctatctaatgggcaaaaagtaacgttagatagcattaagaagatgcagggggatattggtaatagagctgatttatcagtaacagcagagcaaacgtttaggggaattattaatgcgtctagagtttgtgctcaacaaaatgattataaatatatgttgggagtacggggagggcaggcatttctagattactgggatggtaaacagtggactggtgaagtattacatccacaaagacccggtatgatgatgcttgttggtgattatggcatgaatgtatcaggaaacatagaggtagcagacttcaataacttaaaagggtttggttggcataatcagcctgcgacagtggacgctggtaagagtctaaatcacccaacgaaacgggcgggtaatttaactgtttggcgtggcgctggtcaatcatcatgcatacaacattggatggattactacactgctgaggcattatctcgcacctattactcatatgatgataagtggagtcggtggtataaaacatatggagaacaaaatacgacagttgatccccaaggattcataaaaaagcttccccgatag

SEQ ID NO: 315429 - DNA, 540 bp, Proteus mirabilis
atggcaagtaaaggcgtgaataaatgtattctcattggtcacttggggcaggatccagaaatccgctatatgccatcaggtggcgcaatcgctaatctcacactagccacatcggaatcgtggcgtgataaacaaaccggtgagatgaaagaaaaaaccgagtggcatcgagtgtgcatcttcggcaaattagcagaaattgcaggtgaatatctgagaaaaggaagtcaagtatatatcgaaggttctctgcaaaccagaaaatggcaagaccaaagcgggcaagaccgatacacaacggaagtggtagttaatgtcggcggttctatgcagatgttaggcggtaacggtggtaatcaggcaggaagccagaagtcacagcagaatcaaggatggggacaacctcagcaaccgcaagcgcaaaaacaagcatcgagtaatcaaacaccacaaagtgagcctccgatggattttgaggatgatatccccttcgcccctatcggactcccctacccacgccacgctatttatgtgatttaa

SEQ ID NO: 315430 - DNA, 678 bp, Proteus mirabilis
atgaattacgttaatatgttgttttttgatatctacccctatattgctggtgctgtttttcttatcggtagttggttacgttatgattatggtcaatatacatggcgtgcaggctccagtcagatgttagacaagaaaaacatgcgacttgcttcgaacttattccatattggtattatcggcatttttgcaggtcattttctggggatgttaacgccacactggatgtatcaatcttttctaccaattgaatataaacaaattatggcgatggttggtggtggtacttgtggtgtgttaatgctgatcggcggcattatgctgttaaaacgtcgtttgacgaatgcacgagtaagagcaacatcgtcatttggtgacatcatgatcttaaccttgctggttgtccaagttgcactcggcttactgactatcccattctctgcacagcatatggatggtagtgagatgatgaagctggtggcatgggcgcaagctattgtgacattccatggcggtgcttcggcaaatcttgaaggtgttgcacttatttttaaattgcacatattcctaggtatgacgatttttttattgttcccattctgccgtttagttcatatttggagcgtgccaattgagtatctaacgcgccgttaccaaattgttcgtaatcgacactaa

SEQ ID NO: 315431 - DNA, 729 bp, Proteus mirabilis; identical to SEQ ID NO: 315365

SEQ ID NO: 315432 - DNA, 1830 bp, Proteus mirabilis; identical to SEQ ID NO: 315366

SEQ ID NO: 315433 - DNA, 663 bp, Proteus mirabilis
atgaataatatgggagcagtcgcagacaaagcgactattttattaattgatgatcacccgatgttacgcaatggtgtgaaacaacttttaagtcttgatacaacattaactgtcgttggtgaagctggcgatggtattcaaggggtaaaattagctgaagagttagatcctgatttaatcctactcgatctcaatatgccgggcatgaatggttttgaaacactcgatcaattgcgattacgatcgctctctgggcggatcgttgtgtttagtgtatcaaactacagtgatgatctgatcaccgccttaaaacggggagcggatggctatctcttaaaagacatggagccagaagagctattagccgctttaaagcaagcagccgcagggaaaatggtggttagcccaacattaacccccattttagctcagtcactgcgagaagatcgttctgaaagtgagcgggatatagaccaactcaccccacgagagcgtgatattttaaagctgatagcacaagggctatccaataagatgatcgcacgtaaactcgatattactgaaagtacggttaaagtacatgtcaaacatctactcaaaaagatgaaattaaaatctcgtgttgaagtcgcggtttgggttcatcaacaacgtgtggattaa

SEQ ID NO: 315434 - DNA, 441 bp, Proteus mirabilis
atgcaaggtattaagcgaaaaattgtctatgttaccgcttatgaagtatttggttgggttatctcatcggtaggactggcgcttttagccgatagttcaaccgctgttacggggccactcgcactcattattaccactatcgcggtaagttggaattttatttataactgtttatttgaattttgggagagtcgacaaaagtcgagaattcgcacctttagacgccgtcttgctcatgcggtaggttttcagcttacgttggtggtttaccttattccgctgatagcttggtggctaggggtttcattatggcaagcactggtgatggattttgcacttattatcatcatcccttgctatacatttgtctataactgggtatttgacaaaatttttggcttaccaaaatcagcattacccgaagatgtgcctgttgcttaa

SEQ ID NO: 315435 - DNA, 798 bp, Proteus mirabilis
atgctgctggtcactcaactccttattggttctgctataggtttagttatcaccacaacgggagttgggggtggtgttatcttattacctgtgcttatctatttatttggaatgaatgcattagcagcagtggcgaccgctaatttattatcgatgttaatgaaaatttcctcttcttatattcattttcgtttaggaaatattccattaaaaccagcattattgattttagggatcatgtttccggccacatttttagccagctatggggtaacctggttgggatcacaacctcaatattatcagcaggttgaattaggcattaatatcctgatgattgtggcgattatcttttcaatgttcctttttttacaacgaatattcaaaaaatccacatcatcacatccgttatcatcattggcacctagctcatcaattcctctgaattctctttttgttcccggtatgagtgccggatttgtcttaggggcaacgggggttggtggaggattggttgtcttacccgtgcttatgcgttttgcacaaatgaatattaaggaagcgatcggtagttctatatttattactacaattttgtcaggtggctctgctattgcttatagtgctggtggctataccgatgtgcatacggccatcattctttgtttaggatcacttatttcgattcctttagcgcgctatttactggtgtatttatctgagcgcttttttcaatatttaactctgttatttattctgatcagcatcattatgatgagttggaaactaataaattaa

SEQ ID NO: 315436 - DNA, 1746 bp, Proteus mirabilis
atgataacaactaaccaaaagcaacgagtgaagcatcgagtgttgattgctaacagaggtgaaatcgcagttcgtattattcgtgcttgtcaggattatggtgcaacgtccattgctatttatgcagatgatgatatagatgcattacatgtgcgtcttgcagatgaagcctatggtttaaagggtaactcaccgaaagaaagttatttagcgatagataaaatcattgaaattgcccataaaagcaaagccaccatgatccaccctggttatggcttcctttctgagcgagctgatttcgctaaagcggtacagcaagcgggactcctttggattggcccagatccacagactatcgaagtattaggggataaagttcaagcgcgtaaaattgcacaatccgtaggtgcaccattggtgaatggtactgctgatccggttagtgatgctaaagaggttctggattttgcgaaacagtatggcttgcctatcgccattaaagcggcatttggtggtggtggacgaggcctaaaaattgcccatcatatggcagaaattgaagagctttaccattcagcggtaagagaagcagtaaccgcatttggtcgtggtgaatgctatgttgagcaatttcttgataagcctcgccatattgaggcacaaattattgctgataaattaggccatgtcgtggtagttggtacacgagattgttcattacagcgccgtaatcaaaaacttattgaagaggcccctgccccttatttaactgatgaacaacggcaacgtattcatcaatcagcaaaagacatttgtgctaaagcaggttatatcggtgcggggacggtagaatttttattgagtgcgaacgggacaatctctttccttgaagtgaatacacgtctacaagtagagcatccggtgactgaagaaacagccggtattgatttagtgattgaacaattgcgtattgctgagggattaccgttaagtattaatgaaacccctgagcctcgtggtcatagttttgagtttaggatcaatgcagaagatccggcaaaaggttttttacccacccccggtttaattagccaatttagtcaaccggctgggccgggcgttcgtgttgatagtggtgtggcggaaaatgaccaagtatcacgtcaatttgattcaatgatggcaaaacttattgtaacaggggctagtcgtgaacaagccattgcgagagcgcgccgagctttagctgaatttaacatcgcaggcgtagccagtgtattgccttttcatcgcgaaatgatggaacatcctgattttattgataacttcagtgttcacactcgttggattgaaagcgattttcaagcaaaaaacagtcattttcctcgtagtataccagcagaaaatgaaccactagtacgtacctttattgaaatagatggtcgtcgtcatcaattagcgctacccgcacaattactttctctctcggccgttatacccacggctattagcgagcacaaagagtgtcaggtgcgggaaaatgcggtcactgcaccgatttcagggatattacatagttggttattatccgatggtgataaagtcaatcaaggggatgttattgccattatggaggcgatgaaaatggaagtacaggtagttgctacctgtcatggtgtattgcagcaaaaggcgaaagccggtgactatttttcagcagacagtctattagctgagattaactag

SEQ ID NO: 315437 - DNA, 1578 bp, Proteus mirabilis
ttgcgctttttacctgttaatttatctcacatattagttgagttgacttcattaaaagagacattggcgttttatgaagcaattaagcaagccaatattgctgagatagaagatattgttcctgcggcaaaaacactattgatccaatatgtaccttggttaattacggcgaaagagttagtggcaatattgcgcaatatcgagataaaagcgatcgcgatgcgtcaaagtcacttattaacaatccccgttcattatcaaggagaagatctgcatgaggtggctgaattattggggatcactgcgacagaggtgatccgcagacacacagaacaaacttatcaagttgcttttacggggtttgcaccgggatttgcttatttaattgctgataaaactgagctttatgttcctcgacgtaaaacaccacgtacacgtatccccgcaggctctgtaggattagcgggagaatttagcggtgtttacccacagcaaagccctggtggctggcaattaattggtactacagagataaaaatgtgggatctctcacgtgaacagccggcatttttattacctggtgatactgtacagtttgttgatgtacaaaaagcgccagtgacggtttcattacctgagaaaaaacaatctattaatgctttgtcctttaacaaggataaagggctatatgttatttccgcaggtctacaaaccttatttcaagatgaagggcgtttaggtgctgcatcaatgggggttagtgcatcaggagcacttgataaatgtgcgttacatgcagcgaatcgcttagtgggaaacccgccttcattagcagcattagaaataacacaaggtggattaatactaaaagcgcaacaagactgtgtcatagcgctgtcaggtgcagattgtacgatcagcttaaaacaaacgaccggagatatagcctttttttctacctatcaaactattgatatacgtagtggagatgaaatcacagtaggaatacctacagcgggggttcgtagttatctggcagtgagagggggttttgaattaagcccagtgttaggtagttatgcgtttgatactttagctcagattggccctcgagccttacaaaatggcgatattcttcatctaaacgatgataacgcatcaacgggcattattagccaagagcaaccgagtttcagtttaccaaagcaagaggatatcgttacccttgatattgtgttagggcctcgtacggattggtttacagaagatgcgataaaaacattaacctcacaattatggcaagtgacaccacaatctaaccgtatcggattacgtctattgggggataaatcgcttgaacgtcagcaacaacaagagttatcgagtgaaggaacttgcattggcgccatacaagtaccgattaatggtcaaccggtattatttcttcatgatcaccctctcactggaggataccccgtaattggggcagttgccgaataccatctgtcattggcggggcaaatccctattaacgctaaaattcgttttaacccaattactttatttcaagaatattga

SEQ ID NO: 315438 - DNA, 786 bp, Proteus mirabilis
atgataaaagcggtagatttaaatagtgatttaggtgaaagctttggtcaatggcgtatgggcaatgatgctgcagtgcttgaaattgtcagcagtgccaatattgcttgtggttttcatgctggttcaccagaaggcattttaaaaacattaaaagcagcgaaacagcatcaagtcgcgataggtgctcatgttgcttatcctgacttagtgggttttgggcgacgcaatatggatattgccagtgatgaattaaccgctgatgtcatttatcaaattggcgctttgcaaggtttagcgaaagccgtcggtatgaaggtaacttatgttaaacctcatggtgcgctttataacaccattgctcatgataaacgccaagcattagcagttattgaagctattttagctattgatccacaacttattttagtggctttagcgggatcaccgttgatcacacttgcgaaagagaaagggttacgtgttgttgccgaagcttttgctgatagagcttatcatgctgatggcacacttgtttcgcgcaaacaagagggggctgtattacacgatcctcaattggtggctcagcgtatgttaaagctagtacaaaaagggggcgttgaatcgatagagggtacttttactgctatacaggcggattctatttgtgttcatggtgatagtcctgatgcggttaatctcgcaaaaagtgtcaaagagatcttaataacacacggtattgcgataaaacctttcacatctgcaataggaataaaggaggcgtaa

SEQ ID NO: 315439 - DNA, 396 bp, Proteus mirabilis
atgaatgctgcggagcttattcaagcaagagaacaactacaaggcaatgatgatttttatcagtctaaagttgtaaagcactatcgcaatgatggtctttcatttgatgagcgcgtcagtggtatgaataaaacagcagaagttagggctgatttattgagtaagttaaataaaaatagtgatgatattcaggttagtgagtttcttgattatttgaagaatgagaatagccgtatatatcagatgatttattaccttgctgagatagaaaaagaaaagaacggagtagattatttattattaaagaggaaagataaaataaaaataattaatgcacttcatcaaataaaagtattaagcgcattaatcccgaataaattagcaatgcctatttaa

SEQ ID NO: 315440 - DNA, 1134 bp, Proteus mirabilis
atgcaacacacaattaattcacaatatgatgaaatggttgattttctaaaggagttagtgaatatcgatagcggctcttatgataaacaaggggttgatacagtcgctgatcttttaattcaacgctaccaaaaattaggttttgttgttgaagtatttgaaaatgaacaactagggaataactaccgtttagttcataaagatgccacaaacccacaaatttttattgctgcacatttagataccgtatttcctaaaggcacagtagcagagcgcccatttagtatcgatggctcccgtgcttatggccccggtgttattgatatgaaagctagccatgttttaacttactatgcgattaatgcactcaaacaaagtggcgatctctcttatcaaaatgttgaaatattgcttaactgtgatgaagaaatagggtcaaaaacatcgcgtcatttaattgaaaaatatgcaaaaaataaagcttatgcattaattatggagcctgctcgtgcgaatggtgccattgttagcgctcgtcgaggtgttggaacttatgagctgttgattgaagggaaagcatctcactcaggtattgcaccagaagcaggaattagtgctattcaagagctttcatacaaaattcaggccctacatgcgctttctcgccatgatgaaggtctttccgttaatgtcggactgatttctggtggtacatctgtcaatacggttgctccccatgcacgagctgaaatcgatgtgcgtatttcaacggatgagcagggtattgaaattgataagcaagtcagagaagtttgtagtcaacctgtgttagcgggggttaaattaacgctaaaaggtggcattaatcgccctccaatggtgaaaacacctgaaagtgccaatttaatagaaatcattaaacagcaagcggatttaattggcttagctattgaagatatttcaaccgggggaggatctgatgcctcatttactgccggtgtcggtacgccaagtgttgatggtttaggccctattggtggctatcaacatagtgataaagaatatctcgatttaccgtcattgaccgaaaggacagtgctatttgcaaatgttattaagcgtctgtctcaataa

SEQ ID NO: 315441 - DNA, 1452 bp, Proteus mirabilis; identical to SEQ ID NO: 296351

SEQ ID NO: 315442 - DNA, 153 bp, Proteus mirabilis; identical to SEQ ID NO: 298591

SEQ ID NO: 315443 - DNA, 186 bp, Proteus mirabilis; identical to SEQ ID NO: 298590

SEQ ID NO: 315444 - DNA, 228 bp, Proteus mirabilis; identical to SEQ ID NO: 298588

SEQ ID NO: 315445 - DNA, 471 bp, Proteus mirabilis
gtgactcagattctagatatgtgctgtggtagtcgcatgttctggtttgacaaggaagatagccgagcaatttacagcgacatccgcgcagagaaacatattttatgtgatggcaggaagttaaatatcacaccagacattatcgctgattttaaaaacctccccttctctgacggctcgttttatcaagttatattcgacccgcctcatttaattagagttggccacaacgcatggatgtttaaaaagtacggacgattaaataaagaatcatggaaagacgatttatcaaaaggatttagtgaagcatttagagtgttgaagccaaacggaacattggctttcaagtggaatgaaacgcaaatacctacaaagcaagttttagcgctaaccgaccaaaagccaacaatagtccagcgtgtcggcaagaacgataaaacgcattgggtgctgtttattaaggaggcgtga

SEQ ID NO: 315446 - DNA, 153 bp, Proteus mirabilis; identical to SEQ ID NO: 305235

SEQ ID NO: 315447 - DNA, 981 bp, Proteus mirabilis
atgattagaatagtattgtttacaataatagccattatttcaaataatgcagtcgctgtgagctgtgtcagtggttgtaatgcgaatgaatattccacgcttagtggacaactatcaaagacggaaaataaagtcggtgttactaaagatgcttctgatattactttgtccaatcgaattacattaagatggaatgcgggacaagcgcaaacatgggcgacatattccaatggtaatattcctagtgcaaataccagcaataatgactggatttattctaagatagatgactatatttctgttgcgttaagaatgactaataattgtagaacaatttatgtcccttataatgtacctacgctaagctctacttgtggttcccgtacttatactgaaaacgaagaaagcgtcgtttctgtaagaaagtatcaaaccagaataaaaattgacaaggctattatttctggtacctatgtaaaaaatatttttgtaggcgaatttggtttttgccaaccacagaattgtgcgactaaacaaactatcattacaaagctatttttaaatctttcaatgacagttccacaatcttgcgttattaattcagggcaagtgttgaatattgatgcatcaagttttaaagtagcagggaaaaaagccgaaggagttaatacggtttctagaaacttaagtattcaatgtgacaatatagatgccagtgctgatttaacaatgcgattacaagcagattcagttcaaggtaatgctattgtttctaataataaaagtgttggctttgtggttgctaattcaagtggatctgaattaacacctaatgatttatcaagttttattcctttcagactcaaccaaaatgctgatgctaatgtcacgattaatgtttatcccgtaagtattgatggaaaaacaccaactgaaggcgctgtcacatcaagtggctttctaagagttgatttcccttaa

SEQ ID NO: 315448 - DNA, 285 bp, Proteus mirabilis
atgcctagtctcgtgggctcggagatgtgtataagagacaggtataaaaattactaccctaaaaaaattggcgctattaaagataggtatgattcatatacaaaaaaagtagatagtaataatccaatatttttaggcattacctctattatccaagccaataatattgcaaagggaatggatttatatttagaagacaaatctaataaagataagctcaaagaagcgcaagaattatacaattcaatgtaccaacaattagtgaaagactgtggaaaaatttag

SEQ ID NO: 315449 - DNA, 744 bp, Proteus mirabilis
  misc_feature (640)..(669): n is a, c, g, or t
atgcccaaaactcttatgagtcttaaacaaaatgattttacgcataaaaaaattatcgtaggtattagttcatgcttattaggggataaagtgaggtttgatggtgggcataaatgttgtcatcttgctgctgatgaattatctgagttctttgaatatcaatctacttgcccagaaatggctattggtttaccgacacccagaccagcattacgattagttcagtctaagactggtgaagttaggttaaaatttagtaatggaagtgaaggtgacttaacccaattgatgaatgattactctatcgaatatttgaggaggtttaatcaatttagcggttatatcgtgtgtgcgaaatcacccagttgtggattagaacgtgtccgggtttatgatccaataggcaacggcaataaaaaatcgggtacaggcatttttactgaaaatctgaaaagaataatgccgtggttacctatagaagaagatgggcggttaaacgatccctatattagagaaaattttattacacgggggtttgcgcttaatgagctaaatcaattgaaaataaataactttactcgccaggcattaattgattttcatacaagatacaaactattgttattagctcattcacaannnnnnnnnnnnnnnnnnnnnnnnnnnnnntacaacatcaagccactcgtcgtaatcacactaatgttcttatgcatgtgcaaggatattttaagcaagatttaa

SEQ ID NO: 315450 - DNA, 159 bp, Proteus mirabilis
atgacacctgcacctatgatattgctagcaaagttatcagaagtagggtcatatcctttacctttagatttagctgtactccatgcacctacgaacggtaagaacacggcattgatagctaaaccgccagacggacttgtctcaccttccgttggataa

SEQ ID NO: 315451 - DNA, 231 bp, Proteus mirabilis
atggagaaaaatattactgggcatacactttattatttgaatttctttgataataaaggtgatcctatggtcacaccgcctagtttacattttgcatgtgtttatattggctttgaacaatataaaagaaatgagttaggtctattaaataaacacagcgaaaaaatgcctgatgcagtaaaaacgggaaatcacattattatcatcttgttatccacctattgtaaataa

SEQ ID NO: 315452 - DNA, 369 bp, Proteus mirabilis
atgttaatgtcattagatactattaaacatatgatttctgattatattctttaccgagatactgataggcagatcactcgaaaatgtgagcgattattaaatggactcgttgaactaaaaacacatttatatgactatattttaaaaggtaaaccctatcgttgtttatctttatcgctattcattgacgaaacacaatatgaaaatagaggtgaagcttttgtctttactacacatctttaccattttttcccattctgtttatctgaaaatatgttattggaaatgtcagttacactcaatgatcagaaaaacaccacttggtatttatctccctcaccactaaggggctataaatcaatgatttaa

SEQ ID NO: 315453 - DNA, 912 bp, Proteus mirabilis; identical to SEQ ID NO: 307546

SEQ ID NO: 315454 - DNA, 144 bp, Proteus mirabilis; identical to SEQ ID NO: 289928

SEQ ID NO: 315455 - DNA, 477 bp, Proteus mirabilis
atgaaccaaatggttaacccatatgatgcattagtcagttaccaacaagcgcttaatgataaattgattaaccctgatgtatgcaaactacatactgacctgacagttctttttgaagattttggtgaagaattccgttttacatatgctttaactgaagatgggattgttaaaggaattgttcttttcgttcgtgctgacccaattaatggcattaactgtttttcaattggttatgctgtcactgagacttttcaaaatcaggggattgctaaagaaatcattgaaaaaagtattgatgaattaagaaatgggtttaaagatttactccctcaattttatgttgaagcaataattagcgttaataatgaagcatctaaaaaattagcacttaaaattatcagtgactcacctaaagagacaatagacgaatattcaggaagtcctgcataccaattcgttcgattaattaattaa

SEQ ID NO: 315456 - DNA, 1329 bp, Proteus mirabilis
atgatgggacgttcgggttatatcactgaatttttggcaacttatgcaggtttagaaaataccaactggttatatggctttacgggaatttggcttgcacaagtacttgcctttacccctatgtcttttatgatcttagatggtgcaattaaaacaatccatccgtcattagaagaggcttcttatacccttagagctaatcgctaccaaacattctttcatgtttttatgccgttactaaaaccagcattagccaatgcctttttgatcgttatagtgcaatcactggctgattttagtaacccattggtgctaggtggcaactttgacgtgattgccactcaaatttatttctatatcaccggctctcaacttgattaccaagcagcaagtacgttaggtgcttcactgttggtattctcattattagtgttctgcattcaatatatgtggattggcaaacgctcatatgtcacggtgtcaggtaaatcctatcgtggtgatgttcaaccattacccacctccttagtaacctttgtcactagtgtgctgggtatttgggttatctttaatatcttactctatggcagcattttctacggcagttttacggttaactggggtgtggattacaccttaacctttgataactttattaaattatttggtcaagggatgagcgatggcgcatggccatcattacttgataccttactttatgcgggtatcgcagcacctattaccgctattttagggcttttgatcgcctatattgtcgtgcgccaagattttaaaggtaaaaagagtatcgaatttacgaccatgctctgttttgccgttcccggtactgttgcgggggtctcttatatcttggcatttaatgattcaccgttttatttaacaggaacggcagccattgtgattatctcaatgaccatgcgtaacgttcccgtgggaatacgagcgggtattgcaggattgggacaaatcgataaatcgttggatgaggcgtcattaagtttaagagcaaattccatgcgaactattttgtatgtgctattgcctttattacgccccgctattttatccgctttaatttatagttttgtccgcgcgataaccaccgtcagtgcgattgtattcttagtgactcctgaaactcgcgttgctaccgcttatattttaaatcgtgttgaggatggtgaatacggcgtcgcaattgcctatggctcgattttaatcatcgtgatgttggctattattttcttatttgactatttgattggcgaagcccgtgtttcacgctctaaagccaaaaatgcacagtaa

SEQ ID NO: 315457 - DNA, 240 bp, Proteus mirabilis
atgaataaaaaaacgccaagttatagctcactcgatgatgtttatgcatcggttgatttatcacaatccttaccgaaaacacattttccgcaacaagagagccatcctcgtcatgtttttgatgctgtaagggatgagctgatgctagatggcaattcaagacaaaatctggccacattttgtcaaacctgggtagatgatgagatccgtgatttgatgaatttatctatcagaacatga

SEQ ID NO: 315458 - DNA, 216 bp, Proteus mirabilis
atggctaacggatcagtaaacaaagtaattcttatcggcaatttagggcgtgatcctgaaattcgctacctgccttctggtggtgctgttgccaatttagctgtggccacatcagagaaatggcgtgacaaacaggtgaaaatcgcgaaaaacagaatggcatcgtgtcgttttgtttggaaagcttgcagatatcgccagtggctatttgtgtaa

SEQ ID NO: 315459 - DNA, 270 bp, Proteus mirabilis
atgcgtatggaaaaattaaccaatgtaacttatggaacagcaggcctaacggccttttttgccagtctttcgttatatgaatggggatttgttatcgggatggcgttcagcatgcttcttggtttagccacttattttatgacacgccgagagcaacgaaaacgcactcaattatttgaaaagcttgttcgtcatgttgacccacaaaacccgaccgaaaccttaaaaaagcttgctgaattaatggtgaaagcgccaaaggatatttaa

SEQ ID NO: 315460 - DNA, 462 bp, Proteus mirabilis
atgaaatacggaaaactctatgccgtcattgcgatggtaggcattatcgtgggtagttattgggtgattaactggcaagctaataggattaattcactgacagatatcaacaaaaaactggccgtggctctcgaagaacagaagtctattaatactgactatcaagcacgcataatgcgattaaatcagttggatattcaatatacgcaggagctagcgaatgctaagaatgaaattagtcacttgcgtgatattagtgagcgtcatccagagcgggtgtacatcaaagccgagtgccccaaagtcaaaaccactccctccaccagcttggcttatgcaaccaccgcccgacctactgacaccgctatccgaaattattggttactcagagagcgaattgcagagtcagaacagatgattaaagggttgcaggattatattaggacggagtgtgtgaactaa

SEQ ID NO: 315461 - DNA, 204 bp, Proteus mirabilis; identical to SEQ ID NO: 302017

SEQ ID NO: 315462 - DNA, 417 bp, Proteus mirabilis
atgaaaaatgaaactaatattcgccttggcagacattgtgtattcctgatgaacgtccatttggtctttgtcacaaaataccggcgaaaaatatttgatcaggatgcaattgaaaaattgcgaggctactttgccagtgtttgtgctgattttgatgttgaactggttgaaatggatggggaacgggatcacgttcatttactgattaattacccgccaaaactggcgatatctaatctggttaacagccttaaaggggtatcgagtcgattacttcgacgtgatcgtcctgatattgcccaacgtgattactacaagggggttctttggtcgccgagttatttcgcggggagttgtggtggcgcaccaatatccattatccgccagtacattgagcaacaggaaacaccgagttag

SEQ ID NO: 315463 - DNA, 264 bp, Proteus mirabilis
atgcgagtattacagcaaggggatcgtttaactgtgggcaatgaactcaaaatggtggtggcagatgtggtcagtgatcatcaaggatatgccaatattcttatttcgccgatgttaagaacgtcacctaccgttaatgaaatgctcgaggttgagcgtccttttggggtttttcgtctcgttgataatgaacagggtaaatttcagcatcgtcgcttggggtatacccatatcacgttatcttttgaggaggtgttgtattaa

SEQ ID NO: 315464 - DNA, 264 bp, Proteus mirabilis; identical to SEQ ID NO: 305155

SEQ ID NO: 315465 - DNA, 306 bp, Proteus mirabilis; identical to SEQ ID NO: 297209

SEQ ID NO: 315466 - DNA, 306 bp, Proteus mirabilis; identical to SEQ ID NO: 297209

SEQ ID NO: 315467 - DNA, 306 bp, Proteus mirabilis; identical to SEQ ID NO: 297209

SEQ ID NO: 315468 - DNA, 252 bp, Proteus mirabilis
gtgatttggacggatcatgcgacaaaagtacgtgcagcgatcatgccttatcaaggacgggaatattttcaagcccagcaagtacaaagtgaggccacaacgcgaattcttattcgctatatcgctgatattgatacttcgatgcgtattgtatggggtaagcgaatatttaatattatttcgattattgacccttatgagcgccatcgtgagcttcaattgatgtgcaaagagggcgtgaatgatgggtga

SEQ ID NO: 315469 - DNA, 252 bp, Proteus mirabilis; identical to SEQ ID NO: 315468

SEQ ID NO: 315470 - DNA, 390 bp, Proteus mirabilis
atgtggttatcatctctctggttgactaaggcatcaaaagtagatttagtcattttttgtgtattcttaagggtcgcaatcaatatcatcagagatgtaaaagatagagcagatgttaatagtacatttataatagagaaaagtcctgaccagttatcgaactttgtactatcaaaattacttgcttctaagatgccagtaacaataaaaaaaaacattaggataaaaattaatacagttactagcgaaaataatattataaatttcatagcaactactcatgaatttagattaagcagtggacgtaaagtggtcattagacaaaggaaaggggctacgttttcacgtaaccccttgttttatttggtgggctggcggagtctgaattga

SEQ ID NO: 315471 - DNA, 468 bp, Proteus mirabilis
ttgtccaaattaagcaaacaattaaccacattagcaaaacaaggaggaggaagttttaaaaccgtttcggatcgcttgaaaatagcctctcgcattgcggatagaatggaaaaactgaatattcaaattcgtgatgtaaaacatatcaaaacaaatcatatcgagctttatatcaaaagccgtcaggaagaaggcatttcaaaaagaacacttcaaaacgaaatggcaggcattaggaatattttagcggttgctggcagaacaaagcttgcctcgcctcaacatgaaaaactcagtaattatgcgcttggtttatcaaatgcgagccgcgatggtacgaaagtggctattagcgaagaacggtatttaactgctttttatcatgcagaaaagcaagatatgggggttacaatgaccatgcaactagcacgttatttcggattacgtactgaagaggcaagtcattaa

SEQ ID NO: 315472 - DNA, 195 bp, Proteus mirabilis
atggacattatcgactcagcaaatgaaacaaacgaattatatattcaagtgtcattatcaaatcgcaaggtagcgattaaatcatatagtgggatgtgtatctggtgtcacgaagaaccggtagcacctaatagcgcatattgcagtaaagattgtggtgatgaccatgagcagtataaacggaaaaatggatag

SEQ ID NO: 315473 - DNA, 378 bp, Proteus mirabilis
atgactgaaatagaacaagctcgttttgaaaaaattgtaaacgttgttcacggcactcttaatggcctttctgctttgtttagagagtttggaattgatggcatgcatgaattaacaaacccatcaattgaacagctaaaagagctagtcgcaaaaatgaatagtgacgcaaactcttatgaaaaacagcttttatcgtccgatgacgagaatgcaattatggctagaatgttcctacaaaacgtgaagcagggtctgctatatgctgaatctctactgataggtgtagagaaatttaacctagaagcttgtaataaagcgcatgatgacattcagagtagcgccttaataattccaatatggcaaaagccagattga

SEQ ID NO: 315474 - DNA, 273 bp, Proteus mirabilis
atgaaagaagtttatatcaatgattacatgaacggaaatcgacagttaccaaaaatgtatagggctattcctgttcgcgtttatttgtgtgacggattacgttatggggaatacacagagtggctcttgatggttcgccgtgtgcgggatagtaacgggtggcgctggcaagtcataaaagaccaatcccaaaaagatatctggcaatatcttgatgaccttgaatggctacgagaacagtttgaatatcattattctacgcacttcaattaa

SEQ ID NO: 315475 - DNA, 270 bp, Proteus mirabilis
atggttataattctcatttgcattaaatatttacctaatcaccctatttttcttgtgcgttttctcctcagctattccccgcaaattagccctgcctatcggcagaagctattatcattagggatgctgccaggcgctattttcaatgtgatccgtatcgcacctttaggtgatcctatccaaattgaaactcatcgggtctctttaattttgcgtaaaaaagatctcgctttgataaatcttagcgaaatcgctcataacgaaaaataa

SEQ ID NO: 315476 - DNA, 162 bp, Proteus mirabilis
atgcgtgaacattttttctctgcattgtcaccgtactcttcgcgttttgccacagcaaaagcagagatgattggtgagtggttaaaagagaacaccatcacagggatagctaaccataaggttactaacaagccttggctcataccagaagttgaggcgtga

SEQ ID NO: 315477 - DNA, 252 bp, Proteus mirabilis
atgcttaaaagattaactttattttttactctctttatcattgttggttgtgataatacaaaaaatgaaaaaaaagaatttatgcatgggtttgcgtggcatcagtccatgactgatattaaaaatctaaacttaaataatttaaaatgtacctccgcaccagaaggttgggcttgttcctcttggtcagcacctaataaacaactaaatgattacatctcttttgatcttagaattagaaaatcaatctaa

SEQ ID NO: 315478 - DNA, 2469 bp, Proteus mirabilis
atgaaattaaagcagagtgcttgtctcgcttttatgatgtttccggcgctgtcttttgctaataatgagtttaattttgtcattgaagattttgaccgttatttagaagcacaacagcccgttgatattaagcctgaaccctctgcaacaatttcatcttcatctactcccgatcagcgtagtggaacggtgcgttccactgtgacattaaaggaaaagccaccacaaaaaccacaacaaaaaattcagcctaaacagcctgttgtacggaatgaacatcaaaccgtggtacgcaatgagcatcggtcagtagtggcgactccctctgtacctcaggtgactttgtctgaacaatgctctgtggtatctacaaataccaacaaaataaacagtgattacactcattatttaacaccactgctttcgtttgtaccgattaaaccgcaatttacccctgaggacttgaatcggtattatcaaagtaaatccgtggtctataatcctctaatgctttatacgcgtaagcgttatccagggcagccatatcagtctactgataatactttattagatttcattccaaatacagtgtattcagtgactgaaataccttttcattttttatatcaatttaaacgttctttgcttgaccataagcaacctctctttaataaagagctattaaatcgtttagcaaatactcgcgaaaaatatcaacgtctgtatcagaaatttactgaacaaaccgcgttattaactgaaagtttaactaaactgcaaaccgcagaagaaaaagttcaacaattaacagcggaattggcaaaaacgcaagataaactggctgtagcgaataatttacttaatgatgatagcctaaaacagtctgtggctaagttacaaaatgaattagcacagtctaaaaaagagcaggatacattgcttgcacaattagctgaaaaagatcagttgctgtttgatgtgacagaaaaaaataaagtattaactaaacagcaagaagattttgatattcaggcacaaaaattaaatcaattgactactcatgttgctcaacttgagcaacaaaaacagcagctacaatcacaatatgggcaggctcaacgcttattaacaaataacagtgctaaaaaagagattgaggtactacaaaattctttaactaatttatcagcagtgcgccaatctttagaaaatcaattagctaaaaacaaagcctcttttgaagctactctagctaagaataatcagttaattgatacccaacgccaacagatagctcaacttaacgatcacataaaaaaaataaaccaagagcaacaacagttaaatcattcgttagtgactcttcaacaacaaaaagcacaagcagatgatcaattaacacagatcccagcgttgaagcttgagttacaaaataaggttaatgaattagctgagctgaaaaaaagtttatctacgggtgagaaagcttttgatgctttgatttcagaaaaaaatggtgtaatcgctaaattagagaaagctcaggcagatcttgccaataagtatcaagcattggatacccaatttaaagagaacaataccaccattgggcaacttaaagagagcaaaatagcgaacgataacgcttatgctcaattagagaaacaactagcagaaaaacaatcgcttactgataaattaacgacacaattaacacaagctaaagatcagttagcaaaacaaaattctgaaagtaaccaactaattgcttcattaaaacagcagcaagtagaatcgacggctcaatttaagcaacaagaaagtgttttagcgaattctcaaaaagagtttaatgaagtctctaagcagcttgaagctcagcgtgcgctaacgaaaacacttgaagaaaaagaattaaaattaagtgagcaactaaaagaaaaagagagtgaaattaaaaaaataaatagcgaaagtgcgagtgttcaaaaagagaataaaacattaaaacagcaattggataaagctatgggagaagggcagattattgcaagtcagcttgcatatgcctattcaattatcggtaaagataatgcccaacgaaataaatcaattctgtcggaaatacaaaaacagaactatgtgcaatacgatgataatacttactttaaaatcctaaaacaagggaaacctgtggattcaattgcaggtaaaacagttgttttcgctatgcatgaacaattaactgatggtacagtaacacttaattatgacaaagctaagccgttaattttaccataccgccaacttccactgcctcttaatacttttgttgctaaagcaggcttaaatggcaaagctaaaatttatattaaacctgatggcgggtatgggaaagatggtatcccagggcaagtacctccagaatcgatgtctatagtgacaattgaaattttagctatcaaatag

SEQ ID NO: 315479 - DNA, 915 bp, Proteus mirabilis
atgtcatctcagttcaatggacttatcccttccaattctttatcttcgtttaatatagaagtgattaaagaacttctgctctggatcgaggtaaatctagaaaagccgttattacttgatgatgttgcgataaaatcaggttatacaaaatggcatttgcaacgggtgtttaagcaagcaacgggcttaacattagcctcttatattcgtggtagacgactgaccaaagccgccactgaattgcgcttaactaaacttccggtattaactatcgcactacgctatcaatttgattcgcagcaatcttttacacgccgctttaaagctgtttttggcgtcactccttcggaataccgtaaagttgatgtgttgtgtagcgacaattttcagccccccatcaattttgaagttaccgacctccctattccaaatattatcgagctacctgaaagttttctttatgttattcaataccaatacttttgctctatcgaggatattggcaaactacatgaagatattcgtcatcagttttggaatgattttttgttgtacacagataaaaactttacggaaagtagtgtgttaatttcttatcagccaaatacattacgtaaagataagatccagattgattatgaaattggcctaaacaatttagatcactttaccagaccccgtggttttagaaaaaaagcgattgcaggcgggcgttatgttcgtttccaatttaaaggcacgttagaagaatataaacaatttgccatcaagatctacttttatactttaccggctttggggttatgtcgtcgtttagggccagatattgaaaactacatttgtatagaaacagatagcgacattatggaactaccaaaaacactggaaattgattattacgttccaattcattaa

SEQ ID NO: 315480 - DNA, 801 bp, Proteus mirabilis
gtgaataaaagagtgctttcgacaaaatatcgaaattcgatgtgtccatcaatgataaaaaaaatagggggatacggtttatcgttattcttgataccaatagtattccttcattccgctaatgcgttagagttatccgttcctattggctcaacaggttatttaggggaggtcactccgccagttggttcaacaacgaaaaattatgggatggtaaggtcagtgcttgaggcgaatacaccttatataaattttcggtgggagccttatcaattagtggtacaaccaatacctttttaccctgaaattggacgagcgggtgtggctatctacaataaaagcaatcccaaaggggcctttattgttttagcacccagtggatatggtacattgcgttataaaagagctaatggcacatatgagaatgcttcatttgcatttagtcgttcccaaaccaccgctatgacaaatatgtataataatttttcctctaattctaatgaattaagttggggtcttttgcccagacaaggcaatagtgattttttctcagcacgatacgtagatggtagtgataaagttcattcgttaacattaacaatatccagttattccgcgtatgccatcgggccattagaggccggtgaatatgccatgcgtgatgattcaaaattttatgccgtcattcgcactagttcaggttcttttgcaagatctaaaacattattaagttcaatggataatgtctaccaatattcagtttccgactcaaatcgcgaaaaattatgcaacacccactaa

SEQ ID NO: 315481 - DNA, 447 bp, Proteus mirabilis
atgtctaccaatattcagtttccgactcaaatcgcgaaaaattatgcaacacccactaaattagcagataatttagctagtatcagtgtcaattgtccttatgctaataaaaatatctatctcactctgagcccttttaataatttagtctcaggcagtgaaacagggatggagctatccaccagtagcactgaaaatatcaccacactgccttatgtggtggcttctttaaaatctgcacaatcaaatatttgtcaagccaatgcacaatcaaatatttgtcaagccaatgcacaagatgccttgcgactcgtcggtagtaataaactagcacaacaaaatatgaagagttttacgcaaaatatactttttaacctttgtgctaatggcaatatcaaagccaataaatatgcaggggcaattaatgtagcaattttaattgaatag

SEQ ID NO: 315482 - DNA, 159 bp, Proteus mirabilis
atgaaaaaacgaacaaacagtgtttatactactggatttaagcaagaagcggtcgcattagtcagcgaacaaggttatagcgctccaaaagcggcaggttttttagggatcaccgataaattactttatagctggaaagcaaaactcgacgctgagtaa

SEQ ID NO: 315483 - DNA, 240 bp, Proteus mirabilis
atggaaagctcatttacgccaacagaagaactactaaacactcgcgctacacaacagaaatcgcttaacaaagatattccttaccaagaaattttgttaactcgcctgtctatgcacgtccagagcaaacttcttgaaagtcgtaataatatgttaaagtctcagggcattaacgagacattatttatggcacttatgattttagatacaacggaaaatcgtagtattcaaccatcataa

SEQ ID NO: 315484 - DNA, 192 bp, Proteus mirabilis
atgaaaaagaaagttatgttaaaaatgatgtttcctgtcagcattatatcacttgcgctgacctcttttctttctcatgcggtaatacctccagaaggtactcttcttgcgaaacaacaagatattgttattaataatggcactgaagtttcctcccttgatccacataaagtggattacgttttaaagtga

SEQ ID NO: 315485 - DNA, 141 bp, Proteus mirabilis
atggtattaattctgttatcgcaaaaaaaagattttgtaactgccctctcaacattaactttctatgatcagtataactttttatggcgtttaagtgaaccgttgaagggcgacaaatggggttttcatgcaaaaatgtaa

SEQ ID NO: 315486 - DNA, 642 bp, Proteus mirabilis
atgcacagagggatcatcatcggcaccatcgtgatggcgttattaatgtttggtatgcactttgcgggcgcattaggtcgggcaatcattcctgatctcaccgtgccagatcaagttattccaaccttaatggttgatgtattaccaccttttgctgccggtatatttttagcggcaccgatggcagccatcatgtcaacgattaacgcacaactgctacaatcatcagcgacattggtcaaagatctctatctcaatctcgcgcctcatgccataaacaatgaaaaacgcattgcgcgtttatctagcctatctactttgattttagggatcttattgctatttgctgcatggaacccgccatcaatgataatttggctcaatttacttgcctttggtggactacaagcggttttcttatggcctctagtacttggcctttactggaacaaagcaaaccgttatggcgcgattgcgggcatgataaccggtgccacactctatgctacactggcaacatttaatatccagattgctggatttcatcctattattcctgcgctgttattgagcttagtggcttttcttgtcgcaaataggtttggagaacaaaccttgcctcaatctgctccattacagtga

SEQ ID NO: 315487 - DNA, 753 bp, Proteus mirabilis
atggcagtaactaagcttgtgctagttcgacacggtgaaagtgtatggaacaaagaaaaccgttttacaggctggactgacgttgaattgtcagataaaggccgtaatgaagcgcaagaagcaggtaaactgctgaaggctgaaggttttacttttgactacgcatatacttctgtactaaaacgtgcaatccacactctgtggaacattcttgatgaagttgatcaacaatggctgccagtagagaaaagctggaaactaaacgaacgtcactacggtgcattacaaggcttaaacaaagctgaaacagctgaaaaatacggtgacgagcaagttaaacaatggcgtcgtggttttgcggttaccccaccagagttaactaaagatgatgatcgcttcccaggtaaagatccacgttatgcatctttaactgaagctgaactgccattaacagaaagcttagcgttaactatcgaccgtgtaacaccatattgggaagaagtgattaaacctcgcgttgcttcaggtgataaagtgattattgccgctcacggtaactcactgcgcgctctggttaaatacctagacaatatgagtgaagaagaaattcttgaactgaatatcccaacagcagtacctttagtttacgaatttgatgaaaatatgaaaccaatcaaacgttactacttaggtaatgcagaagaaatcgcagcaaaagccgcggctgttgctaaccaaggtaaagcaaaataa

SEQ ID NO: 315488 - DNA, 1158 bp, Proteus mirabilis
atgaatcgtcgttcatttttaacatcatcaagcttagtgatcgggggactttcattaagttcgtttgttagcgctgcctatgccgcagaaacttcaaaccctaaacagctatttaatgcagaaaatcctttactgttaaactttaatgaaaactcgctaggcatgtcatccaatgccaaacaggcgattattgatgcacttccccatgcttttcgctatccagatgatgcgcgaagcgcacttatcagtgcattaggtgaagaatttaagctatcagacaaacacatcactctaggtaatggctcctctgaaaccatacaagcagccgtacaatatgtggcgaataaagcgcaaaaagcaggtaaaacagtacaactgattgtgcctgatccaacgtttaattatgccgaactttatgctgaacctttaggtgttaatatcgtaaaagtgccggttgataacacattggcttttgatttaaccgccatgcagaaaaaagcacaagcatttgatggtattagcatggtatatctgtgtaatcctaataacccaaccgcaatgctgacaccaacagcggcattaacaaattggatcacctcagcaaaagaaaatgtcttttttattattgatgaagcttacgctgaatttgtgacaacacctgaatttaccagtgcgatggcattagttgctcaaggttataaaaacttgattgttacccgtacattttcaaaaatttatgcattagctggattaagggtaggctatggtgtggcagtccctgaggtaattagtgaagtagatagtttcgtttctattgataataccaatactgccggtgctgttagcgcattagcctcgttaaaagatcacgcttttgtggcatatagtcgcaagtcaattgatgtatcacgacaaatggtggttgatactttaaacgccttaaatatcgagtatgcaccttctcacgccaactttatttttcataaagtcaaaggtgatgtgaaaacttatcaagagagaatgaaagcggcaaatattatggtaggacgtgagtttcctcccgcattaggttggagccgtttgaccttaggaacccctgaggagatgagttattttgtcgcgacgttaaaagagtttagaactaaaggatggatataa

SEQ ID NO: 315489 - DNA, 252 bp, Proteus mirabilis
atggatatagaaaaatcaccattcccttggtttttagatgatgatgaaatcaaagatgctgaaaatgaactggtagccgatgttggttttgcctacgaatcggacgcgcacattatcgcggcggcgccagagttattagaggctttgattgaaatgcaacgtaacggacgcaagcaaggatgggataataaatatgagtcgtcaatggaaaagactcgtttagcaatcgcaaaagccctcggtcagcaataa

SEQ ID NO: 315490 - DNA, 501 bp, Proteus mirabilis
  misc_feature (485)..(494): n is a, c, g, or t
atggatagcagctttaacagaacgtctcagtcggtgaataacactgaacgttcaatgttatctttatccaaagttgccgcatcacttgccggctatctatcagcttcaatggttgctagttactccgaagcatggactgagttaaacaacaaattatctaactctgttcgtgcaagtgagtcacttattgatgttactcaacgagtatttgatatctctcaagcaacgcgatctagtcttgatgccacagcaacactctacgcacgattagaacgaggaacgagagagtacaatacatcagcagaagacttagcaaaattaacatccatcattaaccaaggttttatcgtatctggtgctactgcgcaggaagcagaaaacgccattattcagctatcgcagggtatcgcgtctggcgttctccgtggtgaggaatttaactcagtagcagagcagggtagccgcttgatggttgcgcttgctgnnnnnnnnnnttgctga

SEQ ID NO: 315491 - DNA, 213 bp, Proteus mirabilis
atgaaagatctatatcttgttgattcatactggcaggttcttaacagtgacccaataactctggtagaaatgactgtatattggtacagtatgtgggctcataaaagagatatgtcatggaaaggatttctgcaaatcccactatctgaagaagatgatctacaagcgaatattctactacaaaatttgatatcaggaggcttcgatgaataa

SEQ ID NO: 315492 - DNA, 195 bp, Proteus mirabilis
atgaataaagatgaatacatctatgttcttagtgaacgtagccaaataatatccatgcttgaatcaatggatgaaactgatgtcatcagcagaatgagcttggaatatagactatcaaaaattgatgaggaattaaaaaactcctacataaacaaacactcacctgcaaaggcagttatgtttttggtactgtag

SEQ ID NO: 315493 - DNA, 354 bp, Proteus mirabilis; identical to SEQ ID NO: 298387

SEQ ID NO: 315494 - DNA, 1089 bp, Proteus mirabilis
atgaaaaagacagctatcgcattagcagtggcagtggcagctttcgcaactgcagcgcaagcagctccaaaagacaatacttggtataccggtggtaaattaggttggtctcagtatcaaagtactggtaacaattgggacggcgtgaatatcggtaacggtagcacacacaaagaccaaattggtgctggtgcatttgctggttatcagtacaaccaatacttaggttttgaactgggttatgactggttaggtcgtatggcttataaaggttcatacaacaacggtgcattcaaagctcaaggtatccaattaaccactaaattaagctatccagtaatggatgacttagacgtttatacacgtttaggtggtatggtatggcgtgcagattcaactgcaactattaatgcaacttcagcaggaactcaaaaacgtttctctgaaaatgatactggcgtttctccagtattcgcattaggtactgaatacgcgatcactcctaacattgctactcgtcttgagtatcagtggatcaacaacatcggtgataaaggtactctgaacgctcgtccagacaatggtatgctgagtgttggtgttgcttaccgtttcaaccaagaaactccagctccagttgttgagccagctccagtagttgctccagctccagttgttgagaacaaaacctttactctgcgttcagacgttctgttcaactacaacaaatcttctctgaaagctgaaggtcaagaagcactgaatggtctgtacaacgaattagctaacatcgacccaactcaaggtcgtgtagtagttatcggttacactgaccgtatcggttctcaaaactacaacctgcctctgtcagaaaaacgtgctcaatctgtagttgattacctagtatctaaaggtattcctgcaaacagcatctctgcagaaggtcgtggtaaagaaaacccagtaactggcaacacttgtgacaacatcaaagctcgtgcagctctgatcgattgcttagcgccagaccgtcgtgtagaaatcgaaatccaaggtacaactgaagttgttgttcaacctggtcaataa

SEQ ID NO: 315495 - DNA, 195 bp, Proteus mirabilis
ttgatcctaaccgtgatagagcacaaatggttagctaagttaaccgagaagcaaaaacaacaagaagaggtacaaaatattcgttggatgatagaggaattaagagtgagtttatttgctcaacagataggaacgccttatcccatctctgataaacgcatcttacaagctattgagtctatctcattaagttaa

SEQ ID NO: 315496 - DNA, 261 bp, Proteus mirabilis
atggaaattaaaagtttattaaatgaaattgaagaaattaagcgtgccatacagcaggctgataatgtgcttgatcttgacattgaaacatcaattaattgggtggtttgcgcaaataacaacacttcgtactgggcgtttgcagaccaagagtttctcattgatgccgttaagtctcagcgtgaagtatttataactcgcctgcaaaaactacaagaagcagtagccgtagttgagagagttatcgatgggcttgtttga

SEQ ID NO: 315497 - DNA, 213 bp, Proteus mirabilis
atgcagggaactaattgggttaagtgtagtgattcattacctgaagataataacgaagtgctggtctactgtgacgacactaaagaaatgatggtcgcgtatttagatgatgatggatacttttgctggctaagccaagaaatacttgggactcagttaatttgctacccatcccactggatgccactaccaccaatgccagagggtgaatga

SEQ ID NO: 315498 - DNA, 663 bp, Proteus mirabilis
atgacagaagaaagaaacggaatttacctcagaatcgatggggatcaatatcggcatatttgggcggttggagatattcatggatgctttgatttgctaaatgaaaagttacaacaaattgaatttaataaagaaaaagatttgttaatttcagttggtgacttaatcgataggggggataaaaacatcgaatgtctcgacctaattaatgaaaaatggtttcgtgcagtgcgcggtaatcatgagcaaatggctatcgatgctttgtttaatggcggtaacgttaataactggatatacaacggcggcaattggtttttcatgcaggactacgatagtgaagttttatcccgcgcctgcttagccaaagtagagaaactaccttttattatcgaagtaaatgcagatgggaaaaagactgtcattgcacatgctgattatccatccgatgaatacgagttcggcaaaccagtagatgagcagtatgtaatttggagtcgtgagcgtataggtgacgataacgtccgtgagattaaaggtgctgacttatttttatttggtcacacaccaatgattaaaggtatcgaaaaacgcgctaatcaggaatacatcgatactggggcagtgtttggttatgggctaatcatgaggcaaatcaaatga

SEQ ID NO: 315499 - DNA, 579 bp, Proteus mirabilis
atgagcaaatcattagtttttaatggtcataaagtcacgcctattgataatcaagatgggaaaatttggcttaccgctgaacaattagctgaattgttagaatacaaagacgttaagcaggtaaataaaatataccagcgacacaatgatgaattcactgaaacaatgacgaccaaagtgacggtctcgggaaaatcaataggttatgaaaacttaaccaaagagcttcgtttattttctcttagaggagcttatttaattgggatattctctcggacaaaagtggctaaagaccttcgtatttggttgcttgacttagctgaaaaagaatcaaacattgatgtaggttcaatagatatcactcaatttgcacaattaaccggacagaaaatgcacgatatgattgaagtctttaataaagcgtcattcatacatcgaggacagaaaggaagcggattaatggctcaacgaaagagagatataaagaaagtaaaggaagcgactgcactagctttaaaactgacgcaattctctattcctgacctagggggttttccagatggagaagagccagcatga

SEQ ID NO: 315500 - DNA, 1623 bp, Proteus mirabilis
atgaatatactctatttaacctttgtgctaccactgctgggatttttactgctcgcattctcaggtggtcgttggtctgaaaatgtatcagcatggattggcacgggcgctgttggtttatcagctttagtgacactttgggtggggatagatttctttgctcacggacaagaaacagaagtcttaacgctctggacttggatgtcagcggggaactttactatcccatttacgttggtacttgatggtctatcattaaccatgctaggtgttatcactggcgttggttttcttattcatatgtatgcatcttggtatatgcgtggtgaagaaggatattctcgcttctttgcttataccaacttatttatcgcgagtatggttgttttagtattggctgataatatgatgctgatgtatatgggttgggaaggggttggtttatgtagttacttattaattggtttctactataacaacccagctaatggcgcggcagcaatgaaagcatttattgttacccgtattggtgatgtcttcttagctatcggtatgtttatcctgtttgatcaattaggtacgctaagtttccgcgaaatggcggtattggctcctgaacaactgaccgcaggatcaagcatcattaactgggcaatgttaatggtcttagggggtgcggtaggtaaatcagcacaactaccattacaaacttggttagcggatgcgatggccggtccaacacctgtttctgcgttgatccacgccgccaccatggttaccgctggtgtgtacttagttgctcgtagtaatgcgctattcttaatggcacctgatatcttagaattagtcggtatcgttggtgcagtgacattagtattagcgggttttgcggctttagtacaaaccgatatcaagcgtattcttgcttactcaaccatgagccaaattggttatatgttcttggcgttgggtgctcaagcatgggatggcgcaattttccacttaatgactcacgcgttctttaaagcattactgttcttatctgcaggttcagtgattattgcctgccatcatgaacagaatatctttaagatgggcgggttacgtaagaagatcccatttgtttatgcatgctttttaattggcggaggtgccttagcggcattaccactgttaacagcagggttcttcagtaaagatgaaatcttatggggtgcgtacgcaaacggacatttcaatttaatgttagcaggtttaattggcgcattctttacgtcactttataccttccgtttaattttcatcgtattccatggtgaaaccaaaaccgaagcacaccaagttaaaggcttcactcatactttcccattagcggtattagcgttgttatcaacctttattggggcgttaattacccaaccgttaggcgatgttttcccagaaagcaccgttactcatgaaggtaagtatgtattagaaatcctttctggtgtggtagcgattgtaggcgttgccattgcagcatggttatacgctgaaacagcgtcaacttgtttctcaggtggcaaataccaaaacagggcgtttcttctcaacatggtggttccacgcatggggatttga

SEQ ID NO: 315501 - DNA, 147 bp, Proteus mirabilis
atgggtaatccagcatctgcaatcgttattttgtcagtatgtcctaaacgtgcaattacgctagaaattgaactattaagttatacaccttttttcatctttgcctcctcagcgaaacgtttcgctgttctacatagtaggaaatga

SEQ ID NO: 315502 - DNA, 210 bp, Proteus mirabilis
atgttttatactgctggtgaaataatccgtcatactcctgcagaagttatttatcatcgtgtttgtgccagtgccagaaaacctactttattagcccctgaatggtgtgaaaatcactggttgggtatgaatgcactctatcaatacttattagagaaaggcgtacaaggtagtgggataaataagccttttgtggctaattgtaaataa

SEQ ID NO: 315503 - DNA, 198 bp, Proteus mirabilis; identical to SEQ ID NO: 14560

SEQ ID NO: 315504 - DNA, 132 bp, Proteus mirabilis
atggatgcacaactgtataaagagtttaaaattatagaaaaagcgttttggtcagagatatgtgaaaacaatattcgtattggtgatcatacccacttgctttatgacaccgatggacgcgcctatttttaa

SEQ ID NO: 315505 - DNA, 426 bp, Proteus mirabilis
atgaatcattcaaccgaatcagctattgcagtgactctcgttcctgatgaacaacgccttgatttttggctcaaccattttggtgcagttaaaggctgggctacttttgagatagtgaccttcactacgatggggcagttttgtgaggcctataacggtggctattgggaatattgcaccctctccaatggtggggcgtttatttatccggatatatcagaagaggcactgaccttattcaacatgcataactgcaatgaagcgcaggtcagttgtgaagccgcaggtattgtcgtgtgcctgattttatacagcatctggtcatttcaaaccaaaagtgaattgatgtgcgaccgattttatcagttgcgtgactacgcgttacaacatcccgaatccactgccattttccatttaattgattaa

SEQ ID NO: 315506 - DNA, 933 bp, Proteus mirabilis
atgataagtgtagatgtaaatgataattatttagagtgtagacaatattatgctgtcctattcagtatgctttcagtaaaaacactattacctgaagatttttataaaatgattatcgaggcaagaggtaagaatgttaatacgttaattagtgagttgaatcagcatgtcgggaatgtcttaaataatgttgatcattatttaagagaggtggagagaaaaactattccaatagaacaactatcttttttaagggatgaaagaatatcatttgttatcttaaactttctcatgaagtcgtataataaataccttatagaaatggatcataaatcaattatggctggagtgtataattattcacctttaaatttgattccaatgatgggtaaaaatataccttttcattatattgtttgttttttggattttatagttttatttatgacccctaaagattttaatgcgatagtttttcaaatgagagataaagctttatctattactaaagagtatccagatcctttttcatttttgtcaaaaaaaactgaagcattaaaatggataggagagaggatgatgcgcgaaaatattgctgctgatgatgatgttaatgttcttattaaaaatcagaaatggaaaatcattgtttcctgttttgattattgggctgttatttcaaccgtagaacgtgtaaagctttttttatttcaaacaaagaaagcatggagccaaaaaaagtatcgtgatggagttaaagataaggctgtactcaatacatatatttcaaaatcatctatgttgaaattaaaagaaatagctaaaaatcataataaaaatattaacgaaattatcgaggcgatgattgaggaaattattttgccacgagatccacttaaagaacttatatcgttagttgaaaagaaaaattaa

SEQ ID NO: 315507 - DNA, 1260 bp, Proteus mirabilis
atggtcaatatccctgaaggtcatatatcgtttttaccccccggcagtaatgaatggaaagcattagattttcaatcttatatttggaatcgcgactttattgaaaatgaagcattaaaaaatgcaggttcccctccattgacaccacagcctcttaatgaagctcaaaaaaaagaattgcaagataaccaacattacattaacgatctattattaaaatcgctgcaatttcccaacctttctttttttgctggcagtggtacttcacttggtgatgttggtggaccaagcatgtgggaattatggaaaaatgctatgtggagtgacccaacagcaactagtaatggtgagctaaaacctgaggcgctttcagtatgtcaaaaagttaaatattctgaacgaaactaccctaatattgaacattttctttcaaactgtgaagctttattagcattcctaaataacgttaaaacgattattttagataagtgtcgttcttttttagagaaggatagtagtgacctttcctcatatattaatttattacaaaaaatggggaggagaagagttagagacccaaggcttaaaatatttaccacaaattacgatctcacatttgaaaccgcggcttctgaattaggaatgatggttgtagatggattttcatacacaggcattagacggtttgatggtaaatattttaattatgatgtgataaaaagagatgaaaatgatcatgactttgttgaaggtgtattccaattatttaaacttcatggttcagttagttggctaagaaaaaatggacaaatatatgaagaccaaaatccaatagcaacaaatgcatgccttatttaccctgctaaaggtaaataccaacaagcgttcatccagccgcatctagaattgctctctcgatttctagattttttacgtaaaaaaaatagctgtctagttatttctggttttggttttaatgatgaccatatttcggaacctatttattctgcaataaaatcaaatcctagcatgagattaattatagtagatttcaaatgcacatcacatattttgaataatggcaaaaatggttctagtaaatactggacgctatttaaagaactatctttatctggtcatgacattcattttttaaatgcatcttttaaagatttcgttaatttagtgcctaaccttaaagcattaaccccagcggaacaattagccaatgtaataaaaaaaattggagtaaatgattga

SEQ ID NO: 315508 - DNA, 1731 bp, Proteus mirabilis
atgattaaccaagctctcaaaggtggaatattaaatagttatttaaaagttggagtcgtctcctccatttattcacaagccgttagagccaatttaatttatgtaggagaaattagtggtacgtacatgaatggagatcgatacggtataggagaagttggtgaaattctattaattgaaggacaacaatcaattgttttgggacgattaattgaagttaaagtacccgaatatgagcgtggggatatatctaatgaatcaatacataataaaaaaattgatgctattggtattatacagcttcttggtactattgattcatctaacttacgtattgattcaggaattaaagcataccctagattaggtgacatcatctattctgctccattagaatttatatctttaataccagaactcattaataaaggtattaaggataataatgatgaaaaaattggaatcgttctaggtcatattgctggtggagaatcaagcattgttacagttgaaccagataaattatttggtaggcactgtgctattttaggtgcgactggcggaggcaaaagttggaccactgcaaaattaatagaagaatgctctaattatgagaattcaaaaacaataattatcgatgcaactagcgaatatagatcattcgcttctgaatattgctcacactttcacttaggtgatcctattaataaatatgaatcatctcttgagtttcgcatacccccaactgatttcattgaatcagattttattgctatgtttgacccatcaggaaaagtccaaggtccaaaactaaaagaagcaattaaaagtcttaggttagtatctatagaccctacaattgcaaccaatggtattttacgcaaaataaaacaaccgaaggctgattatcggagagctatgaataccggagataactctaaacttgttgatgacccaagccaaccatttgatgtaacaaaactcatacagcaaatagtacaggagtgtaattatgataatggagatgactcgtggggtaatgctgcaacccaagatcttagttactgttcctcattattaacaagaattcaagcagtgacatattcaagttctctaaaatcagtatttcatggagatgaaaaagtattaaaacttggtgatatattaaatgatttcctaatttccaataaacgtgttctgcgcttatgtctaagtgatatcagctatgaattttttgctagagaaattttagccaacgttattggaaggaagttattaactttagcaagatgtgaaacatttagaacacaaccattattagtaatagttgacgaagctcataattttctaggaaaaagagttggctcagaggatcattctataaaacttgatgcttttgaaatgatcgctaaagaaggacgtaaatatgggttaaatatttgtttaacaacccaacgcccgagagatattacagaaggagttcttagtcaaattggtacactgttagtacatagactcacaaatgatagagaccgtgaagttgttgaacgggcatgtggagaaattgataaatcagctgcttcattcttaccaagtctaaaacaaggtgagatcgcattagttggtgttgatttccctattccgatgactattcaaataggaaaaccgatctaccctccaatatctgactctcccggatatggtaatatatggaaaagaacagtcatttaa

SEQ ID NO: 315509 - DNA, 213 bp, Proteus mirabilis
atgcaatatccaaaagttattgttaatggcgtatcggttagagttgatagcgctgggcgttatagtttaaatgacttgcattcagcagcagtattgaaaggcgaggcaaacgaatcacaaaaaccaagtaagtttattcgcagtgcttctgtgaagcgttttgtttctgctcttgatgccagaggacaaaaaagtcctttgaaagaaaattaa

SEQ ID NO: 315510 - DNA, 291 bp, Proteus mirabilis
  misc_feature (17)..(26): n is a, c, g, or t
atggaatatctcaagannnnnnnnnnatctcaagaaggaatgcgaaaacttgaagttaatacactaaataaaataaaatttcctaattttgaactaattgaaaacagaaaagcaaaagaattaattacattgttttattctgaagatagtatagattttagaaatatacaacaaagacagcttgatagagcatggtctgaagttctctctccagacgaaccaatagcactaacaaatgaagtttttgatattttccaagagcttgtagataatcgtattggtcttggataa

SEQ ID NO: 315511 - DNA, 741 bp, Proteus mirabilis
atgagtaataagtatttaattgataataaggtcattcttgatatcgatagaatgacactatcacacgatcatgaaagtattaaaatttctgaatctgagtgtaatttgttatgtgcttttcatgagggactctttaaaaaagaggatttaattgattgggtatggggacgtaaaggtgtcattatttctaatgccagttattataaattacttaatcaattacgaggttcatttgaaaaaataggtctttcggcatccgctattttaactcgccctaaagtaggtgtgacgctttctgtcactattgaaaaacttcctgatgaaattgaacccccttattcaacagaagctccgttgaatgatacacatgaaccaattatagaactacctgtggtaacaaaactcatacctcggcgagtttctctgcgtaaagaatggttttttttagtttgtgctaccctgttccttgtgagcttactatttctatttaacaagcagaataccgactatttttctccacttggaacctacaatggttatcaattttatggtgtcaccaaagataatcgtactttagaaaatgccgtagaagcttatacggaactcagtagccaagtgtataagcaaaatggtaattttatttattatattcgtgttcctaatacgaatatttttgttcagtgtcttaatcagctgaatgttgaggagcccaaatgcataactataaaagaaatatactga

SEQ ID NO: 315512 - DNA, 318 bp, Proteus mirabilis
  misc_feature (282)..(291): n is a, c, g, or t
atgtatcacgatcttcaaggaaaagttgctgtagtaacaggttcgtcacgaggaattggtgcagcagtagtgacgagattagctcaagaaggaatgaacgttgttatcaactatcactctgatgaaaatgaagctcaagcattagccgatagcttaaataaacatggtaaaggtaaagcgattatttttggcggtgacattagtgatgaaaaaattgctcataactttatttataaagcgattgaccactttggtcagctcgatcttctgatcaataatgcnnnnnnnnnnagacacaaaccccttcccatgcagtga

SEQ ID NO: 315513 - DNA, 129 bp, Proteus mirabilis
atggatgtgcaaaaaataaaactgacgttagatttattgactctcttgtattttaagcaagttagtgttttgttccaaaaaaaacaagtttctctcatgcggagtatttttctttgggatcgattctga

SEQ ID NO: 315514 - DNA, 831 bp, Proteus mirabilis
atgaaagatttaaaagatttaaaaaatttactgaaggcgactaagccaaatcatgattatcccgcaggattaatccatccttattgggcaagaaaaccaatcaatataaccgagttattagttgaaaaattaagtaacccaggagatttagtagtagatccatttatgggatcagggacatcattgatcgcagccttgaagttaaacagaagaactatcggatccgatctcagccctatatccaacttattagtaagtaccatactttcaacgacagattcatctactcatttaaagggtatattatcatcagcttttgaagagtggagaagttatgctatagagatatataaaactacagatggattatgtgttgaaagggagtctttcaatgttgaaggtagctatgtaggtggaaattttagattagttaattgtgaggtgaaaataaaacctatcgtaaataacaatctaaaaggaaaggttctcatttgcgacaatattatatactcatgtaaagatgatgaactaaatataactaaccctttagactttgaacgcattgagtttgtagaaaatacaagaatagctgttcataatggtgtgaaagcttctgatttttttactaatagaaataagtcatttattaatcactgtctcttatacattcgaaaaacagagtttactgagagtgaaagaaatttcttaaagatttttttatcctctatgcttcctttactacgattaagtgataaaaaggcaagttcacaatggccttactggcgacctaaaaaagaactaaaagaaataaagcttttattgattttttaa

SEQ ID NO: 315515 - DNA, 531 bp, Proteus mirabilis
ttgcaactcacaaaaacactgtttcgcttaagtgatacactctgcttgcatatcgatgatttaactatcaatgaaggagaaagttgggcattcgttggtagcaatggtagtggtaaaacggcgctcgctaatacattatgccaagaggggattttattatcgggtgagcttattaataggtttactcgtccgattaatctctcttttgaaaaattacaaaaaatgatagaggaagagtggctgcgtaacaatacagacttattaagtgaagatgaggatgatacgggattaaccgtggctcaggtgatccaaatgcaggtaaaagataatgatcgctgcctgttattagcaaaacaatttggtattgatgcacttttatcaaggcgttttaaatatctttcaacgggagagtctcgtaaggtactgcttattcagttattgatgaataaacctgatctattaattttagatgagccttttgatggtttagatattgactctcgtcgtacattaagtgagttactttcatga

SEQ ID NO: 315516 - DNA, 126 bp, Proteus mirabilis; identical to SEQ ID NO: 302109

SEQ ID NO: 315517 - DNA, 567 bp, Proteus mirabilis
atgcagcagcaactgcttacatggatacgtcagtttaatgaagagtacgctcaaatcacttctctgttacttgttttattgatcatttttgttgttgctcttgttctccactttattttgcacaaacttgtgctccctaagctttcaaaagctatcagtaaatacgatcaaaagtggcaactctcttttgaaattaataagttattcagtcgatttgcctttcttatccaaggtgtagtcattaatatccaagccttattatggatgggacccggtaaaacacaggagatattaaccaccacagctcaagcatggtgtttacttttcggtttattgatgattttctcaattatggatctctgtttgcagatcatgagaaattccccttcttttggccgattaccccttagaggtattttccaaagtttaaaattagtcgccagcgtgctgattggtatcatgattgtttcattactgatcggtaaatcaccgcttattttattaagttatttaaagatccaattatgggacttgttgccggtattcaactctccgccaataatatga

SEQ ID NO: 315518 - DNA, 156 bp, Proteus mirabilis
atgaaattgaatatcacagtagatttagattggttagaagaagatggaaacattgatgaagaagttaaacatcaaattatacagggtgtaaaaagtgccatttccaagcagtgtttggataaagtagaaaagaaagcatcagaacaaataaattaa

SEQ ID NO: 315519 - DNA, 1203 bp, Proteus mirabilis
atgatagtgactacgaattatgattgctttatagaaaatattctacatgaacaaggagtaaagcctaggaaatacattggtaatgaaggtttttttgatgacactgttgggtggagtgagctatataaaatacatggtgacgttgctcacccgcattcaatcataataaataaagatgattatgatgagtatgacaaaaaatctatactgattagtgcaaaaattttatcaaacatgatcaaaagccctattatatttatgggttactcactatcagatagaaatgtaaaaaaactattatctgatttttcttctcagctaccaaaagaagatggcagggtttcatctgaaagaataatactagttgagtacaagaaagatgaaaaaacagttctaaaacaacagacgtcagatcagctacttcatataacttacacttcaatatctacagataactacaagcaagtttatgatgatatttgcttagttgatgaggggttgtccccttatgatgttttgcgctaccaaagggcgataaaaaacctaattatcaatgaaggtgaaaaaggaaacctagataacctacttgtaactccgtcagacctagataaattagaagagagcgttagaaagcataaaaaccttgttgttgctctaggtgataaaaaatttgtattcacacacataaatgaatatgactacataactgattatattaaagaaaataatgaaatatcaataaaaccagcaattgacttcattgttgagaaaccattcaccacaagaattccattttctaaatttattaacaattgtgattttaataagctagaattcagtaagtcatgcatagataaactaaatgaaagaattaacgcccatggatctttagatggtgtaatcaattccattaaactagacaaggtttattctaaaatgacattttcatctataagtgagatacaaaaaaagcaacttgttaaatataaagaaataacagttataacaaaaaatataaaaaacatcgctgagcttgagttaagaaaattcattaagtcagaagctttacatctatttaaaacaacaaacaatggcatggaaaagacagagctaagaaggttatttttagcttatgacttgctaatcaacggcgaagtattaaatgccataccatatatagagaaaaaggccgctattttataa

SEQ ID NO: 315520 - DNA, 540 bp, Proteus mirabilis
atgcgacaagcattaacacaagcgctaattagctttgaaggtgcgattgttgtggtatcccatgacaggcatttattacgctcaaccacagacgatttatatctcgtccatgacggtcaagtagagccatttgaaggcgatcttgatgattatcagcagtggttagttgatcaaaatcgccaagagactcaagctaataaaacgcaacccgatcaagaaacaacaaacgtctctaacttaacggctcaagataaaaaagagcaaaagcgtaaagaggcggagtttagacaacaaactcaacctttgcgcaaaaagctaaccacattagaaagtaaaatggataagcttagccaagagctgaccgccatcgaaactgagctttctgatagtcaaatttatgaagcgaagaacaaggcgacgcttaccgattgcttaagccgtcaaagtattgccaaatcggctttagaagaagttgagatggcgtggatggaattacaagaaaaactagaagagatgaccaacgcttttgagtctcaataa

SEQ ID NO: 315521 - DNA, 729 bp, Proteus mirabilis
atgccccatcgccatcccgaacgaaaaacgctcactgttcacatacggaatggaagatattgtggtcaccccggcaatccccgcattggcccgtttctccacctgactgattttattgtccagctgactgaaacgctggtcggtatactgccgggcattgtccagcaccgtgtgggtcacctgcccgaacgtctcatcggtatagcggtttgcggccgccagggtctgttcctccccctcaatacgggcctgctgctcttccgtaatccgcttgtttgtcttcgcctcactgtactgaatgctcacatcggtgtagtccatggcctgtttcagcgtctgcttatcgccggcaatacgcgcatcccggtcagccaggctgccgtcccccagtgccacactgtttttcgccagcgcccgggcatccacacccagtgccacggatttttcgcccagcgccagactcttatccccgaccgcaacagcctgtttaccctgactcagcgtactctgcgcctcattcagggctttatccgccgcctgatattccgcctgtttctgcgccagttcggctttcaccttctccagatcccggatgttttccagctcggattgcgtcggacgcaaatcagacaactttgtatccagcgcggagagatccttttccagccgggagagttgcgtttctgcctgcttcagtgcctgatcggtgacggctttttccgccgataa

SEQ ID NO: 315522 - DNA, 657 bp, Proteus mirabilis
atggagcaaatcaaaaccacggttgaaaaaaatgccgataactcacgccaagctagccagttggcattaagagcgacaacgtcagcacaaaacggcgaaaaggtgatggataatgttatcgaaaccatgtcatcgatttctgaaagtgcaaaaaagatctcagatattaatgacatcattaacagtattgccaatcaaaccaatattctctcattgaatgcagcggttgaagcggctagagcgggtgaacaaggtcgcggatttaccgttgttgcagccgaagtgcgtaacttagctagtcgtagtgcagaggcagccaaagagatcaatgaacttattacccattcggtaaataaagtacaggttggatcacaacaagtgagcgaagcaggacgctccatgtcggaaattgtgaccaccattagtcaagttaatgattttatgcaacagattgccttagcctctaatgaacaaagtatggggattaatcaaattgctatggccgtaagtgagatggataccgtgactcaacaaaatgcggcacttgtggaagagtctgccactattactgccaatatggatgatgaagctcatcagcttgccaacttagtctgtcaatttaaagtagatgagaaagaaaatactaggcatgcataa

SEQ ID NO: 315523 - DNA, 309 bp, Proteus mirabilis
gtggaattaaaaaatcagaggtggtataaaagtatcacctttctttttcctgtattcatatcttatcaaaaaatagcctctaaaaatccaaaggggggtatttatgggggtatgaaaatttgtctttttatttatttttatttaaatcaacgtgttaatctctttgttttattctctcctcctccgccatctcaacatctcctagcgtctcctgaagtctccttaacttcctttgatccactaaaaaatttcctagttaatagttttattcatgattattcaaatttctgtttgtataaagagtattga

SEQ ID NO: 315524 - DNA, 297 bp, Proteus mirabilis
  misc_feature (12)..(21): n is a, c, g, or t
ttgattataatnnnnnnnnnntttataagccgagcaacacctaaaacagctgaagtaggggtatctgtcttagttaaaaataatattcatgggtggacatcagagcaacaagaggatgtatcagccgcatctcttaaattagtctcaggtgaaatctttaccacaaaatttataccaggaatatcatctcatacattcattctttctcgtgataagctagctaaaaaagcgatagatattagtaatggactcgattttattggtgaggccgtattaacattctctttcggtgtttaa

SEQ ID NO: 315525 - DNA, 729 bp, Proteus mirabilis; identical to SEQ ID NO: 315521

SEQ ID NO: 315526 - DNA, 837 bp, Proteus mirabilis
gtgatccctgcgccagatgcaccgattttatataccatcgataatcaacggatcaaaagtggtgatcgagtcgctattgttggtgctaatgggacaggtaagtcatcattattaaaaatgatttggtcatcatttcatggttcaaccacatcaacagaaaatgtgatcaggctgcatcccagagttgagttaggttattacgatcaaagtctcgcacaacttaatgataatgatacccttgccgatgcactaaagccctttgcaccgctattagatgagcaaaggaaaatggcattaataaatgcaggttttgtttattctcgccataatcagcaagtaaagtcattaagtggtggtgaacgagctcgtttactttttattggtctcagtttggcaaaatattcattattaatgctagatgaaccaacaaaccatcttgatatggaaggtaaacaggcattagctgagcaaattcaacaattttcagggggaattttactcgtcagccatgatagagaattgatagagaaaagctgtaatcgtttttggtatattcacaatggtattcttagcgaacatcatgatattgaaacaatttatcagcttatttctcaacaagatatgtcatcggtctctaatgagcaaaatggccatcatgctccatctgttgaaatagtaaaacatcataatgaagatgaattgctaatgaaattgatagcacttgaagataaattgaatgctgatttagcaagaaaatctgctcatcaaaagcctatgttacaggctcaatggcaagcagaaatagagatcttaaagcagcaacttgatttagcttaa

SEQ ID NO: 315527 - DNA, 198 bp, Proteus mirabilis
atgttaccgccgatatggccttcagatggggttgactccccggcattctggttggccgtgctgatgtggtgtgtgttctttgttgtgatgagactcctggggaaaaaaaaccgtcctgcccgccgtcatcgtcactgtcacgggaaagaatcgcgtgtaccggaaaaagaaaatccgtcagatcctccctggggttga

SEQ ID NO: 315528 - DNA, 351 bp, Proteus mirabilis
atgctcaaaaatattttagatgaaacaaaatcattttctataattgccactcactcatcaatattgacgcgagaagttgaacggaatgcagtgaccatattgagaaaaattgaaggaaacactaaagtatttcgatcttcagttgaaacatatggtgagtcaattgatgtaataatctcagaagtattcgatgatgaatatgtaagtaagccttatcaaaaagagattgataaatatttcattcgcgatagctcatctatttcagagattaaaagttatatcgggaatgatgcattagcttatgcactatcaaaatcagatgatgaaaaaatatctattgaggatgaataa

SEQ ID NO: 315529 - DNA, 210 bp, Proteus mirabilis
atgcgtgtgttaaatacattctttactgaaaaacaaaatgacggcttagttggtcgctcgagtatgcgattaggcaaattgataaaagatgattatgcgcaagatcatattgatatggttaaccaagttgcagggttagtgggttataatgaagatatcgttgctatttatactcagcacgctaaatacttagcgagtaagcaactttaa

SEQ ID NO: 315530 - DNA, 222 bp, Proteus mirabilis
atgtcgtatagccgaactgattattattatgttgttggtcacaaagaaagtaaaattaaatttggcctaagtaaaaaaggaaaaataaaagattctatgagtataaaaatagcgatcagacaatcttatttaagtatggatgctaagaaatccgatgaaacggctagaaaaagagagaatgctttaaaacaaataaatataattagaaaggaaaggatataa

SEQ ID NO: 315531 - DNA, 288 bp, Proteus mirabilis
atggaacttcaaatcactggtcataatattgaattaactgatgctctgcgtgataccgtcaaagcaaaaagcgctaaattacctcagttctttgacaaaattaataacgtccaagttatcctcaaagtcgaaaaagtgactaaaattgcggaagcgacgattcaagtaaatggcggtgaattacatgcctctgcggaagcagaaaatatgtacgcagcaattgatggattaatggataaactggctcgtcaattaaccaaacacaaagataaactgagacaacattaa

SEQ ID NO: 315532 - DNA, 198 bp, Proteus mirabilis
atggaaccgacactatgggtactaggtactctgattataagtatcttgctcattgtttttactataataaaacttaagtttcatccatttttagcactactacttgccagtttttttgtcggtatggcaatgaaaatgaacccattagaaatggtcagtgcaattgaaaatgggattgggggaacgctgggattttag

SEQ ID NO: 315533 - DNA, 831 bp, Proteus mirabilis
  misc_feature (780)..(789): n is a, c, g, or t
atgatggaaatatcgggggcggcggagcgcatcggtatcaccttacaaaaatgccgctggttatcaccggatgttattatggtattggtgggactgatttgtggtattaccctgtttgttgaagtaggggtagtgctacttattccattagcattctctattgctaaaaaaacaaacacctcattattaaaactcgccatccctttatgtactgcattaatggccgtgcattgtattgttcctccacacccagcagcgctttttgtcactaatgagttaggggcagatatgggaacggtgatcgttgccggtcttgctgttggattattagcctcattagtgggcgggcctcttttcttaaaagtattgggtgagcgcttaccttttaaaaccgtaccagaagcattttctgatatggaaattcgtcaagaaaaagatttaccttcacttggggcgacattatttacggttttattacctattgttctgatgctgattaagagcgccgcagagcttaatatggaaaaaggcacttcggtttatattgcattacaatttattggtaacccgattacggcaatgtttattgctgcttttgttgcttactatattttaggtattcgccgtaatatgggcatgagtaccctattgaaaaaaacagaagatagttttagctctattgccaatattttgttaattattggtgctgggggcgcatttaacggcattttaaaagggagtggtttaagcgattcattggcggtgatcctctctaatttnnnnnnnnnngatcaaataaatcaatcaattattatctatttgaaacagtaa

SEQ ID NO: 315534 - DNA, 351 bp, Proteus mirabilis
atgaaaatggaagaaagtataaaaattaaaattaatgataattatctaaaatatagaaagatttatattggtgagtatcttatctacaagagtaataaagcttttcctcttggtttttttaccaagaatcaatttgaaaaaaatgattcagaaattatttttttaatgaaagaatttttagagaagagtggggttaatagtgaaggcttttttgatgaggttaatcttcttttacttagaaatttagttaacggggaaagtttttttaaagataaacgcttttcatttttgtccttctattattgccaccgaaaatttctcacctatagatctatactcattaaatggtga

SEQ ID NO: 315535 - DNA, 807 bp, Proteus mirabilis
  misc_feature (250)..(259): n is a, c, g, or t
atgtttgggttaagtgcctttgatttggcgcgtatccaatttgcgtttaccgtttctttccatattatcttccccgcaattactatagggctagccagcttcttagctgtcttggaaggcttatggctaaaaactcgcaataaggattatttagcgctattccatttttggtcaaaaatattcgctgttaactttgctatgggcgtcgtctctggtctcgttatggcatatcagttcggtactaattggnnnnnnnnnngccctttattgacttatgaagtacttacagcattcttcttagaagctggatttctaggtgtgatgttatttggctggaacaaagtaggtgaaaaattacactttttcgccacttgcatggtggcattgggtacattaatgtcaacattttggattttagcctccaacagttggatgcaaacaccacagggattcgaaatcgtcaacaatcaagtagttcccgttgattggctagcggttatttttaatccttccttcccttatcgtcttgctcatatgggcgttgctgcatttcttgcttcggcattctttattgccgcctcggcttcatggcatttattaaaaggcaacaagacctctgcaatgaagaagatgctctcgatgtctatatggattatcttaatcttagcgcctattcaagcacttattggtgatatgcatggtttaaatacgttaaaacatcaacccgccaaaattgccgcgattgaagggcattggcaaaataataaaccaaatatgcccttcaaattccttatttgggtagcctga

SEQ ID NO: 315536 - DNA, 528 bp, Proteus mirabilis
atgaccaataactgctactatcttgatgcgatcctcattcagtattatcaaggaagagataatagcgttaattatcgtattgcacgtcgtaatgcacatagcagtgatggtgagttagcatctttaatttctaacatgtcatcagagcctaaaagctttcaaacctctcaagaagaagcatttaaattactttgtttaaatcatactttactgagctatatttcagcgttaggtgttcatcgttgcaaaattgaagatgaagcggtactcaccctgcttaatgatactgtctgttatattgattcagcgttgagacgtaaaaaaccacaagataatgattttatacaatctcacgatcaacttatcgcacgtgttaatgcacaaccaagttcggataacgcccgtattcaattagtgttaacgcaaatacgcttgttactggatttactgccacaaattgtcaattgcattgagctaattgaacaaacagaatggcaaaacgataaagataaattagctacagcttga

SEQ ID NO: 315537 - DNA, 1239 bp, Proteus mirabilis
  misc_feature (1190)..(1199): n is a, c, g, or t
atgttaggtatgccgattttcccagaatggcatgaacaacctatttggctccttttaggcgcgatttggtataatttgcttaccttaattggtcacctccttttccctattcgtcccgttcaagatagccttacgcgttattatcagcagctttccgcttatctagaagccaaggccgcattatttgatcccgatattgaaggtgatcaacagcaattactgtataacttggcattggctaataatcagttaattgaggccatgagccaaactaaactaacattactaagccgtttaaaaggtgataggggccagcgtagcagtcgtttcacattgcattattactttgtggctcaagatattcatgaacgggccagctcttctcatattcaatatcaattactgagtgatagattacgccacagtgatgtccttttccgctttcagcgcttactgtcaatgcaagcaagagcctgcgaacaagtcgctcaatctatcctttggcataaaaagtaccaacataatccccattttgaacgtgcaatcactcatttagaaaatgcacttaataatgtaaaaaacagtacttctgatccacaaattattgcgccactctataatttattacaaaacttacaaggcatagatgctttattaaaaagtattagtacagagcaatatcaaatctctcatgaccaaaaagaagaaactcagttatctgatgaagggcttactgggtggcgagatatcgtgctaagaataaaaggtcacttaacaccaaaatcagccctatttagacatgcggtacgaatgtcacttgtcttatgtataggttatgtgatcatccagttttttgatttgcatcgaggatactggattttattaaccagtttgtttgtttgtcagcctaactataatgcgacacgtagacgattaacattacgggtcagtggcactattattggtattttaattggtttccctattctctattttgtgccttccatcgaaggtcaattagtgcttattgttgtgacaggtacgctcttttttgctttccgaaccgtacaatacgctcatgccactttgtttattaccctactcgttttattaagttttaatttattaggtgaaggctatgatgtcgcactaccgcggatcattgatacgttaattggttgtgctattgnnnnnnnnnnaagttccgtcagttgccattgctcatccaaaaaaccatga

SEQ ID NO: 315538 - DNA, 1422 bp, Proteus mirabilis
  misc_feature (1399)..(1408): n is a, c, g, or t
atgttgagaatgatcatagatgatgatggacaacaacgtatcttaaaagaagttccttattttcattttattcaacatgacctaacaaatttaacccaacaagagcaacaagagagcctaacacagataagggaagccctttcttatcgggtattaccgactgagtcatggccattatttgaagttgaaatttcttggctaaataacgattgttacagattacatatcaatctagatttactgcagtttgataccatgagctttaaaattctgtttgatgatctatttaacgcctattcaggacaagaattaataccacaaacatttaccttccgcgactactgcttaaaaaatcaaacaaatcgtaacagtgatgagtggaaaatggcatggtgttactggcaggatctattatctgatttaccttctgccccatatttaccgataaagaattcatccattactgaacaacctcgttttacgactttccaacatcatgtttctatagcgcaatgggacaaattaaaacagaggtggaaaaagcatggtattacaccatcagcagggcttttaacactttttgctttagttttaggtcgctggacaaaatacccagcctttacactaaacttaactttctttaatcgtcaaccatggcacccagatgttacacaacttattggtgattttacctctgtactccctatagatatttatctagataacgactgtacattaaatgagtcaatggcaaaaatacagcgcagactttggcaacatttaagtaagtcccaagtaaatggtgtagagattttacgtgaatggggacgctataaaggggatagtagccaatctctgttacctattgtatttactagcatgttaggtatgacactagatggtgacaatattgatgaagcattaaatcagcttttcggccaacccgtatatagcttcgcgcaaacacctcaagtttggttagatcaccaagtaatggaaggaaaagaggggctaacattaaattggttctgcatggatgacatctttgctgacggtttattaacaatgatgttctctgattatcaaagcttgatcactcaattatgccaagatgaagataataatcaatcagttgataagattattgcgcaacttccttcatatcaacatttagcaatagataatcacctccaatcacgctatcaacaactcgagcaaacattggaaaatcatccgcaaatcaaacgtgctcatgctatggtaatggtaaaagacgatacgaaagtagagcctcctctacaattactgtttgaagcctcttctgatattccactatccgttattaaacagcccaattggttacctaatttactttcgccatcagcttcactcagtgacnnnnnnnnnntggcaacgatttga

SEQ ID NO: 315539 - DNA, 510 bp, Proteus mirabilis
atgctcgcttatgctggtcttttggcgagtccaagtcgctcttctgatgtgattagtagtcttatatctcactgtttcgacttagaaaatgtaaaagtaattggttgggagacacgccgtgttcctattcctgaatcacaacaaaacaagttaggtacgatttctcatcaatccggacaaaaatctcgcccacgaatgttattaggggagaattttagtctgggctcacacatatatgattgcaatggaaaatgcaccatcgaaatcagtgaattaagtttagaacgctatatgcgttttttacctaacggcagtgatttcgcaccattagttgcctttgtttcttacatttttcatgagcaattagcttgggatttacgtcttagcattgctgaaaagcaagccgaagggttccgtttgggtcaccaacaacacaaccaattaggctggcaaagctttttaggtcaacccgcaaagaaaccggatgtcaccattacggtattggaataa

SEQ ID NO: 315540 - DNA, 369 bp, Proteus mirabilis
  misc_feature (349)..(358): n is a, c, g, or t
atggaggatgacagcggtattcttcgctttaaatcttattcaaatattgcatttccgacgcgagatgtcatttccattgaaaaaaataatgtcgaacaatatgaattagaagtcgcttttttgggcttacaaggaagtcagtcccccctaccaggctattatctggatgagtttgcttgggaagatgcacaacagatagaaggtatctccgcttttctcgatatcttcaatcatcgtctgatagcgttactttatcggatctggcgcaaatatcgttactacatttgctttgaaaatgaaggtcaggattcattttcacaatatatgttttctctcgttggattaggtnnnnnnnnnncgttggattag

SEQ ID NO: 315541 - DNA, 966 bp, Proteus mirabilis
atgaagttaatgcagtatgttagtactgttggtgcaatggctcacgcgccattcctatcatctgtttcacctaatttctttggtattaatagctacgctgaactgccggcaattaaagatctaaaatctgtttttgaaggccctgcacatactaaatggcgctcactgcgtgaagcagaagattcccgttatttagggttaacagcaccgcgtttcttattacgtttgccatactctccaacagaaaaccctgtaaaaatgtttaactattcagaaaatgttaaacaagaccatgagcactatttatggggtaataccgcattcttattagcaagctgtattaatgatagttttgcaaaatatcgttggtgtccaaacattattggcccacaaagcggcggtacagttaatgatcttcctgtgcatatttttgaagcgatgggtgaattacaaactaagatcccaactgaagttttagttaccgatcgtagagaatttgaactagcagaagaaggctttatcacgctgaccatgcgtaaaggcagtgataatgctgcattcttctccgcaaactcggttcaaaaaccaaaagtcttcccaaatactcctgaaggcaaattggcagagactaactataagttaggaactcaattgccatacatgtttattatcaatcgcttagctcattatataaaagtattgcaacgtgaacagattggctcatggaaagagcgtcaagatctggagcgtgaactcaatatttggcttaagcaatatgtcgcagatcaagaaaacccaccagcagatgttcgtagtaaacgtccattgcgttcagctgaaatcaaagtacttgatgttgatggcgatccaggttggtaccaagtcgctattcaagttcgcccacattttaaatatatgggtgcaaactttgaattatcacttgttggtcgtcttgataaagagtaa

SEQ ID NO: 315542 - DNA, 366 bp, Proteus mirabilis
  misc_feature (351)..(360): n is a, c, g, or t
atgtattattccttagtaaggaaggcattgtttcggctagatcctgaacgtgcccatgattttacctttcgtcagttaaaacgcttatctcattccccatttcaatttcttattcaacaatcacttcctgccaaacccgtttcttgtatgggactttcatttaaaaatcctctcggtcttgccgccggccttgataaaaatggtgattgcattgatgcattaggggcaatggggtttggctttattgaagtgggtactgttacaccacgagcacaagtaggtaatgacaaaccgcgtctctttcgcttagtagaagctgaaggcttaattaatcgaatggggtttaataannnnnnnnnnggttga

SEQ ID NO: 315543 - DNA, 318 bp, Proteus mirabilis
atgattggtgcacctattatgacattaagtcttggcaaattaaccaaacgtcatgcattgggattattgttattattatttattgcaggaaatctattagccgcacaagcagatagttattggagcttaatgatagctcggttgatcactagcctaaatcatggtgctttttttggtatcggctctgtcgttgctgccagtttagttgaaaaacataaacaacggattatgggcgcagttggtgtccggcttatgcaacaaccgtatttggtgcctctgcactttttgccttgtatacctacattgctccttttttaa

SEQ ID NO: 315544 - DNA, 717 bp, Proteus mirabilis
  misc_feature (170)..(179): n is a, c, g, or t
atgaaaatcttatttattggtgagtcatggcacattcatatgatccactcaaaaggctacgacagtttcacttctagtaaatatgaggaaggtgccacttttttattaaattgtttaagggaaaaaggggtagcagttgattatatgcctgcacataccgttcaggtcgnnnnnnnnnnatatgatgtcatcgtgatcagtgatattggtgctaatactttcctcttgcaaaacgatactttctacaacatgaaagtacttccaaatgcattagggctaattaaacagtttgttgctaatggtggtggcttattaatgattggcggctatctatcatttatgggtattgaagcgaaagcaaactataaaaataccttattggcacaagtgttacctgttgaaatgttagagggtgacgatcgtgtggaagccccagaaggagtattcgcaactccagttaatgcagagcatgccacgataaaaggttttagtgaatggccgatgttccttggttataacaaagtgttcgctaaacataacactgaaacggttttgaatattggcgaagatccactactggtgtttggtcaatttgaaaaaggaaaaacagcttgttttatgagtgactgttcaccgcattgggggagcaaagagtttttagcatggccacattatgctgatatgtgggtcaatattctaaagcaaatcgcacgttag

SEQ ID NO: 315545 - DNA, 642 bp, Proteus mirabilis
atggtccaagaatttattgatttacctaaaatcacacctaatgaaaacgaacatatgaccgatgtcgatcatgtggcagttaaccctctgatgaagggattaggtatccaccttaatttaacaaatacacagcatgctaatgattttcttgttgaactgggtaaaaccgtcaaagcggctattgaaggtttactgattttgcaacaacaacaagaaagcttacaagataagcaattacgcccaattgaagataatcctttacgtcttaatagtggctatgaagagacaatgaagttgatgtttaccgatgaacgtagccctgtacatctttcagcaccagcggcagtaacagaaagcttgcacaacatccaattgcattatcaagcgaatcaagaagctatttcaaccgcactatcaaccatgttggcagcattctctcctgaacatttattaaaccgcttttctcagtatcgacgagcttcagataacacaccaatgaatgatggctgggcttgggaaatgtacaacaactattacaaagaactctcttcatctcggcaacagggttttgaaaaattattctatgaagtatacagccatgcttatgacagagcgctgagaaaaggaatagaggaagcttaa

SEQ ID NO: 315546 - DNA, 198 bp, Proteus mirabilis
atgaacctcgcaaacctaactcaagaagaaaaagacaagattaatgtcgatttgaccgtgccagttgtcgcctcagaagttgaacgacaacaaccagcacatttgagagcatactttaatgaacgattagcgttttatcgtgagataagtaagcagttgccggatgggaattcggtgcagtatttgaaaatagagtag

SEQ ID NO: 315547 - DNA, 471 bp, Proteus mirabilis
ttgttaggtcatcaaggacctttaacaggggttttccctcaattatctcgtgcccttttttctcccttggggattattattgctcaaacatatgttgcaagtgcaatcattatgcgtaatagccttgcggcgtttaaagctattgatcctgcttatattcaaaccgcacagaatttaggattaacaccaacaaaaacgcttattttggttgagatcccactttgttggtctgtattaatcagtggttgtattgtggctttttctcgagcattaggggagtttggggcaacattaatgttggcaggggccacacgattaaaaacagaaaccttaccaatggcaatctatttaaatatagcgagtggtgatttctcgcttgcgataggttgcgctttagtactgatagcaattgcaattactctattgtttgctttacaccgtttacagcgtgataggaaattagcatgttaa

SEQ ID NO: 315548 - DNA, 300 bp, Proteus mirabilis
atggtcgcagttgaaggcggattaaaaagtcctgctggtgccgtttataacgaactaccagaccgaatagctgatacattgattattattggtgtaggttatggtttatccatcacttttcctatcgctattaccttaggctgggtagccgctttctttgcggtaatgacagcttatatccgtgtattaggtggtagttgtgggttagaacagcgttttacgggacaaatgccaaagaccggctttaaaatcctgaatagactcaccgttacctctagtcccttcaggaaaaataattag

SEQ ID NO: 315549 - DNA, 264 bp, Proteus mirabilis
ttgtcatcttgccccaatggcgctaagcgcgatatttatacggttattgctcaaccgggtaaagatagagtgtcagatcctcatagtaaaaatgtcacagaacatattcttataattagtggtcgtgccattgtcggtactttagataatcaacaagagttatctcccggtgactatatttgttaccctggtgacgttactcatgtgctacgtgcattagagccagatactaccgctgtcatgatcattgaacatcacaattag

SEQ ID NO: 315550 - DNA, 1122 bp, Proteus mirabilis
atgagtattcgtcgattttcatcgcgcacccataggctcgatagtagctttttgctggagcacctcaaaggtgctcgcagctataagcgtattgccggttactttactagctcgctgtttgaagtggccaacgagctgattgagtccatccccgatgtgaaaatcgtctgcaatgtggatatccatcccgatgacctgaaggtggctcagctacgcgaatctaagatgattgggcgctggaatgagcgggatattgaagccgaaagcttgctcaaccgtgaccgctatcgccgcctggacagcttccttgccaagcatggccaggtcatccgcgttgcgcccgacagcatttgtggatttttgcatggcaaagcgggtgttattgagctggccgatggcaaaaaaattggcttcattggctcgatgaacgagaccagcagcggctggcaacgtcactatgaaatcctgtgggaagacgaatcaccggaaggtgtgcagtggattgagcaggagtttgagtatctgtggaacgcggctcgcccattacctgaagcagtgatccgagaggtgaaacgccgtggctatcgcagagaggtgctgtttgaagatattgtcgaagacgatgatattgcccccgctgcgctgattgagtccccgctgtatcgccaaggcttctcattgcagccctggcaacaaggctttgtcagcgagtgtgttcgccattatcacaaccacggtattgtgcgtttactgattgctgatgaggttggcctgggtaaaaccttatccatggccacggcggcgctttcgctttgtttgctgagcgacagagagaacaagaagcgtaagcccgtcatcattttcgccccagctaccctctgcgagcagtggcaagtagaaatgattgataagctgggcattccctgtgcccgctggcaaacgcaaaagaaagcatggctggatcctgaaggacgaattatttctccttcagggctcagggcaagagcatattgccaagtgtccgctgcgcgttggcatcgtatccaccgggctaatgatgcgcgattctttagaaaagcagcatctgctggggttgcgctttggcgtgtctatattggatga

SEQ ID NO: 315551 - DNA, 252 bp, Proteus mirabilis; identical to SEQ ID NO: 299988

SEQ ID NO: 315552 - DNA, 870 bp, Proteus mirabilis
atgcgtgattatggcaaggtctatacccgcttttggctaaagcaaaatgttttgtcctggagtgactcagcgaagttgctaggactgtatttgcttacatgcccacattgtaatttgcttggctgctttcgactgccgattggttacgttgcttctgacttgaactgggatgagcaacaggttgccaagacgttaagtgagttagaacaagatcagttcctgattcgttgcgagggatctggttggactttgattcgaagctttctgaagcacaacccaatcgaaaacccaaaccaaggtaaggcagcctttcggttgcttaaagatgtacctgccgacttcattggtatggcatcgcttttgaaatctcttgccgcttttcaagctcggctaccagaagaattttcatcattgtttatgcctgatggcaacccggtaagggactctcaacggtcggatgactctgagagaagcaataaaccaacagttaaaactgttgaccacatacagtttgaagacttctgggatgtacaaatacgcaaagaaaaaaaagcgaaagccaaagaagaatggctacgcatgggcctcaatgaagaccatgaactcgccttggaagtgctaacacgctggaaagagcaacgagacaaccgattacagtatcaagatcggactaagacccctatgccacataactggcttttaaaccggcaatgggaagacgagtacgttcgcattgatgaagtacagcaatcatcgacgagcctaaagggcagcaatcaccaattgaatattgaagaaagcaatcgccgcattgctgaaagctgggccggaccaggtattcgggaggttcgttcaagtgcaggaggttga

SEQ ID NO: 315553 - DNA, 663 bp, Proteus mirabilis
gtgcaggaggttgataaacgcgagtttgctgaagtttggggagcagcttgggccatgtatggcaaaagcgtatcaccacaattgctatccatcgcatttgaagcccttcgtgcttatagcattgaagaagtgcgaatcggtctgactcggcatattcaatcaccggatactgggcaattttttccaaagcccgctgacgtcatcaagcatatcgacggcaactcaggttcaagagccatggttgcttggaacaaagttgacaaggctgttcgtcaggttggcgcttggacatccgtgatgtttgacgatgcgcttatccaccgcgtgatttcagacatgggtggatgggttgaactctgcaaggttgatgacagggaatacccctttaagcaaaaagagtttttaacacgctaccaggcttacttgctacgggacgaagtgggtgaatacccaaggctattacagggtattgcagaccatcagaaccagcaaaaaggatttgatatgcaagcgcctgttgccgtaggcgactggtcaaaagcggcacaagtttatacgagaggcatcgccgactttagcgcagtgccattaaaaagaataagcccgaaagccattcaggcgcttctcggaaatcaattagaggacaaaaatgaaaacgattaa

SEQ ID NO: 315554 - DNA, 549 bp, Proteus mirabilis
atgaaaacgattaaagcaaaaaccattgccctagtgatagccatgtccgcaagcacttcagtctatgcgtttccgggctatcagtgggaaaaagcagcacaaagcgttggtattgatccagtcatgctctacgccgttgccttggctgagtcggcctcacatcgtggtctcaacatgaccagtccatggccatacgcaattcgcaatggttcaaacgcaacctacgccaaatctaagacagaagcagagcaactgttaaaccaggcactgcaagagactgaaaaatatcagctcgatattggccttatgcaaatcaatttgcattggcatgggcatcgggtgagctcagcagcggaactgctagaccccatcaccaaccttacggtcggctcaagtattttggccgaagcaatcaagtcttcaccaaatgatttagagcttggcataggccgctatcacagttggaacgaagatcgtgcacgctggtatgggcaaagagtgctttctatctatcgcaatattttacatgaactggaggtccgtcaatga

SEQ ID NO: 315555 - DNA, 300 bp, Proteus mirabilis
atgacaaccaatcaacaagacttctatcaattaaatttggcgtacctacacgcagcacgtgaattggcgcgcattgatccgcaagaggcggtcttgcgctttggacttacacgcgacgtggtggatgcactgattaatgccggtgttgacgacctgcaacgagtggcgacctcatcattcatgctgtttcaaccaaggggtaaccaaagccaactgattgagatggtgaagagcaaaggtacaggtatcccaagaatcgcttatttattatcaaccctaaacaacaagggggatgcatga

SEQ ID NO: 315556 - DNA, 534 bp, Proteus mirabilis
atgattgataacctgtccaaaagtgagctgtttacccgagcctcgctgcttattaagtacggatttcgaacgaccattatcgcgctcgatacaggtttgccaatccacattatcagaaggctgcacaaagaagtgactggcaagtcaccttgtcctggtcaattgccagaatctgatgccatcgttaaaagcagaagagccctagttgaaggctccctgctgatggcgctttatgtcaatattggtggtgataatgtctacaagaaattaaatatcgatgctttgatgaaggcttacgatgcgtacttggttgcaagagaagaggcagatcttccagctgagatcccctggaaaaaactgaccatcaatgaaggttgggttctagctcgtgatttaagatcacagcttgcatccttacaccggtgtcgatgcggcagtctgtatttgacggtatctcaacagcgcattcagcttaaatgtcctgtgtgtgagattatggccgagcaaaccactagagcactttttgagaactaa

SEQ ID NO: 315557 - DNA, 432 bp, Proteus mirabilis
atgataaaattacttaaatctttaccagcacgctgctggtttatatcactggggctttttctggcgactttggctgcggctcatttttttccctcagaaatattaacggcatctgccaagttagcggctttgccatttctgatttgcaccgtcgtttttttcagctacttgggattcaaagcgacctgtaatcccatcggacttatagccatcatcactatgcttgtagcaatcgcatattggcaagcgagttggacaattttatgtgtcggtttagccttcttaggcttaagcggactaatccatttatttcaaagacaactgaaagataccggtcgagaactaagcctgagcgaaaaaaaatattggtactgggtaaacgaatttgcagatggtcgctcatctatcctccctaaaaaaacaaggtcatag

SEQ ID NO: 315558 - DNA, 1674 bp, Proteus mirabilis; identical to SEQ ID NO: 307068

SEQ ID NO: 315559 - DNA, 414 bp, Proteus mirabilis; identical to SEQ ID NO: 307069

SEQ ID NO: 315560 - DNA, 276 bp, Proteus mirabilis; identical to SEQ ID NO: 307070

SEQ ID NO: 315561 - DNA, 348 bp, Proteus mirabilis; identical to SEQ ID NO: 307071

SEQ ID NO: 315562 - DNA, 390 bp, Proteus mirabilis; identical to SEQ ID NO: 307072

SEQ ID NO: 315563 - DNA, 3570 bp, Proteus mirabilis
atgtgggaaatctattccatcggggattcggcttttttagagcaggtcctgaacgctgtcgcgatgatcactggtacaggcgattttacttcaatggttcgcattggcttgctcattggggtattgatggtctctgttcaggccttaatgcaaggtggtcgtgggattaactttcaacatgttttagtctcatggctagtctttgcaaccatgtttgggcccagtacccgagtgagcattgaggatgcgtacacgggacaagttcgagtggttgataatgtgcccatcggtgttgctgccgcaggcagtacgatttcgactgttggctttcaaatcacgcgattgtttgaaacggcgttctcaactcccgccatgacggaatacggctttgcatccagtttacagtcactgattaaagtgagaaaacaggtgatggatcgctctgggttgggtgatgcaaatcgtgtcggtggctcagatatcgagcaatcgtggtttaactacatcaaagaatgcaccttgattggcatcgacatcggccaaaagaacctagatcaggtgctgagtgatcctaacccgatgactgcgattaggtttgattcgcgcatatatggcacacgcatcatgctcagtggtagcagtagcgatctggactgcaccgatgcctatagccaactgaaactcatgacagaatcaaccttcattccaaggcttaaacaggttttgtcagcctcattggggacttcgtcagcaacggatactgatgacgtgatccgaaatgcactgaataatcttggtttggcctcggttaacacccaagagtacatgacctcgtcggtgcttttgcctatttatgagcaaagcgtgacgggtaagtatatggatgatcaagctttcaccgcagccgtgatggttaaccaagcgattgagcagcgcaatacgcaatgggcggcggagcagaccctgttccaaagtatcgttcgtccgatgatgacgttttttgagggattcatttacgccatcacccctttgatggcctttgtgatagctcttggccaaatcgggatgcgaatggctgggaagtacttgttaatcctgctttggattcaactttggatgcctgtcatggccatcattaacctgtatattcatttaaccgttgcagggaaaatgtcggctcttgatgcctttgcaggtacagaagtgccatcttttgccgggatgatgcagatggattcagtgctgcaaacctggatagctactggcggcatgttggcgtcgagtgttccggctatttcgctcatgctcgtttatggctcagcaataaccgctacccacttggctgggcgtcttcaaaacggtgatgccattgatgaaaagatggcaagtccagatgtcgcgaaaaatgccccggtaatgcaatcacagtcaatgttccaaaattcagccctcactggttctgctatgaccggcgcgtcaaacctactaagcagtttctctgtcggaaatgcagtgggttcaatggtcggctctgcaaaagaatccatgactcaggcaacccaagcctttagtcgtcaggttgggaatactatgagtcgaacttttggtgaaaagctaagttacgacaacctgtcttcggttggacgtcagatcggctcatctaactccgcatctagcgccgttgttaatcaggttactgatgacctgcaaactcggtatggttttggagacgataaaaaagatgctgtacgtggcttggtatctggcgtgttatcgggaggcttaagggtcggtggcgatggaaccattacaaataccgatgataaagaagtagcagataaagggttcttgggaagattacttggtacaggggggaatgactccccacagggcaacttgccaggagtcgataagccagacgcatctcgtgtaccaaaaatatcacggttacgagcaggcttggatttaggtggtaactttagtggccaagttgagtcatcagaaggcagttctcgatctacgaccgcaaatacgctcacaggggagatgcaaagcttggcatcaagtgattcacgacgtgctgagtatcgcgatgcaatggttaaggacctttcagattcaagacgttctggcgttgagatgtccttgtctaaccaagactatcagtctcttcagagttcagcacaagacgttgtcacggcatcaaaccgctttagtgagcttgatcaggccagctacagtctatcaggacaaagaaatactgatggtgcgacgttaacccgattagcggcggataatcctgaagttatggattatttaggtcgctatatgaaccagcatgttgaagctggtaaccgattacgtgaaaaccttccaatgtatcagcgcttgctacctgatgataatcaggcgtatgtggccgcagctatggagtctttaacctatagcaactcatcaacgcccgctgaacgagacaatgattatcaagcagcaatgacggttatggccatggctaccggagccgatttacgctcgatacagccacgctctaatgaaggcttgtcatcaactgcacctacttttggtggcactcaaagccaagtggaatcgggtgtattgggcggctacgaggatgcagcaacagttcaaactcagttcaacgcagctcaatcggcttaccaaaccaatctgtctggtatagatggacagttgagtgcgcatcagcagcaagctcagcaggccgtagctactgacacaagtacctaccaatctggactaaacagtgaagctggatctcagtggcgatcacgcattatggctgatgatagcggagtttctggtgctgaaatgttcttcaacagcgccagtgctattggtgatttcagtggcaagcatactgatgcagctctgcataccttgaatcactttggcgaagactatgagagttacaaagaacaagcgcttgaagatcctggctcacgaggtttcttgcacaacgcaacggtggccagcaaatcaacctgggatggcttaaaagccgccgttgatgcaggaacctctttggaaaacccattgacggcgtttaatgatgcatacagtggatcgagttcgcagtatgcctccgaagtaaactggggcactaagtctgaagccatgttggcgggggcattcggtgcggcagttaacaatcgatatggtgagtttctagagcagtatgctgatgattttaaacaggaagcatacagcgaagggcagagaatgggattgaccccgattcaaagtcaagttttcgctcaagctttcaatgaaggtttggcggggcgcgttttcaattctgaagactcatcgagttggtcgcctgaaatgcttggtctaagggagcaaatgctaaatgagtatcgtcaaaaggatgagagtggcgcttacatctctgacagtgtgtctgatgaagataaagcatttgtggataagcagattgcagtgatctcaaatgcatcccttgcgggagattatgctcagaacaacttgatcgatattagggcatataaccaggcatcaggaaataaataa

SEQ ID NO: 315564 - DNA, 1389 bp, Proteus mirabilis; identical to SEQ ID NO: 299996

SEQ ID NO: 315565 - DNA, 945 bp, Proteus mirabilis; identical to SEQ ID NO: 299997

SEQ ID NO: 315566 - DNA, 498 bp, Proteus mirabilis
atggcttgcgatagattatttgattataaaaaaatcatagagcctaaagatcctaaatatgattatttagcatgttatatttcaacaataaataaaacagatgatttgttaaagtcattagtaaattctttgaataaaaactatcaagataacaatcgaacatactcattaatttatttttcagatcatggtcaggttcataatgaagtaaatggaaaaatattatttaataatgcgttcgctggaaaacggcactatgatgtacctattttcaaaatatcttatgatgatcacgaaagaaatgttattaaaaatttcaaatcaggcttaaattttatcgatgggattgctcattggattggtattgagaatgataaattaaatataggatatgatatttttactaataaagatgaccaaaatgattatgggttatcggatagaataaaagcaattaataaagaagatgatcctgcgatagatataaaggataaatag

SEQ ID NO: 315567 - DNA, 156 bp, Proteus mirabilis
atggctgaaaatgtcgttaatgatattctgaaatggttagaaactcagttacaacgtaatgagggtataaagattgatacgattgcaaataaaagtggctactcgaagtggcatttgcaacgtatttttaaagattttaaaggttgcacacattag

SEQ ID NO: 315568 - DNA, 378 bp, Proteus mirabilis
  misc_feature (365)..(374): n is a, c, g, or t
atgactttttctatgatagcagtatctacaaaacgattacccatcaacatggcagataatctttatcgtcgtggagtgttagctattgctatcacgactgttttattcccttatactgttcttgctgaagatatttttaatcctgaagcacttaatttaggtatcgaaaatcacgttgcagatattaacagcctgaattacctgtcctatgcaggaggacaacttcctggtgtctattctgtcgatatttatcttaacgataaacttatcgataatcgtcaaattcgttttatttttgatgacgataaaaaagtgctggcgcctgaaatcagtaaacaggatttactcaattggggagtcaaagnnnnnnnnnngtaa

SEQ ID NO: 315569 - DNA, 153 bp, Proteus mirabilis
atgaaacgtcctgattatcgggccctgcaagcccttgatgccgttattcgagagcgtggttttgaacgagccgcacaaaaactatgtattacgcaatctgccgtttcacaaagaataaaacaacttgagaatctatttggacacctttattag

SEQ ID NO: 315570 - DNA, 1263 bp, Proteus mirabilis; identical to SEQ ID NO: 308210

SEQ ID NO: 315571 - DNA, 195 bp, Proteus mirabilis
atgtatttatcaaggatctcaatagactattctgctgattatttacactcactattagcgaataagttgccggacggatatacaattcatcagttattatggcggttgtttactgaagaaaaagaacgctcatttttgtatcgattagaaataggaaaaaatggtaaacctattttttatattctaattagttaa

SEQ ID NO: 315572 - DNA, 366 bp, Proteus mirabilis
gtgttaatcacctatttagcaggcaccgcgattagcgcttactattttagcgtagccgattccacaaccacactattagtatttggtatgttgttatcattttttaatttaggtgcatggggggcattatatgcttataccccagaacaatatcctgatggtatacgagctacaggtgctggaacggcgacggcaataggccgtattggcggaatattagggccactgatggtaggctatttagtgcaatatcaatttgaaataagcactatttttcttatttttagcctttccattgtgatagcgatattagcggttatgttattaggtaaagaaaccaaaaatagaccacttaattctatttaa

SEQ ID NO: 315573 - DNA, 1458 bp, Proteus mirabilis
atgtgggagagattttctttctacggtattcgcccattattaatcctatttatggctgcaaccgtttatgaaggtggtatggatattcctcgagagcaggcatctgctattgtgggaatttttgctggtggtgtttatttaacatcattgccaggaggttggctggctgataattggttgggacaacgtcttgcggtttggtatggctctatctttattgcattagggcacctttctatcgcactttcagcgttttggtctcagaacctattttttatcggcttattgcttatcgtattaggtacaggcctatttaaaacctgtgtcactgttatggtgggaaccctgtataaaaaagatgatacacgccgcgatggtggtttctccttgttttacatggggatcaatatgggctcgtttatagcaccactgatcaccggcttcttagttcgtgattatggctggcattggggctttggtattggtggtattggtatgctagttgcactactgatcttccgcttttatgccgtaccgacaatgcgtcgctttgataaagaagttggcttagattcaagttgggatcgccctactgttgtgcgtcgtaatgtcggacaatgggtattagcacttgctgtgatattaattgccattgttggtttaattatttcaggcactattccatttgatccggttattgttgccaattttatggtttatgtgatctccggcagtgttatcgcctattttatctatttattcctatttgcaggattaagtagtagtgaccgttctcgcctgtttgtttgcttcctattattagtttcagcggcactgttctggtctgcattcgaacaaaaaccaacctcatttaacttatttgctaacgactatactgatctaaattttatgggctttgagatccctgcggtttggttccagtccgtcaatgcgctatttattattattcttgcccctgtatttagctggttatggccaatgctagcacgcaacaatatgaatttaagtagcatgagcaaatttgtgattggtattttattcgctgcaggtggctttaccgtcatgatgtacgcctctgaaagcgtgcttgcaacaggtagcggtgtttcaccattatggttaatttccagtattttattgctgaccctaggtgaattatgtttaagccctataggacttgcgacgatgaccattttagcgccagcaagaatgcgtggacaggttatgggtttatggttctgtgcgagtgcattaggtaacttagccgcaggtttaatgggtggaaatattcgtcctgataaacttgatgttatgcctgatttcttctctcacgtctctatagcattggttatttgtgctgttgttcttgcagcattaattattcctgtgcgtaaactgttacaaagtgcagatgataaagagaatgcgcaagcataa

SEQ ID NO: 315574 - DNA, 357 bp, Proteus mirabilis
  misc_feature (10)..(19): n is a, c, g, or t
atggctgtcnnnnnnnnnncattaagccagcgtgaaaagaatagcctaaaacaggcgaaagagattttaatcgctgaaatggaaactccgccaaagcttgaaatattagcgactcgtgtgggcttaaatacacgaaaacttacccaaggctttcgtcaattatttggcaattctgtttatggttggttacaagaatatcgcttacaaactgcatataatatgttgctaaatgaaggggaatctatctcaagtattgcctattatgttgggtatacacctgctcatttttctgtcgcatttcgtaaacgttttggtatattaccaggcgatgtacgcaaaggacatttcacgccttaa

SEQ ID NO: 315575 - DNA, 447 bp, Proteus mirabilis
  misc_feature (432)..(441): n is a, c, g, or t
gtggctgttcatagtggaagggtgattagtgaaagtgtcaatgggcagaaaatagagatagcgacaccgagtatttttattgcaaatagtgttgagcgctattctttattaaatcaatttaaatctggtgatcctcttagatacacgttgttgcaattatcatctgagtggcttgaacaacaacatattttattgcctccaatactgcaacaaaatcaatcactcatgttgcatcatctgactatggataacacttttttagcgttaaccatgcagttattccaaaatccagttcacgactccttaaaaccactttattactttggcaaagcatgcgaatttgcttcattaagtttgcaatatttatgtcatgcgcaagagcctgctaatcgaccattaagccagcgtgaaaacgaccatcaatggctgtcnnnnnnnnnncattaa

SEQ ID NO: 315576 - DNA, 462 bp, Proteus mirabilis
atggactggttacaaacttggggtcgtttgcgttctaacaaatttatgttagatagaaaagatgtcaaaggtatgatccgcaatctaaaagctggagagatcctctggtatgcccctgatcacgattacggcccacgaaagagtgtctttgccccactttttgctgtagacaaagcagcgacaacaacaggaacctatattctagtcaaaaccagtcatccggctttgatcccgtttacaccaaagcgcttacctgaagcaaaaggttatgaactgattatttcacctgccgtagctgattttcccatcgatagtgaagaaaacaccgctatcgcaatgaataaagtggtcgaacaagaaattttacgtgctcctgatcaatatatgtggttacaccgtcgttttaaaacccgcccacctggagaagcttctttatataatgagataaagaaagtacactag

SEQ ID NO: 315577 - DNA, 1227 bp, Proteus mirabilis
atgaatatcaccacacccaatagcgttaatgaagtaagccgtaaaacagcgtggatcagggtaattattctatcatttgctgctttcgtatttaatacgacagagtttgtacctgttgcattgttaagtaatatttctgaaagttttgccatggtgccggctcaaacagggttgatgatcactatttatgcttgggttgttgccctaatgtctttgccattaatgataatgaccagcaaagtagagcgacgtaagctactgattattttgtttattgtatttattctaagccatgtcttatctggcgtggcatgggattttaattcgctaattgtagggcggattggagtcgcctttgctcatgctgttttttggtcgattactgcctcattagcaataagaatggcaccccatggtaaaaaagcacaagcattaagtttattagcaaccggtgttgcactagctaccgtgctgggtttacctctgggaagggtggttggacaatggttaggatggcgagctacctttttgggtataggtgtactggcgctgataaccatgcttgctttaatgcgctatttacctttattacccagtgaacattctggctcgttaaaaagtgtcccaatattgctaaaacgagcaccattagtgggtattttcttactaacggtgatcgcagtgaccgctcattttactgcttatagttatattgagccttttgttattgatattgcaaaattagatgaaaattttgccactattgtattactgatttttggcggtgcaggaattttggggagtgtgttatttagtcgctatagtaccaaaatgccaacctcattcttattctttgcacttattctcttaaccgtatgcttaagtacgctgatgatgagtagccaacatacactcacatttattgccttaatcatcttttgggggataggctttatgtgtattgcgttaggattgcaggttaaagtgattgacttagcacctgatgcaacagatatcgccatgtcgatctactcaggtatctttaatatcggtattggggcaggggctttgttaggtaatcaagtaatattgcacgcgggaatgccaaatatcggctatgcaggaacagctttaagtattattgcactagcgtggtgtggctttatttttacccgttatcgtgttgcgatgggaggcaaacctcgcgaaaaaaaccggctccattaa

SEQ ID NO: 315578 - DNA, 579 bp, Proteus mirabilis
gtggtggcgagtgataaagcatctgaaaatcgtggtgtattagttaccatgaataattcggtaattagtggtaaagatgttgtcaaaatgaatacgacagaagtgcaagcattccagccgattaatgcgggtgctcaaggttatgttcacgatggtaaagtacactattacactgctgcaacaccgcgcgctgagaaagttgcctttgatgtcagcaaattaaccgaattaccaaaagtaggtattgtttataactatgctaatgcatctgatttaccggctaaagcatttatagataaccactttaaaggtattgttagtgcaggtgtcggcaacggtaatttatattctgacatcttaaatactttagctgatggtgtaaaaaaaggtgttgttgtggttcgttcaagtcgtgttccggttggatttaccacacaaaatggtgaagtagatgatgcaaaatatggctttattgcttcagaacgtttaaatccacagaaagcaagagtgttattacagttatctttgacagaaacacaagatcccgccacgatccaagaaaactttgaaaaatattga

SEQ ID NO: 315579 - DNA, 240 bp, Proteus mirabilis
  misc_feature (206)..(215): n is a, c, g, or t
atgaagctcgaaactcgtatgcgtcagtcgattcaacaccgtcgtggagttgtactgactcgttctgatctggctccattgggaagcaagacccaagttacacacgcattgagtgtgttagtgaataatggtgaacttcttcgtctttctcgaggaatttatgctaaagcccaaaggatggggaatgatgtaaaagcgcaaggtannnnnnnnnncttgatgttatcattcgtgaagtag

SEQ ID NO: 315580 - DNA, 402 bp, Proteus mirabilis
ttgtgcttcgagaaagtaaatgcctcacaaagtgaaattattgttgaagtcgatgctccaagagttaagcgcaagcttgtcataaatgggaagaccattttctttcgtagttatagttgtaagtctgctactaaaaatactgcattcaaattagccaagaccccccctactcaaggggttgctcgttatgtagcagagctggctcactattataaaatatcttattgctacaatacgatggatcagtgggctgatgctgtaactcgccttgcgggtgatgaggtggtaaatgatactgttgaagaccttcttgtagctctaaaacgagcagggaaaatcaccaagcaagaagttgcgatactgtcagttaattatctgcgggagcaaaaacaaagtgtttga

SEQ ID NO: 315581 - DNA, 156 bp, Proteus mirabilis
atgaccatcttggggcttgttgctgccggattagggatttctattgtgacaaaatcatttacccgcatgaaagttgatggtgtgcattatctgcattttgctaattcgatgtggccagttaataatggtgatatctgctgtttggtattcatttga

SEQ ID NO: 315582 - DNA, 453 bp, Proteus mirabilis
atgaatatagaacttcgccatttacgttattttattgctgttgctgaagaattacattttggtaaggcagctgagagattaaatatttcccaacctcctttaagtcagcaaatacaagccttagaaagtgagataggggctcgtttactcgaaagaaccaatcgttctgtttcgttaaccccggcaggacaaatgtttttaaaaggatcctatcaaattatggcacaagttaaggcggtagcgacacgagcatcaagaatggaaaaaggagaattaggtgaaatttcaattggttttacctcaacaacaccttttatgcatttggttacgttaagtttgcgtcaatttagggaaaattatcctgaagtcggtattcatatgcatcaaatgaataccaaacagcagatatcaccattattaactggccacatcgaattagcaaaatgcagataa

SEQ ID NO: 315583 - DNA, 507 bp, Proteus mirabilis
atgactaatttaaaccaaaatgatgatgcatttttccattcaataaaagaattaatcaacagtaatcttggtcaagatgtagatattgagatgttgaaattcattactgaattttactttctatttagtgtgatggagatgaaattagcaggcggagatttcaccttagatagaatagattacatagctaattatgtcgccaaaaaggataaagaatcagaaaatattgataaaatatataacttccttagagatagatatagtaatgatgaaaaacatcaagttttaatgagtgggagaaaaaaagctattgagctttactcaaaaatagtagcagaaattgatgaaggtgatactagtttagtatcaaaaattaaaattatacttatagttctttacagaataagaaataatttatttcatggtgcaaagcttgagcatgatttaaatattcagaacatcttatttaccaatctgaatgacgcattaaaaataatattaatctag

SEQ ID NO: 315584 - DNA, 339 bp, Proteus mirabilis; identical to SEQ ID NO: 103768

SEQ ID NO: 315585 - DNA, 153 bp, Proteus mirabilis
atggcgagattattaactgttcatttagtacctgtgccagagacaatagcagaccctgacactgtgctaacagtgcctgttgtgtatatcatgatttatttcctaaaatttagatacaaaaaaaccacattagtgcggtatttaatcttctaa

SEQ ID NO: 315586 - DNA, 843 bp, Proteus mirabilis
  misc_feature (828)..(837): n is a, c, g, or t
atgaacatcaaacaccttgcgatagcgacttgtatcggcattgccgtgccgacaattgctcacgccaatacaaatgaattatcgatagaacaacgtttagctcgactagaagagagaacgttagccgctgaaaaaagagctgagttagcagagcaacgtgccgctaagttagaaaatgcgttaaaacaaaatcaggcacttaataacaatctatcacaaactagcgaaactataactgcgccaccgtcatcgctgatagaaacaaataccggttatggaaaactcaagttatatggtgatgttgaatttaatacagatattgcaagtaaaaaaggtcagctaacctccattaacatgcgctcaggtaaagaaaaagactatggcgattatgataaatgggggatcaatgggcgtatattaattggcttagacggagagcgcctattagataataaaaattatgcaggcttcactgttcaaccactggcaaatattgatggtaaggtatctctcgacgatgccgctttttattttggtaaaaaagagcgttggcaatttaagttaggtcgttatgaagcttatgacatgttcccgcttaatcaagatacttttgttgaatattcaggcaacactgcaaatgatacttatagtgatggttttggttatatctacatgatgaaagaaggtcgagggagaagcaatagcggtggtagcatgatgtttaatagccaatataataattggtattttgaaactaatttattaattgaagatggaacgtctatttttgctaacaaggaatatcacggaaataaactatataataannnnnnnnnnatataa

SEQ ID NO: 315587 - DNA, 618 bp, Proteus mirabilis
  misc_feature (41)..(50): n is a, c, g, or t
ttgctaacaaggaatatcacggaaataaactatataataannnnnnnnnnatataataataaaaatgttatttattttcgcccagttattgcatggaataacaataattttaaagttgctgtcgccttagaaaaaaatattatcaataatgcttatggttatgatgataaaaaaacgggtgaatttagagatcagtccaaacgcaacggttatggattaactttaggctggagcaatctacaacaaaatcctgaaaatggtgtcacaataaattggaataccgcttatttagacgctaacgatgagaacgactttacaacaggcactaatattttatggcgtaaattacaattaggctatatctatgcccataataatattaagtcatatactattaatagtgatgatgataacaataatgatattatatttggcccaggaaaatataatatccacactctctattcctcatatgaattacctaatattttagatatggataattttaaaatctatttaggtgcatattattctgttattaatggtaaagatattgaaatagaaaatagcgataaagatcgttatggtgtaagagcacgttttaaatacttcttctag

SEQ ID NO: 315588 - DNA, 1959 bp, Proteus mirabilis
atgacaaaaataaaccagcatcacattcctgcaaacattgcagagcacgccctgataaataaagagcaataccaaaaagattatgcattatccatcgaaaaccctgaggccttttgggcagataaagggaaaattgttgattggataaccccctatactatcgtgaaaaatacctcctttgatccaggccatgtccgtattcgctggtttgaagatgggcaacttaacattagccaaaactgtcttgatcgccatttagaaaaacgcgcggatcaagttgctattatttgggaaggtgattcccctaatgaatcaaaaagcattacctatcgccaacttcatcaagatgtttgtcaattcgccaatgtattaaaaaaactaggtatcaaaaaaggcgatgtagtggctatttatatgccaatggttcctgaagcggctgttgcgatgttagcttgtactcgtattggggctattcattctgttatttttggtggtttctcaccagaagcagtggcagggcgcattattgactctaaagcaaaattagtgatcactgcagatgaaggcttacgtgctggtagagcaatccccttaaagaaaaatgttgatgatgccctcactcatgtggatatcccgcctattgaacatgttgtggtcttacgtcgaacagggcaaacagaacaatggattgaaggacgcgatttatggtgggatgaaattgttcaaggcgtcagtacagaatgtgatgtggaagtcatgaacgcagaagatccactctttattctctacacatcaggctctacggggaaacccaaaggcgtattgcacaccactggcggttatcttgtttatgcctcaatgacctttaaatacacctttgactatcatgatggtgagatttattggtgtacagcggatgtcggttgggtaactggccatagctacttgttatatggcccgctatcaaatggtgccacaacagtgatgtttgagggcgtccccaattacccctccgtcaatcgtatggctcagattgttgataaacaccaagttaatattctctataccgcacctactgcgatccgcgcattaatggcggaaggagacaaagccattgaaggtacgcaacgaacctctttacgcattttaggctcagtaggagagcctattaacccagaagcttgggaatggttttatcaaaaaatgggacgtagccaatgccctattgttgatacatggtggcaaacagaaacaggaggtttcatgataaccccattgccgggagcaatggatctaaaaccaggctcagcgactcgtccattctttggtgtacaacctgcaattgttgacaatatgggggaaatacaagacggtgcttgtgaaggtaatttggtgatcgtagattcatggccgggccaagcaagaacattatttggcgatcatgaccgttttgaacagacttacttttcgacctttaaaggcatgtacttttcaggtgacggtgcccgtcgtgatgaggacggtgattattggataacaggccgtgttgatgatgttttaaatatctctggtcaccgtttaggtactgccgaaattgaatccgcacttgtcgcccatcctaaaattgcagaagcggctgttgttggtattccccataatataaaaggacaagctatttatgcttatgtcacgctaaatcatggtgaagagcctacggcagagctttatacagaagtgcgcaattgggtacgtaaagagataggcccaatagcaacacctgatatccttcattggacagatgccttacctaaaacacgctctgggaaaattatgcgtcgtatcttgcgtaaaattgcctctggcgacacaactaaccttggagatacctcaacactcgccgatccaggcgttgtagaaaaactgttagaagaaaaacagtctctatcactgaccatttaa

SEQ ID NO: 315589 - DNA, 486 bp, Proteus mirabilis
atggcccattcgccagaaaaccgaagcaccggcatcagccaggcgtggagaaaactggtatcccagcagccagaaaaggccaaagacaagttcgctggtacctgctgtatcggtcataatttcggttggattcagcccggtctcctgttccagaaggccttccagcacaaagatagagtccctcagcgtccccggtataacgatgccatgaaagccggaatactgatcggacacaaagttgtaccaggtgatccctctgttattaccaaagtatttgcggttcggtccggcattgattgttctgactggcgtaacaaagcgcattccatctgcagatgccacttctccgccaccccatatctgtgccagtggcagcgttgcctgaaaatcaaccagtctggcattagcgctggtgatagtttcagcccgcagatagttcgcttttgtccagttcagccggtgtcgggtcagtgcaggaacatttga

SEQ ID NO: 315590 - DNA, 678 bp, Proteus mirabilis
atgtctgagtttcaagaaaaacatactgtttctcgccttattggttcacctcccggttatgtgggatatggtgaaggagggatcttaacagaagctattcgtaaaagaccttactcagttgttttactcgacgaagtagagaaagcgcatcctgatgtgctaaatctattttatcaagcttttgataaaggagagatagccgatggagaaggacgagtcattgattgtaaaaatatcgcatttttcctcacctctaatttaggtgaccatgtcattactgcttacgcggataaaccggacgaactagaagatgcactctaccctgaattaacaactttctttaaaccagcattacttgctcgaatggaagtgatcccttatttaccgttgcctgcagaggttttacgacaaattgttgatggcaaattagctcgtcttattaacctgttaaaacagcgtttcaacgcagaaatcaatgtagaagagagtgttgctacggaaattttacgcagagcttctcgtgctgaaaatggtgcgcgtattttggaatctattattgatggtgcgttattgccgcctctttctttattacttctacaatatagtgcacgtaatgaagctatctctcatatccgcttagcgactgaaaatgatgagtttattgcggaggttaattaa

SEQ ID NO: 315591 - DNA, 1719 bp, Proteus mirabilis
  misc_feature (1690)..(1699): n is a, c, g, or t
atgatcagtcaaaaaagcgcattagatattaatgcgttatcagagttattagatatcgacattccgccacatcaagttattacacaaagttatcctagtttttcacccttattagttgaatggatgaaagatagctggctattagcgtcaactgaactaaatcacagtgaacttcgctctgattcattgttagcgaaatttactcataacatgactgaacaagcgcgaaatggtgagttagatccggtcttatgtcgcgataatgaaatcgacttaatgattgatattctgtgccgtcgccgtaaaaacaatcctgtagtagtcggagagcccggtgtgggtaaaagtgcgttaattgaaggactagcactacgtattattgccggagatattcctgataaattaaggggttgtgaacttcttactcttgatttaggcgcattacaagcaggtgctgcagtcaaaggcgaatttgaaaaacgctttaaaggcattatgcaagaagtcactcaatctcctcaccctatcattctatttattgatgaagcacacaccctcattggtgcaggtaaccagcaaggtggcttagatgtttctaatttattaaaaccggctttggcgcgtggagaactacgaactatcgcagcaacgacttggagcgaatacaaaaaatattttgaaaaagatgccgcgttagcgcgccgtttccaattagtgcaagtcaaagagccatcatctgcagaagccattatcattatgcgtggcttacgtagtatctatgaaaaatcccaccatgtctttattgatgatgaagcactacgagccagtgctgaattaagtgaacgttatatctctggacgtcaattaccagacaaagccattgatgtattagatacagcctgtgcaagagccgcgattaatctatcttcgccaccaaaggcattatcctctttgaaaacagaactccatcaaatcaatatggaaatggatgtattacaaagagaacactatttaggtttagatgatcattctgagcgtcttgaaacgttagcctcacaagcaagtgctattgaacaacaagcaactgatttacagcaagcatgggagcaacaaaaagagcttgtatctcaaattattacgttacgagcaacattacttaataatgctaccgaagcgactaatgacgatgtcgcaaatgatgttgcaaataatgaagaggtaagtgatataagaacttatagtgaagcagaagatgctgaagataatgctgaagataatgatgaaaaaatagcaacacagcccccctgctcatctgaagaattaaagcaacagttacaacaattagataaacaacttgctcagttacacgacacgcatttactggtttcacctcacgtcgataaaaaacaaattgcggcggtaattgctgaatggacaggcgtaccattaaatcgattatcacaagatgcattatcaattgtcactgagttaccgacctacttggaagagagtatcaaaggccaatcattagccattcaatgtttacacaaacatttacttacagcgcgggctgatttacgtcgaccgagtcgaccgctgggggcattcttattagcaggtcctagtggcgtgggtaaaacagaaacggttatccaaattgcccaattaatgttcggtggcacacaatatnnnnnnnnnncaatatctcacgactattaa

SEQ ID NO: 315592 - DNA, 150 bp, Proteus mirabilis
ttgggagtcggtaatgtagaagtcgtgcctgatatcaagggaagaattcctctcattaactgggttcaggccggtgattggactgaaatagcgaaggaatttgcctatgaagatgctgaagagtggcgtgaagtcacagggaaagcatga

SEQ ID NO: 315593 - DNA, 192 bp, Proteus mirabilis; identical to SEQ ID NO: 295799

SEQ ID NO: 315594 - DNA, 396 bp, Proteus mirabilis; identical to SEQ ID NO: 303114

SEQ ID NO: 315595 - DNA, 315 bp, Proteus mirabilis
atggcattcaacaatcctgcgagagaaaaaacaatcgaggtcattaataatgtcaccacaaccattgtccaagagtgtatctctagtggtacaaaaaatagtgaaaccagagtgaccaatatcccaacacaaataccacgggcgacaccaccacccacaaatccggcaataacaacatgggtcggtactggcgatactaataattcttcaatactacgttggaatttagcgccaaaaaatgaagaggagacattagcatatgagtttgtgatcaccgccatcataatcaagccgggaacaataaactgcatataa

SEQ ID NO: 315596 - DNA, 966 bp, Proteus mirabilis; identical to SEQ ID NO: 315541

SEQ ID NO: 315597 - DNA, 1353 bp, Proteus mirabilis
  misc_feature (994)..(1003): n is a, c, g, or t
gtgaaagaactcactcagcgttatcttcaacatggttatattaccgcacgtatccaattcttacgtcctaaccaacatggcgaattaggtctgtatgctattgaagggtttgttgaacgtattgaagggggtgatcgaggtgttaacaccacactactatttcctcgaatcaaagggcaagcattaaaactcgctacactcgatcaaggcttagatcaagctaaccgtttgcaatcaaataaagtcacagtggatattcttcccggtaccgaattggggggctctgtcattaagttgtctaatcaacgaaaatcaccttggcatctcaatatcgctagtgacaattatggacagaaaaattcaggccgctggttaatacgaacgaatgctagtttagatagcccattaggtttatctgattttgtaagcttaaatgccaatataaccacagataacccgaatacccgttttaatcgtgcttatactttgctctattcaattccttatggtggttttacttttagctcttttggtagttattcggagtaccaatttcaccaaaaattacaaacacgtactgtcagcttatatggcgataccactcaagtaggtattagaggcgattatgcttttagtcgtagccaaaaacaaattgataccttaaatattcaagtcactcataaacgtatacgcaactactttagccaaattcgtttagatctcagtagccctaaattaaccacgattgaattagggattaatcatttgcagattattccaaatggcgtattgagcactaatttgagtgttgaaaaagcggtcggctggtttggcgcagaggaaacaccctatatcgctaacggtaatggtaacgactatcgctttacaaaagttaagctatttgccaattggtatcaacgcttttctctatggcattctacatttttattcaatagttcttttttaggccaatacagccacgacacactccccnnnnnnnnnngcgttgaatggctaagtttaacagacaaaaacgccattcgtggttttgatcaaagcacactttctggtgataacggtggctatttacgcaataccctctcctatccctatcgacttaaccacttttctatcacacctcgtatagggatagatatcggtcaagtaaaacaacatggtaactacaaaggatggcaaggtggttacggcctaagctccggcttaaatattcaatatcaacaagcacaactcgaccttgaagttgcaaaaggcgagttactgtatcaccaaacaaattccaataaaaccaaagatcctactcaactactggttaaattttcatacttattttga

SEQ ID NO: 315598 - DNA, 423 bp, Proteus mirabilis
atgtcccgcttgcctttgcgttcaatcttgcccgattttttaacttccgttgctcgtgtacttctaggtacactgcgcgacggcttgaaaaaatcgaccaaccttgttagcaaattcagcgctattttcggtgatgttattgcatcactcagtgcgaggcacttgagtgatggggctcctactgcttgtacgtacacggtttcaggttctttttcactcccctcgccggggttcttttcgcctttccctcacggtactggttcactatcggtcaatcaggagtatttagccttggaggatggtccccccatattcagacaggataacacgtgtcccgccctactcgtcgagttcacaataacagcatcttcagatacggggctatcaccctttactgccggactttccagaccgttctcctga

SEQ ID NO: 315599 - DNA, 564 bp, Proteus mirabilis; identical to SEQ ID NO: 297513

SEQ ID NO: 315600 - DNA, 441 bp, Proteus mirabilis
ttggcaggggggataaacttatatgcctatgcgccgaatgcgttgacatgggtggatccgtgggggcattgtgcggtcaaactttctaaaaatatggtagctgatggtacgcctagacctgccaataccgcagctcatcatattgttggtgatacatctaaaggtgcccagccagccagagatattctgaaaaaacatggtattgatgttgatgatgctagaaatggtgttttcctgccaaatagaaataatgttgatgaagcattgtcaggaataaaacataatggcagacatccagataaatatatcgatgcagtgaatagacgaattattaaggccgatgacgtgggtggtaaacagggggttttagatgaactatcaaaaattaatgatattctttcctctgcacgcagagacgcaagttggtatacaatactatga

SEQ ID NO: 315601 - DNA, 345 bp, Proteus mirabilis
atgaggacatttgctataaaccagcataatgatctggtgattgatgctaaaggtgatctgcaaatttgtgataacgatgaagcagtaaaaaacctttgtcagcattttattaaagcggttcgtggtgagatgttgcataaaaaagataaaggtattccttattggtcagcaacatttagccgtcaagttgatattcctttatttgaaatggcctttcgacaacgtctggctgaaatcgaggaagttgtggctattagccattttaatgcctttttagataatggcgtactgaaatatcaggcggatatacgcacgatatatggaggatttacattacatggctga

SEQ ID NO: 315602 - DNA, 651 bp, Proteus mirabilis
atgaacgtattgaaaatctttttctgcacattactccctttagcctttcccggtgaagtgaagagtaaagggagtaatgtgcagaaaatgattgaggaattaactcaatgccgtttggaatcatctcagctaattcgtttagattgttatgacaaaattgcgctttcttcaacatcttcctccaatgcactgcctgatgttactcaaatgggtaaaacatggcgccaagcaacagagcatgaaatgaaacggacgggaaacagtgcaggttttctcgtctcagtaccagaaaccggtgattatcccgtattaatgaccattccagcgattggctttcaaccgcctcgccccatcttaatgctgagctgtattgataacattactcggatgcaaattatcctgccaacaaaacaagatgctggcagtgtgatggtttcaacggataaaacacaatttactgcagaatggtttttacgtgaaaacggttatgtattggaatcaagccgcggtataccgggcatagatgaaattaaacgcttgttaaatgctgaaagattgacattgaaattatctaataacgaaaaactcaccttcaatatttcaggtatttcacaacaaataatccctttaagagcggcttgccactggtag

SEQ ID NO: 315603 - DNA, 504 bp, Proteus mirabilis; identical to SEQ ID NO: 294605

SEQ ID NO: 315604 - DNA, 246 bp, Proteus mirabilis
atgttactccccggttggcctgcgacaacacaactttcctcagagtaccaaagcatgttatggctaaaaatagcctttgttgccttgatgttaggattggcattagtgaataggtatgtattagtgcctcatatccgtaagaagaataactttcaatggttgcttattaatagttggtttgagttattacttggtagcatggttattttgacagtggccatttttgcgattaactcacctgtatag

SEQ ID NO: 315605 - DNA, 606 bp, Proteus mirabilis
gtgggtggtaatgatcttgatatctacctagcttttaaacagctaatgcctttatttggcatgacagggctaacttcatcgggcataaaattgccgttaaaacaattttgggatcctattgccatcaataatgttgaagcacaaaaagatttttattctcaacaaaacttagcggcattaaatcaactacgtcgtgatgctcaagagccagaaaagataaaacgcttaattgaagtctataatgaaacactaggatatggcattgtccgcaaagcggaagaggcgaaaatggcattatcagattgccatacctatttagccagcatcgcgttattaagtgaaacattagaaaccaatatcactcgccagcaaatggttgaagccattggatcccctaaagataaaatgattgatttggtcaatgatgccgtacaacaagggggcgtggtacctgatgtggtgtttatgacaggaggctctgcgcgttcaccgattttatgtcaagctatcgagcaacagttacctaatgtgcctattgtaaaaggtaatgatttcggctcagtaaccgcaggattagcccgttggggtgaagtttgttttaaatag

SEQ ID NO: 315606 - DNA, 135 bp, Proteus mirabilis
atgacaacttgttggtacagcttttctgaaagtggggtttcagacatcgctttcatgcgcaataccatgcctaataaaggtgtagcagcatctatcattggattgatgttgtttcctcttagcggcagttggtaa

SEQ ID NO: 315607 - DNA, 210 bp, Proteus mirabilis
atgttttcactttcagcaatcgtgatcttattttcggttgcaatgacatctactttttttgatggtgaccaactcgctgatattgccaagattattggtgtgggtgttgcgggcgttttaacttggaaaaagaaaccttttattttggtggtattaagtgctgctattattaccgcgatgctacgttggatagccactttgtggggataa

SEQ ID NO: 315608 - DNA, 201 bp, Proteus mirabilis
atgacatttattatttttaaagagagattagcaccaaccgcatttctcggtaaattaaattctatattttcattagcagaaactcccacattaaaactagcttcacttctaagttcaacacctaatgacgcgttttttttcctattaaattccagtgttgtattatccttaagttcactctctgtaagagatactccttga

SEQ ID NO: 315609 - DNA, 309 bp, Proteus mirabilis
atgcttcgatacacaatcggttctaagagacgagaaatcaccttaggtaaggtatctcatctatctctgtcccaggtacgtagcctcgctgaagatacgcgcaaaaaagttgccaccggagatgatcctattgctgaacggaaacttaaccgaccgaagcaaatcacaacgatagatggattgtttgaagactggcacgaagatctggttaagcggttgaagcatccacaaatcccagaaagggtatacaggaaagatattgctcctacgattggtcaactttctttggcgaagataaccccccattga

SEQ ID NO: 315610 - DNA, 717 bp, Proteus mirabilis
atggctcgtaaatatgtttatggtgataaaccaatccgtacaacaaccgctgagatagttgaaaatgagtttgctggaaaggctacggctgctcaggttgatgcaattttaaagaaaagatttccacattacaaagacaatacttatttgaatctgatagttaactcagttaactgcaatcgtggtcactggagttttaacaggacagccagacgaacagataatgccacccatcgccaccatgaatatgaccgacttttcaagcgaggaaacgttttcgaggtctatgattccgcacttcatggtgtgtttgaaatctatgaagcttcagacggcaaatggctaacacgtccggttaaaagtgagtttgaaaaggccatagaaactgcgtctcaacttacctcagaacaacgtagagataagttagctacagccaacaccacgccagaaagggtcattataaagagctataccttcaagcgtaatcccctcgttgtagcagaggtattagccttagctggaggtaagtgtcaaaactgcctacgtgacgcaccattcaagcgggaagatggtagaccgtatcttgaagtgcatcatgtggagtggcttgctaacggtggagaggactctgttgaaaatgctattgcactctgtccgaactgtcaccgtgaagtacactacggcgcgcttgtgttgaagccggttaatattaagtag

SEQ ID NO: 315611 - DNA, 1071 bp, Proteus mirabilis
atggggttaagcaaagaaggttatccgaaaggggtgttagtaagagctgtgtgggattgttgtcatgaattgtatgagcaacttggcagagcaccaacacgactggaatttatggcagaaattcaccgtcgagagccggctagaaaaggcattagcacacattcacgccagtggggggactggatgcgtcaccacagttttaaaagcgatatattattgagtggtcataatattccggatgaatatttggaaccgcaacgtcttcgggtggtatacacagtggaactgcttggtgaagtttctgttgccgaagtagttaaatggataattacaagcaatgcaccacttaagaaatctgaaatagaatatcagtttcaggcgttgactgtgaatcatagtcagcgatggtttcatcgtggaacacgaaaagacatgcggagtaacagtaaccatcccatggacaagttttatcgttctggagtaggaaagaatacgcgatatgtcatatacgcacctgaaaagcatggtatctgggacattgctgaggatggcaaaactcctatttgtattgcagcgcctagattggccgatttgattatgctgcaactcagagatgaaaacgaacttgcaaacaacatgcctactgacgaaacataccgcgatgcgcgtatgaggatgatgcgcgaaacgtttgtacgagaggggcagccagccttcaggcgtcgcctttttcgtgcatatgaggggcaatgtgctatcactgggtgcactatttctgagttgcttgaagccgcacatctccgtccttatgctggagcttggcattcccgggcgtgttttgggttattgctgaaaaccgatatccataccttgtttgataaaggcttattgtggctcgataatgaataccgggtatgtcttgcccctgcaatgatgtatacggaatatcacacgttgcacggtaaagcaattagcttaccccgatccccggacgattggccgctgaaagagcatattgcctggcatcgtgatttctgtcttgaaagagctgacttttctcaggcagattaa

SEQ ID NO: 315612 - DNA, 801 bp, Proteus mirabilis
atggataaatcaaaaagcttaccgaaattacatgtaagatataagagatttcagaaggatctaaaagacgtatgggaatcttttttaattatagagttttatactcctcgtattaaggatttaataaaaaacgatcggttgccgaccttaacaattgatacttttataaatgaaaacactaaaactattgataaagataatacctatggtgcattaagttcattggaacggcgtggtaattttagacggacattacttgaggctgttctaatatttgaagactacatgtccgacttgatcgaattagtgtatttagacttgccaaacaaattaacatcagttcaagatgacagcaacaatactggttatcaaaaacttttaaagttaattcttagctgttccaacaaagatgaaatggtagaaagattagttgaagagaaaattcgaggggtattctatggaaatcctttggatgtatttgaaaaagataaagcaaaattagaatttggttcattctttaaggaaaattgcacggcagaacttaacaatctaaagaagataattgcagcaagaaatattattgcgcataacaacggtaagattgacaggaagtatctgcgcgaaaccgacaccagcgcgaatttaggtagcataattaaattagatcgtgaatttattaaaaattctttacatatgctttatttctttgcaactcaatctgctaaacttgtagtggaaaatatctatagagacactccaaatggtgttctaggtaaagcagtcaattctttgaataaatga

SEQ ID NO: 315613 - DNA, 759 bp, Proteus mirabilis
atgagcttacaccctgaaatattatttcattttacagatagggatggattattaaaaatacttgaacatacatttaaaatatcatatgcgagagaaaagatacaaggtagaaatgaaacaagggagtttggtattccaatggtttcattttgtgatataaagctgtccgatctaaaagatcatattgctaaatatggtgattatggcattggtttaaataaatcatgggcaaattctaagggattgaatccagtttggtatgtaaataaaaatagtgagttccccgatggccttacttcagcattaaacgctttatatcgacacatgaatttaatcatagatgataaagagcataaagagtttaataaaaattacatgaaattcatggatatatatagatatcttaaaaactatgaagggaacctaaaaagatcttcaattgagattgaaaactatagatatgccgatgaaaaggaatggagattcgttccaagtatcaatgaggaaaatgtattaccattagtgcccataagcagaataagaacaaagcaacaaaaaaatgaatataatcgaaaaatcagtcacctacgtttgagctttgagccaagagatatcaaatatatcattgtcaaggatgacaatgatatatttgatgttattaatcatcttaaaagggttaaaaatagattttcatctgatgaggtgacgcaactacaaacgcgtatattaaccaccgagcaaataaaaactgacatgtaa

SEQ ID NO: 315614 - DNA, 3858 bp, Proteus mirabilis
atggcaatttttgatattgaaaaagatgaattacttgggctatctgatgttcagttagaagaactaatcgctcgtctttcagaggcagaagtagcagcacatggtcatagccctgctagggtaaattggtctggctcaatcaatgctccagatgatggtattgatgttcatgttaatgttcctgtagcgcaattaactacagggtttattgaaagaccgaatacaatccttcaatcaaaaaaacattcaatgccgaagactgctattacaaaagaaatggttattgatggtgaattatcatcaacgatttctttattagccgcacaagggggaagttacattattgtcagcttagctgatgattgctctcctccaatgttaaaagaccgtattgaagccatgcaggatgcagcgagcagagatcctaatggcagtaatttgcatttacgcttctatgaccgttctaaattaactcaatgggtgcgccaacatccgtcagtgatgttatgggtgaaaaggaagttgggtcgaggatactctggctggcagccgtatggggcatggagcaatccaccgcaaggagctgaagatactataattttcgcacaaggtgtgaagatctcattgccatcaggaaaaggtcagaatcttagtattgaagatgcaatcggaccgatgagagaccttgtacgaacgactaataaagcaattcgtattactgggttatctggggtaggaaaaacgcgtatcgtacaggcactttttgatgaaactgtagatacagttggaacagatgctcttgatagaacaattgctgtttatgtcgatactggtgctgaaccagagccgtcggctacagtcatgttggagaggcttatttctgaaaaccgacattcaattatgatccttgataattgtccgtcagacctccatgcagatttggctaaaagggtttctactgcatgtgacaatgtaaaactcattactattgagtacgatattagggatgataagccacagaccacagaggtaattcacatagagacagctggacccgaagtcgctgaaaaattactgctccgtcgttttcctaatataggccagaataatgctcgtaggattgcagagtttgcagatggtaatgcaagagtctctttggcaatagcggagagggtggaagagggggaaagtttggctcaactatccgacgctcaattgtttaaccgtttattcgatcagcgtaatcaccaaaatgatgatttaagggaacaagctgaaatattatctttagtatattcattttcgatttctgatcccgatgtagggggaagtgaattagaagtattgggctctctttctgggtattctaaaaaccaattattccgcacagccaaaaaattaatagataggcatattgtacaaaaaagagctcattggcgagctattttacctcatgctattgcgaacagattagcatcatcagcacttgatagtatccccaccgaacagcttagggcaacctttgaagcatcgaacaatcaacgtttattaatatcatttgctcatcgattagggttgttacatgaccatcctgtcgccatcgagattgttgaaggttggttacaacctgaaggactgttagggaaaattctagagctagatgattcacaaataaggatgttggaatatatcgctccagtagcacctgattcgttattgaaccaaattcaggtagaactcattgactctaatttcaacgaattaaagcgctatgactctcgtcgaacaacgactatcaaactattgcaagcattagcttatgagcctagaaactttgtgcaatgtgctaaattgttaattcgaattgcagataatgaaaaagaaagtaataaccacgatgatgcagggcaaaagctcactaaattctttcaggcatatttatcaggcacccatgcttctatagagcagcgtattgagattatgaatgaatgccttacttcagatatcattgctcgtagatctttagggctgaaaatgctttcaactgctcttgatggtggtttatggtcaggtattgggttgtatgaatttggtgctaagcctagagattttggatttgaacctgactacgatgaattggttgagtggcgtcatacttttattaattttgcattacaattagggatctcaagtgatcttgagttgaaaaactgtgctcgacaaattctggcgaatcagtttagaggaatgtggtttcaagaagcaatgagagaaatacttattgatgtagctcgtaaattgcataatgactctccttggggagaaggttggatagccattcgttcagtgatctattttgattatacagaacatcaaaataatcaagaagttgaatcaataccagataatctggccgctttagaaaaagagttagaaccaaatgaattaatttcaataacaatggcgtatgtattcagtagcagtggggattattgggcgctggacgatgattttagacaagatacaactgataaatatagtaaatcagaaaaacgccttgctgataaagcacaactattagggcaagaattcgctcgttcaagtcatacgcttgatgagttaggctctaatttattttctgctgattggatgccataccggatagcttttggaaaaggattagcaaaaggagcatacgatcagaaaatctattggcagaatcttgttgatgagttgaaaaaatatcctgaaattaataaagatttctcagtttttaagggatttattgatgaagttgattctgtaaatagagaactagcgcaggaatttcttgaacagtgcgcaaaacataatgaacttagaaacgttttagttgctctacatccacaacgagaatttacagttaatgatctgaatcgttgtatgacaattttggatgatccagatattaggccaatcatgtatggaccgattttgtggaggaaggaatatggagatttaccaaaagagtgcattctagaccttacttcaaggcttttaagaaaaccaaatggtgatgatatagttttagatggccttagcatgaagttacatgacgaagatgaagcaattgatactcttggtgctgaatttagatcacttggcctgaaagctggaatatcgcgacttaagaggaatgataatgactctggcggtatgagcgattataacatggagcgtgtgattaatgctgctttacgttttgatggtaacgaatcggaaaaactagagtggttaaatactatttttgaggtaattgacaatagctacggttgtatttactcatttgcaaatgttattggaaagactgcgtcattgatgccagacgaatttctttgtcgtgtttttgaaggggccgatagacaaaaacagtcacgattatattttatccgtagtgatgataggaatggttctgctcttgaaaaaatagatatgaatttactgcttgagtggtgccgtaccaaaaatgatagcagcatatttgcggctgtagcgacaggcataaacctttgggtaaaagatgagattacatcagcaacgatcttgtctgaggtggcaatcaaattattagaactagcacctgaaccaaaagttgttttagaagcttttgcagcacgtacagctccatctagttggtctggtagtttggcaaatataatgcaatctagagcagatgcaattagccagctaattacccatgagcgtaccgacatttctatagctacaaagtcggtgaatgaaaaactgattcgctggatagagaatgaaagagtccgtgaacgtaaggatgctgaaggacgtgaacagcgatttgaataa

SEQ ID NO: 315615 - DNA, 807 bp, Proteus mirabilis
gtggatgatttaattgatttaatacgtgtcgtttgtaaggcaactgaaactaaacaggcacaattttatgatgaaataaataaaggagggtggagaggtttaaaagctgattcaacgctaaaagttttaggcatgttaaatggggaagatgatgaagttaaaaagtatgcaacagagctatacgccaaaatatcaaatactaaagacccagtaggtagttatcgtagacgagttaggagcctgcatcttaaatttaatgataaagataaaggcgttaatgtttatcttttaaacagtgtattttggtcaagtgttaattttcaattagcgatgaacttttatgagagaaactccccattcgatcataaaattatcgttgttgagtgtttaatgcaaagtctagaagtggtaagtgagatctttggattaggcgtttatagttattttagtgaagatttaaatcgattgaatagacagcgatctgaggctgctaaaaagggaatccgaactaggcgcgatggctacgctaaaataagacaaaaagcatgtgagttgttaggtgaatggcagcctaggcctttaaaatggaaaaataaaactgttgcagcgaagggcattgcagaatatttatgggagtatattgaagtagtaaaaaataaatatccacaaatagagattaaatatgctgatttaactaaaaatattcttgattggtctagagattacgatgatgtcaaagcagccatggaggaaacagctataaccaaaaaacgaccaaagaaaaatgccaagaaaagatctaaatga

SEQ ID NO: 315616 - DNA, 168 bp, Proteus mirabilis
gtgtctcacaaaacaatatataaaacactttttatacaaaatcgaggagctttaaaaaagagctacagcaatattttagaagcagaagaactgtacaaaaaattagaaccacataacgatgattttcaaacaaaaatacaaacagattgctcagacaatattttctaa

SEQ ID NO: 315617 - DNA, 621 bp, Proteus mirabilis
atgggaaagcaaatccatacaggttctggggacaacgttggcaataataaaattgtcaacatcattagcaacatagaaccaaaatatattaaagggtttattgctgatttaatgcaggatatttcgcacagaaaaatatctgatgcagaaaaaaagcttgagtccattgcaaacatagatggtgtagacataaatgttaaatcattattaaatgcactgaagactaaagtagccctcatccaagaagaaaaaggattacaaaatcaaaaacaagaacttcaaaatcttgtgcgaaataaagaattagattacgacactttagacgttgctttttcaatactcttacattttgagtccaaaattcatctagatacagctagggatagatatttttctgcagaggtgagagggccttatacgaatgaggttttttttgagttcttatcaactgccgatgagatagttgaagcatgtaatagtcaatgtaaatttaattacttagaacaagagatattagggttaattcgaggttcattaagaaacaacaatatcaatattgcctacgaccttagtcctgtctcttatacacatctgacgctgccgacgatctactctgtgtag

SEQ ID NO: 315618 - DNA, 1008 bp, Proteus mirabilis
atgaaaatattagtaacaggtgcagcaggatttattggctatcatttaagccagcgtttgatagaaatgggttatcatgttatcgggatagataatctcaatgattattatgatgtgcgtttaaaagaagcacgattagctaaacttaatcagttggataacttccaatttgagaaaattgacattacagattcagttagtattgcgcaattatttgctgatcaccgttttgatcgagttattcacttagcggctcagcctggtgttcgttattcaattgaaaatccaatggcatatatcgatgctaatattgtaggtcatattaatatattagaaggttgtcgccatcataacgttgggcatttgatttattcgtcatcaagctcggtatatggtttaaatcaaaagcagcctttctctacagaagatagtgttgaccatccggtatcactttatgctgcgacgaaaaaagcaaacgaattaatgtctcatagctattctcatttatatcaactacccacaacaggactacgattttttaccgtatatggtccttgggggcgccctgatatggcactatttaaatttactaaagctatgttagcgggtgagcctatcgatgtttataatggcggaaatatgacccgcgatttcacttatgtcgatgacattgtcagctcagtggttcgtttaattaatattattcctgaaccaaacccaaattggaccgtagagcagggggaaacatcatcgagctctgcaccttataaaatatataatgtgggcaatgggcaacctactaagttaatggattttattacggcaatagaaaaatcactcaatattaaagctaaattgaacttaatgccgatgcaagatggtgacgtactttcaacctgtgctgattgtagcgatttggcacagacaacaggtttttcacccaatactgcagtagagtatggtgtgaagcagtttgttgattggtatgtaaattattaccagcattaa

SEQ ID NO: 315619 - DNA, 228 bp, Proteus mirabilis
atgatgaaagctgttattcctgtcgctggattaggcacacgtatgttacctgcaactaaatctatcccaaaagaaatgttaccgatagttgatcgccctttaattcaatatattgttgaagagtgtgcacaagcgggagttgaagaaattattttagtgacacattcatctaaaaattcaattgctgatcattttgataccagctttgaattagaagtaaactattaa

SEQ ID NO: 315620 - DNA, 213 bp, Proteus mirabilis
atggcaataatgaacattgttgtcatggtgaaagaggccatcaccaagaacgtcatggtgaatgttgtcaacatggtgagcaaagtcatgaacataatggtcatgccgatcatggttgttgtcacggtgaaaaacatcaagagcatggtaaacgacatggccgaggttgtggtgctggcaaaggaaaaggaagaggccaaggccgtcaattaa

SEQ ID NO: 315621 - DNA, 705 bp, Proteus mirabilis
atgcgattagataaatttttatcccagcaattggggattagccgtaatttagtagctcgagagcttagagctgggctcgtgactatagatggtgaaatggtaaaaacaggtgcgactaaaatcacacctgaacaagaagttgcttatgatggcaatgtgttgacacaaattttaggcccgcgttattttatgttgaacaaacctattggttatgtgtgttcaactgatgatcctgttaatcccaccattctttattttattgatgaacctctcgcacataaattacatgctgcggggcgtttagatatcgacacgacagggttggtgctattaaccgataatggtcaatggtctcatcgcataacggcacctaaacatcactgtgaaaaaacatatgtagtaacgttggaacagcctattgctacggatgtcgctgagaaatttaaaaccggtgtccagctaaatggcgaaaaagaattgactaagcctgctacattggaagtgataacacctactgaggtgaaactgacaatcagtgaagggaagtaccatcaagttaaacgtatgtttgctgcggtgggtaatcatgtcgtcgcgttacatcgagagcgtatcggcgatatcacattagatgatgctttagcgccaggagaataccgaccgctaacagaagaagagattaatagcattcatctacctaaataa

SEQ ID NO: 315622 - DNA, 258 bp, Proteus mirabilis
atgttaaataacaataaagccgttgaacttatttcgggttatcgttcactcgcgactaataatcatctacgccaacacaccagcggtgttgcgaaaaaaagctatcatacacgtggtcaagcaatggatttccgtttagtaggtacggatttatctaaagtacgccaagtggcactaagaatgaaagcgggaggggtgggttattatccacgaagtaattttgttcatatcgatacaggacccgtgcgctcatggtaa

SEQ ID NO: 315623 - DNA, 144 bp, Proteus mirabilis; identical to SEQ ID NO: 309053

SEQ ID NO: 315624 - DNA, 726 bp, Proteus mirabilis
gtggaaacaacgttattccaacatgccattacccctgaattaaacactatttggattaatggccaaaaaatagaaagtttcccttatcaaactacgctaaaacaaggagattggataatcgatagcaatggtaacggttatttaattactcaagcagaaaaagtgaatgttagccgccaacaccagacttcggctgaaaataaaaatcgtcaacctacgcaaggaaattttagctccgcatggatcgatcacggtattcaacccaaagatgccagttatgagtacatggttttcttagatgcgacacctgaaaaaatggcgcaattagccgagaaactccgtgataataatgggttataccaagttattcgtaaagataacgatgtacatattatttacgataaactcagtcaaatcacaggttatgcattttatcaaccagcagtcattgacgataaatggatcaaaaaagtcgataaaccgtccattgttatgacacatcaggaaggaaatatactgacggtgagtgctgtaacacctgatttaaatatgactcgccaaaaagcgccaacccccgtcaccattaatgtgacagtgaaagggaaatggcaacccacagctcaaggcagtgaggtaaaatataacctttctggggataataccgaacttattttcaccagttactttggcattccacaagaaattaaactctctcctctctcttaa

SEQ ID NO: 315625 - DNA, 174 bp, Proteus mirabilis; identical to SEQ ID NO: 315006

SEQ ID NO: 315626 - DNA, 144 bp, Proteus mirabilis; identical to SEQ ID NO: 289928

SEQ ID NO: 315627 - DNA, 678 bp, Proteus mirabilis
atgagacttttaggggcatccctgatgtgtgccgatttcctgaagcttggtgggcaaatcttggagctggagaaagggggtatcgatttctatcatatcgatatcatggatggccagtttgtcgataattttgcgctgagcattgattttatccgttctatcaagccgctgacgacccgtcctatcgatgtgcatctgatggtggataaaccggagcgctacattgagccgctggttaaagctggcgcggacattatcacagtgcatgccgaagcggtcacccatctgcacggtgtgctgagcactattcgcagtcacggggtgaaagccggagtcgcactgaacccgtccacacacgtggagtctctgggatacgtggttgatctgattgatgtgcttctcatcatgaccgtgaaccctggttttgcagggcagaaatttattgacacgatgcacgaaaagattcgttttgcgcatacctggcttaaagagcacggcagtaatgccgtcatcgaagtcgacgggaatattggccaccacaccatcccaccatgtgtcgcggaaggtgcaggaatgttcgtgctgggtaccagcgcgctgttccataaccgcggaacgattgctgaaaatctggcggaaacccgagcaatcactgacactgtccaaatggaatcatga

SEQ ID NO: 315628 - DNA, 1287 bp, Proteus mirabilis
atggcggtcgccctgaccgggatgggggcggtgatttcattactgaccggggcgttcgcaccggcactgaataaattcgttgaatcgacaggggtttctctctctattacggacttagggtgggccccgctggccgtgatcacctggggttccatgtacacgctttatttcgcgacagtctgcatcattattaatgtcctgctgctttcgctgaagcgggtgaaaacgctgaacgtcgatttgttcaacatctggaatatctcagtaataggattattgacgctgtactattcagaaaataatctggtgctgaccacatttgtggtgggtgtgatttatattctgatgctggttaattcagatgtaatgcaacctcagattaaaaaattactgaagtatgaccagagcagtattaccactaccgcgcacccttctttactgatttgtccaccggtcctgatggtgaatgaacttatttcacgttttattccatttatcgataagtacgattttgatgctgaaaagctgaacgaaaaaattggcttctggggttctaaattcgccatcggcgtctacctcggattctttgtcggtattcttggcaaactgccaatgagcgagttgtttgcgctggcctttacggccggggtctctctggagctgttcagtgcggttggtaactggtttggtccggcgattaaaccgctgtctgacggcattgccaccatgatggagaaacgcttcaaaggtcgccaaatttatgtggcaattgactggccaattctggcgtcccgcgcagagctgtgggccgtggcgaatattctggcgccagtgttactggtggcagccatcattctgcccggtaataaggtgctgccactgggggggatcttactgaccgtactggccccggcgctgctgattattactcagggtaaggtgatccggatgaccctgattggtacggtgctgatcccgctgtttttatgggccgccacgctgattgctgagtttgtgacccggacctctattgccatgaacagcttcccgaaagggctctcgcatgaccagctgttctcctccgtggactctgatccacttgaaaaaatgctttccatgttaatcgccaaagccagcgtatctctcgatatgaagatggtggtgatgtcagttatcgcgatcgtagcctatctgggtatgttcatctggtacttccgccggatgcagcaaattaacgcggcgcgttttgagtgtaatccttctgtaaatattgaggtggttaaatga

SEQ ID NO: 315629 - DNA, 924 bp, Proteus mirabilis
atgtatgatatcgtcgtcataggcagtatcaatatggatgtgattgtgaactgccatgagtttccaaagagtggggataatacattctgtaaatccattcagatgactgcaggcgggaaagggaataaccaggcggtcagcgctgcccgttatggcaaaaacgtctgttttattggctgtattggtgatgatgatgccggacgccagctgcgtcagaatctcaaaaaacgccggattgacgattcgtacatgatagtaaaagaaggggcaaagacgggttcctgtgtgggtctggttgagccgaccggcgataacacgctgctggttaacctcggggctaactttgctttcggtccggaagatgtcagcaaagcgctggaagagatcagcggaaagattttgctgatccagatggaaaccagccaggaatcggtccttgccgccatgcgcatggggcgtgcaaaaggtatgtttgtgatcctggacccggcgccggtgcagggcattaacccggaatgcttcccttatgctgatttgattgttccgaacagcagtgaaacccgccatattaccggtgttaccgtgaatgatgaaaaaagcgcactggaagcggcaaaaatcattcacaaaatgggtgtgaaaaacgtcattattaaaatgggtggcgatggttgcctgctttatcagaatgagaaatccgtctttattccggcgctgcgggttaatgcggtcgatactgttggagcaggtgactgttttgccggcgcactcgccaattatctgattgacgatgaaaataatatcgaagatgcgatccgatttgcccaggttgtcgccggtattaaagtttctcgggtaggtggtcacgatgcgatcccggcgatggatgaagttaaagccgttattgaaagtattaccgtctga

SEQ ID NO: 315630 - DNA, 996 bp, Proteus mirabilis
atgacaaccattaaagatatagcaaaaaaagccggggtatccgtagcaactgtatctagagcaataaacaacaaaagtgatatcagcgatgatatgcggaagtacattctgaagattatcgatgatatgggctacgtaccgaattccattgctaaaaatctgtcccatggccggacgaatcttattgccgttatgctgccgacattaaacaatcagttcttttcagatttattatctgaaatagaaaaggaagccaacaaaaacggatataacaccctgttctttaacagcagtgatgaccggaccaaggttgaatattaccttaactcgatgcgcagtaattttgtttgtggcgccatcattaactcactgtcggtcacggggaaggatctggagaacctcgaaaagaatggcattaaaaccatcacaatagaccgttcaggctctgatcctcattattcgtcagtgacggtagaccatcgaacggggggcagaattgcaactgaacacctgtttgaaaagggatgtcagcatcctgtcatgctttcgggggctcctgacgacgccattgccaatgagcgtatggctggatttgcggaagtcgttttatcaaaaacgggtcgtacaaatatcacggtgatccacagtgatttaacagcaaccggtggtcatcatgcctttatggaatttattaggaaaggtgaaaaatttgatggcgtgttctgttcgaacgatgccatggcatttggtgccatccgtgcctgtacggattcaggaataaaagtacccgatgatttactggtggttggatacgataactcgtcgatggatgagatgtttgtgccacgactcagttcggttaatcagcatctgaataaaattggtcagctctcaattgaatccatgattgagctcatcaatggcagggctgaaattaaacatttgagcattacaccagaattagttatcagagaatcaaccttaaaacgagagtag

SEQ ID NO: 315631 - DNA, 2985 bp, Proteus mirabilis
atgccacggagacaaatactcagcagtgaagaaaaagaacgcttgctggttgtgccggatgatgaagttcttctgacccgcatgtgttttttgagtgaacatgacttcgcgcttattaataaacaccgcaggccagctaatcgcctgggctttgctgttttactctgctatttgcgaggaccgggatttcctcctgacaaaagtatgtcacctcacgatggtgttgtctccagactggcgacgcatttgaaacttcagtccgatttgtggaccgagtatgcatcaagagaggtcacccgctgggaacatctggcagaactttatcgctacctgaaattaaccccattcaaccgggcactgcaaaaaagctgtatacgccacctttacccccacgccatgcggacagacagaggttttttgcttgcagaggaaatgctctcctggctccacaataataaggtgatttttccctctgttgaggtgatcgaacgaacccttgctgaagcaacaacgcttgcagacagggcggtattttctgcgctgacggcgcagcttgaaccggggcaaaaagctgcgctggaccgtctgctggtatctgagggggaacaaccttcacggctggcctggctgcttcagcctccggggaaaataaacggcaaaaatgtcctgcaacatatcaaccggctaaatgcgatagagtcgctggcactgcctgacggtattgcgctttccgtgcaccagaatcggctcctgaaactcgcacgcgaaggcaggaaaatgagtagtcgggacctggcaaaattcacggatgttcgccgttatgcctcgctggtttgtatcataacggaagccagagccacattgactgacgaagttattgatctgcacgagcgtattctgggcagtctgttcagcagggcaaaacgcactcaggccgaacggctccagcaaacgggaaagctgattcagagcaaactgaaacaatacgttattgtcgggcaggcattacttaacgccagagaatccggggaagatccctgggtcgcaatagaagacgtccttccctggcaggaattcatcaccagcgtggaagagacgcggttcctgtcacgtaaggacaacttcgacccgttgcatctgatcacagaaaaatacagtacgctgcgtaaatatgccccccggatgttgtctgcattgcagttcagggctgcacccgccgccatgcagctcagtgacgcgctggataccgtcagagagatgtatcgaaaacaactccgaaaagtaccaccttccgcgccagtcggtttcattccggaaagctggagaaaggttgtgatcacccctaccggcattgaccgaaaatattacgaattttgcgtgctgaatgagctgaagggagctttacgttcaggtgacatctgggtgaaaggatctcgtcgctacagaaatttcgatgattatttgatcccgtcttgcgattttgaaaaatcactaagggataaccagttaccccttgctattccaactgattgccatgaatacatcgagagccgtatgacgcttctggcatcgcgcctggaggaagtgaatgctatggcgctggccggtgatttgcccgatgttgatatatcggataaaggcgtcaaaattactccgctggataacagtgttccttcagcagcatccccttttggtgatctggtttatggcatgctgcctcaccctaaaattactgaaatgctggatgaagtggatagctggacgggttttacccgccatttcacccacctcaaaaataatcacgtcagacctaaagacagaaagttgttactgaccaccatcctggccgatggtatcaaccttgggctaacaaaaatggccgaatcctgcccgggaacgacaaagtcgtcacttgagggcattcaggcctggtacatcagggatgaaacttattcagccgcactggccgagttggtcaatgcccagaacaagcgacctctggcggcattctggggcgatggaacaacgtcatcgtctgacggacagaactttcgggtagggagtcatgggcgttatgcgggtcaggtcaatctgaaatacggtcaggagccaggcgtgcagatttatacgcatatttcggaccaatacagcccgttttacaccaaagtcatcagccgcgtgcgggactcaacacacgtacttgatggtctgctgtaccacgaaaccgatctggatattacagagcattacaccgacaccgcaggcttcactgagcatgtattcgcgctaatgcatctgctcggattcgcttttgcgccaaggatcagggaccttcatgacaaacggctgtttattcatggaaaagcggacttgtatccggggcttcagtcaatcatctcctcaaccagcctgaatcttaaggaaattgaaacccactggcgtgaggtactgcgtctggcaagttctataaagcagggaacggtaacagcatcactgatgatgaaaaagctggccagctatccgaaacagaatggtctggcaaaggctctgcgggagattggccgcatcgaaaggtcattgtttatgctggactggttccgggatccttccctacgtcgacgagtacaggcagggttgaataaaggtgaggcccgcaatgcccttgcgcgagcagtctttatgcaccgactgggggaaatcagagaccggggactggaaaaccagagctatcgggccagtgggctgacattgctgactgcggcgatctcactgtggaatacgatatatatagaaagagccattgatgctctgaagcgaaaagggattcaggtaaatgaacagcttattgctcatctgtccccgttgggatgggagcacataaatctgagtggggattacgtctggcgaacaaatctcaagctgggacagggtaaataccgctcattacgctcagtggatagtagtctgtacaaaaaacaagcttag

SEQ ID NO: 315632 - DNA, 282 bp, Proteus mirabilis
atgtatgcaatttcatttgatttagtagtagcagagacatcagcaaaccaccctaaaggtgtatcgcaagcttacatagacatagctacaacactgggaaacttcggatttcaacgagttcaaggtagcttatacacaaaccacaacgaagatatggctaacttattcaatgcaatgaccgcattaaaagcaatgagttggtttccaaagtcagtaagagatattagagcatttagaattgaacaatggtcagacttcactaagacaataaaaacgccataa

SEQ ID NO: 315633 - DNA, 192 bp, Proteus mirabilis
atgatgacaataaacaaaataccaactggagcaataaaaacctttgggaactatggggttctatatcaggttggcgagaaagatagcgatcttccagacggagatattttagtgaatatcaccctgctagaaagtggcgaaaaagagaagtataaattatctcaactcatagaagatccagaagctaaataa

SEQ ID NO: 315634 - DNA, 621 bp, Proteus mirabilis
atgataatttcttgcattggtcagaaaggtggcggcgcaaaaagcacaatagctagaacgttagccgtaggttttactgaagccggttggaaaactcaccttgcagatattgacgaaaagcagcaaacctctttgaagtggtgcaaaagaagagaagatgccggcttagctgttgttgattgtgcattataccggcgagttgaaactgcagttaaaataaaagatcaatatcatttgctaatcatcgatggaagacctgcagccgaaacaacttcgttagacgtagctctcgagtcagaccttgttctggtttctactggaacaacaattgacgacttagagccatcattagagttagtgagagagctgatcaaaaagggaatagataaagataagattacttttattgttgctaaatccccgtctgacagtgaaggcgttaaggctcaagaaacaataagggcttggggctttaatgtgcttaattcaataattccttttaaaacgagctacggaaacgcacttgatctagggagagcattgaatgaaacctcatttaagtcattaaatcttattgctaaaaacatgattgaagaagttcatgatataattaattcatga

SEQ ID NO: 315635 - DNA, 228 bp, Proteus mirabilis
atgaaagcgccaaaaagtaatatcaaattaacaccaccacaagataatgagccaacccttgacgtgacagggaaaggagcgaagcctgatacagatatcaagcctattcaaataaaaattcctgttaacaaacataaagaaatgaaagcgtatgctgcagagcaggggatctcaatgacggaaatgttattgactggatatgaaatgtatcgaagtaaaatgaattaa

SEQ ID NO: 315636 - DNA, 162 bp, Proteus mirabilis; identical to SEQ ID NO: 313312

SEQ ID NO: 315637 - DNA, 447 bp, Proteus mirabilis
atgaatataaaatatcgtgctgatattgacggtttaagagcgattgctgttattttggttatcttctttcatttagataatcgcttaataccatcaggttttattggtgttgatatcttttttgtgatctcgggtttcttgatctcgttaattattaaaacatcactgttacaaggtcatttttcatttggtgatttttatattcgccgattatggcgtttacagccactctatctttttgttttagtagcagttcttgtaatttcaggtattttctatctacctagtgattatcttgatatcactaatagtgaaaaatatgcttcagcttttctgtctaacaaatattttgcaagagcaacgactagttatgcagcgcaagatgcactcttcttaccgttattacatacatggtctttagcaattttattgtttttattacaataa

SEQ ID NO: 315638 - DNA, 1089 bp, Proteus mirabilis
atggaaaacaagagaacaatatataatatacaaatattgagattcgttgccgctgcgctagtggtactagctcacgcagagatatttatttatgatggagctaaatctgagccattaggtggatttgtggttgatatattttttgttattagtggatttataatcccttatatagcatacagaggaattgactataacggaaaattcaaggttggatctataaatttctttcttcgtcgtattgtcagagtagtccctttatatgctattagtacagctatatgcgttttttttgcctatctagtatcatataaacttagtaacccaactccgccagtttcattttggtggccatctacaaaaattgatatgttatggtacattgatagtataacattcactcactggaatcgaccccctatattgggtgttggatggacgttacagtatgaatttttattttatgcgtttttctctctttttatagcagttaaactttctaagatcgaatatgttgaagtggcgttcattacaatcattgtattgtcaaatatgttactatcatatagtggaacttcttggtttattcatgagtatgctccttttattaacttgactgctagcccgataatgattgagtttgctatgggcatgctactatatagattatacatttctaatgccctattgtgtaaaggtgtatcactaacaatactggtattgtttatccctgtattttatgttttagaaaaaaatatgattaccacctcattaggaggagattggcacaggcctttggtgtgggggttttttgccttttatggcgtgtgggccgcaattagccttgaaggtaaaataaaagcgcctaaatttatagtttttttgggaaatgcatcttacagtatttatttaatgcatgcgctcattacagcatggatggctcacatttttgtagttagcgacatggtaagcaaaattggaatttatgggtattatattatttattttaccctcagttgtgctctaggatctattgctcacatttgtattgaaaaaccaatagctcggcatttgagacgttttttttga

SEQ ID NO: 315639 - DNA, 2583 bp, Proteus mirabilis
atgtctacaattccaacacaaaatccagttccaagtgaagcaccgcgcgacctgaaatataactcaggcaaagttgacgagttcgttacgtcaaataatcatttttacactgaccgctttggtaaaaaacattatactatagatggtattaattttttatcaaaacaggcaatgcttaactatggctatatcacgaagaggtcttttgaatcgggtaataccatcatcaatcctaacgatgttcttctctgggaagacaatggcgaatactacagatgggatggcgaactccccaaagtagttagtgctggctcaactccagagtcagcgggaggaattggagcgggggggtgggtttcaattggtgatgcagcccttaggggggagattagccaatcaacaaaaaactacaacacatttatagatgctgttaattctaacacagattctattataaaaagtatatttattgcgggtagaatatctccaaacgatggtggctgtggtctatatactaaaaccggcacaggtacaccaggagatacagatgatggtagtttttttgtaacccaaaatggtgttaggtttgatttagtatcagatgcaactatagctacatttggtggtgtcgatggtggaagttttcgttctgcgttggataggctaaaaacttatgttagtaacagagatagagttttaaaaataaaatcaaatcacgaaattttgatgaatttttctcctgaaattccctctgggtattttaatggatttactcttgatgttgatgaaaacgtgacgatagctactgctagtgatgaagcagttaagtcgccattggtaaatttggttagaccggtaaagtttttcttcacgggaaataatactagttatttgttgcgccctactgttgggataactaatggggaatataaacctctaatttcaggaacaccgcctaaaccaccacaaataactaatgcaaactatactgataataaatcattatttatcaatatccctgaaaaagagaactatgtttacacatcttttttaaatgattgggaattcttatctagctcttggcctatgggggtgtttgatactgtttctccagcctcaatcttagaagattcattgtcaatacctgcgccgacagaaaaatttgtatgtgcctcattcagtaaaataaagccgagtgcagaatattttgtatctatgtacgctggagataatactaatggtatctctgctattactgttgaggcggaagataaacggtggatttactacgagaatcactttggggaggggtattttattgagggaaccgtcggtggttcattcaaagaaaaaaaagtttcatatttaggaggttccacgcatgggtcacaatggattaaaaactccatcacctctgtgagaattgatactctcaaatcatttacaatccttgtaaatggtattgaacgtattgctgttagggagacagagggcattattggcagaataggattcggatcttatggtgcggataataattatatgtctttattctacccgtatatcatagaaaacaggcagtaccgttccgcaaaaccaattaatattgccattgttggtgattcaatcacagatgcatcaataggaaatggatgggctcaattcgcacaacaggcgttggagggtactcatggaattagggtcggacggatggaaaccattgctattagtggatatgcatcaaatgatattataggcgtgtttaatgcaacaaatctgtctgatattgatgtggttttatttcaaataggcgttaacgacatccaaaggcaatcaggtagggaattgctacgtgataatgtaagacaaatgatggtaaaagccaacgacctcggaatcccgtgcatagtttctcttccaactcaattttataccagagatcaaagtgtaacgttaacaggagtacaggggtatgggcaaccatcagctaattatgagaagggcgccatatacagggcaatacttgcaaatgacgttactcgtcttaattttgagatcggtcagccactaaatgcaataaatacaggttctcttgatgatatggggccagttgttgctgaatatttaatgacaaatcaagatcccatggttatggataatattcaccctacatcatacggcagaatgttattgggtttgtctaatgctagagctatagcatcgcatatgtttggtaaaagaaccgatcctgttattaataatcaaatgcctgaatcatggggaaaaaatagctggtctgtaaatttggcaactagtgcgtcagtgacatcataccctgatggtaaaatagctctaagtggagttatatccaatactggctcaggaattacagaaaatggcaccatagtttgccatctgccgctaagcatctctccaaccaagagaatggtatttgcagtagcaaaagtagatgaaaaaggcaaccctatagggcaaggtaacattgttatagataataatggtgaaattaagatttatggtttctcgactggaaatatctgtcttgatggtgtaatttattag

SEQ ID NO: 315640 - DNA, 264 bp, Proteus mirabilis
gtgaataaagaggattattcattattattggataatgataaaaaaacagtagagcaagtagtacgctgtaaaaggttacttgaaaagattaatcaacaatttaatgctaaagagtatcgaaaagagttaatacaaaaaaatgaatttaagaaaagactattagaaagaaaggtattagtaacagatttctcatcatttttaataaagttaagtgcaagatggtatttcttagtaagaaaaataactaaaaaagctaagaaataa

SEQ ID NO: 315641 - DNA, 513 bp, Proteus mirabilis
atgagcaaatcattagttttcaaaggtaatgaaattactccatttgataatggtgataataagatttggtttaccagctctcagatggctaagctactcgaatacaaaaatgagaagtcagtaaccaatctatataacgccaacaaagacgagttttctgatgatatgacaatggtcactgaaacaatgaccaatggaataaacaacaacttacgtaagaaaaaggtcaggatcttctctgttagaggtgcacatctaatcggaatgttagctaatacagatgtagcgaaatccttgcgtcgatggttacttgatctagctgaaaaagagtcaaaaccacaaacagggttagcaaaccttgacatgaatgagcttaaaaccctgactatcaatgagatgcaaaatagattagtagcagccgataactggtcgttcgagaactttggcaggaaaggtagtgacttaatgaatttacgcaagcgaagaaggcaattaaagaactatcacaattaa

SEQ ID NO: 315642 - DNA, 177 bp, Proteus mirabilis
atgagccagcaggaaaataaatataccaagaaggttgatcactcatttactcagtctggtgtgtatatcccagcagggactattgaccatagcatgcgaactcctgcatactaccctacagatattgtatttgtctctgagcgaaaaattcctggacaacacaaaccaaaaaaatga

SEQ ID NO: 315643 - DNA, 561 bp, Proteus mirabilis
  misc_feature (531)..(540): n is a, c, g, or t
atgagtagcagccaaacgctggttgttaaattagggacaagtgtactgactggtggttcacgacgtctggatcagtctcatattgtagagctggttcgccaatgtgcaaaacaacacgaaaaagggcaccggataattattgtcacgtcgggagcaatagcggcagggcgtgaatatttaaactaccccgatttgcccgcaacaatagcatctaaacaactgttagccgctgtggggcaaagtgctttaattcaggtatggaaacagctatttgctatttatggtattcatattgggcaaatgttattaactcgcgcggatatagaagatagagaacgttttttgaatgcgcgtgatacactgcatgcattattagataacaagattattcctgttatcaatgaaaacgatgccgttgctactgcagaaataaaagtaggggataacgacaatctttcggcattagctgccattttaggtggcgctgataaactcctgttgcttactgatatcgaaggtctatatacggcnnnnnnnnnnatatacggccgatcctcgtag

SEQ ID NO: 315644 - DNA, 1479 bp, Proteus mirabilis
atgtcactaaatgcagaagctcaagagcaacaagcccccgcatctacaggctctttacttgatgaaattatggctcaatcacgtatgtctccagaaacagaagcatacgatattgccaaacaaggtgttgctgcttttattagtaatattttcgccagtgaatctgaagaccaacagatcaatcgattattaatcgataaaatgcttgttgaacttgataataaactaagtactcaagttgacgaaattcttcacgcgcctaaatttcaagaaattgaagcttcatggcgttctttaaaattactcgttgatcgcactgattttagagaaaatattaagatcaatattcttcatgcaactaaagaagagttattagaagattttgaattttctccagaaattgttcaatcaggcttctatcaacacgtctactcttcaggatacggccaatttggtggtgaacctgttgcaacagttattggtaactacgcctttaacaatactgcgccagatatgaagttaatgcagtatgttagtactgttggtgcaatggctcacgcgccattcctatcatctgtttcacctaatttctttggtattaatagctacgctgaactgccggcaattaaagatctaaaatctgtttttgaaggccctgcacacactaaatggcgctcactgcgtgaagcagaagattcccgttatttagggttaacagcaccgcgtttcttattacgtttgccatactctccaacagaaaaccctgtaaaaatgtttaactattcagaaaatgttaaacaagaccatgagcactatttatggggtaataccgcattcttattagcaagctgtattaatgatagttttgcaaaatatcgttggtgtccaaacattattggcccacaaagtggcggtacagttaatgatcttcctgtgcatatttttgaagcgatgggtgaattacaaactaagatcccaactgaagttttagttaccgatcgtagagaatttgaactagcagaggaaggctttatcacgctgaccatgcgtaaaggcagtgataatgctgcattcttctcagcaaactcggttcaaaaaccaaaagtcttcccaaatactcctgaaggcaaattggcagagactaactataagttaggaactcaattgccatacatgtttattatcaatcgcttagctcattatataaaagtattgcaacgtgaacagattggctcatggaaagagcgtcaagatctggagcgtgaactcaatatttggcttaagcaatatgtcgcagatcaagaaaacccaccagcagatgttcgtagtaaacgtccattgcgttcagctgaaatcaaagtacttgatgttgatggcgatccaggttggtaccaagtcgctattcaagttcgcccacattttaaatatatgggtgcaaactttgaattatcacttgttggtcgtcttgataaagagtaa

SEQ ID NO: 315645 - DNA, 213 bp, Proteus mirabilis
gtgactaaagcccctagtcaaaaagcatcatttaagccttctaaaaaagtattagcaaaacgcaaagcgaaaaaagtagaagagaaaaaaaacgttaaagagaaagtacgcgcacgcgatcgtaaaaatattggtaaacgccgtaaaaccgctactgataaaaccaccatcactgcggaaaaaaccaatcatataaaaacagagcaacaataa

SEQ ID NO: 315646 - DNA, 345 bp, Proteus mirabilis
ttggacactcctccagacgcttttcaacgctatattgctgctagcccatctctttggtggggaaaaggtgagtggatcactcaagataaatggcaacagatccccaataatgttgcggtgaccattacattaggtgaattagaagaaacccctgatttttctcaaatgagcgaagagcaacgcttgcgctatcaaacgcgtagtagctggcttactcctcgacaactctgtgattatcttactgatgccggcaaaacatgccaattttacctctttacgggtaaaggacatggcagttcaatccctgatgcaatcaaaatcgctttagaacaaagtacagaataa

SEQ ID NO: 315647 - DNA, 672 bp, Proteus mirabilis
atgattaaacaaaataaaatattaacacttcatgagttatttaaattttgtgaagcgaacggtgtttttcgattagtcaaagtcgaagaaaacgactcatttgttaaaattattatctgtggcgtttatcaaattaggcttaataaaaaaacacaaaaagtcacattgcatacgtggttttttacaaacttagagtcaggcgagtggcgagttagaaaatcattacctaaccgaatcccttgtttttggaaaaatgaaaatatatataatatacaatattggttacaaagtgcagtaacccatgttattgactcaatagtgaaatcaaattactcgatcagtggtatatgttatatgtataaatcattttatggagggattgaaacgaaaatacttcttgaagatatacaaccagattttgatacgactagtgaaatgtttgaggaaaaaacctttttttatcctcattatttagcgggtatgagtatgagtaaaatgcgtcatgatatttgcataaaaattatgactagaataaatgcatttattaataatgaaacccaaaaatatgcaagcatgagtttatccaaaaatatatggaaagttattgataaggggtattttctttatacggaaaagcacattttaattccttcgtacgtaattcaatattag

SEQ ID NO: 315648 - DNA, 498 bp, Proteus mirabilis
atgcataatgaattatgggcgttattgcgcccttatcgccctttgttaataggtgccttgttgctacaagctgtcgctggttttagttctttagtaccttggttagctctttatcaacttcttctttctttcccttttaataatacgttatggttaaccattgctgttattggtggcgtggtatggcttatctcacaaaccattgcatttcatttgacgcatttaatggatgctaaattaacctatcaattacggttagcattatcagaaaaaatgcagagattaccgctcaattggtttattagccaagggaaaaacggtgttagccaatatgttcaacatgatattaaagcattacatcaattaattgcgcatgcacctgctgatattgtgcaatttatcgttgtacctgttattgcgatcattgtgttatctatattaaatttttcattaactttttgcttttattcctcttatcattgcttatttttgttttaa

SEQ ID NO: 315649 - DNA, 351 bp, Proteus mirabilis
atggcgaataaaaccattctgaaatgggcggggtcaaaagtccgtatcatggataaattaattccacatttgccaaaagcaaagcgcttagttgaaccgtttgcgggttcttgtgctgttatgatgaatacagaatataacgaatatttaattgcagatgccaatcaggatttaattagtttatatcgtaatgtcgtagaacatactgaaataatggcgcgtaaagagttctatgcgtgggaagaaaacaatcataaaaatgattacattgctattagaaagttatttaattcaattaagatattagagagtgtgatcaatatatacaatctgctcggtttttatatttaa

SEQ ID NO: 315650 - DNA, 1392 bp, Proteus mirabilis
gtgattgcagcgatcacctcatgtaccaatacctctaaccctaatgttttaatggccgcaggtctactggctaaaaatgcggtagaaaaaggcctacagcgtaagccatgggtcaaatcgtcactagcccccggctctaaagtggtgactgactacttagcactggcgggattaacaccttatttagataaacttggttttaatttggttggttatggttgtaccacatgtattggtaactcagggcctttattagccccgattgaagaggcgattaaagataatgatttaactatagccgctgtattatcgggtaatcgtaactttgaaggtcgtatccatcctttagtgaaaaccaactggcttgcttctcctcctttagtcgtggcttatgcgctatctggtaatatgaatattgatttgaccaaagagccattaggtgaagataagcagggcaatccggtctatttaaaagatatttggcctgacagtaaagccattgccgatgcggtggaaaaagtaaaaacgcagatgttccataaagagtattctgcggtatttgatggtgatgaaacttggcaatcactaaaaatacaagataccccggtgtatgcttggcaacctgattctacctatattcgccatcctcctttttttgaaggtatgacaaaaacaccagaggcgattaaagatattcaccaagccagtattttagccatattaggtgactcggtgaccaccgatcatatttcacctgcagggaatattaaagctgatagtcctgcagggcgttatcttcgagagcatggtgttgaaccaaaagactttaactcttacggttcaagacgtggtaatcacgaagttatgatgcgaggaacttttgcaaatatccgtattcgtaatgaaatggtgccggggatcgaagggggctttacaaaacatattccaacgggagaaacgttagccatttatgatgcggcgatgcgttatcagcaagaaaatacgcctttagccattattgccggtaatgaatatggatcaggctctagccgtgactgggccgccaaaggtacacgattattaggtgtgcgagtggtgatagccggatcgtttgaacgtattcaccgttctaatttgattggtatgggagtattacctttagaatttcctaacggtgtatcacgccagactttagggctcaaaggtgatgaaaaaattgagataacggggcttaattcgctaacaccgggtcaagatgtcgctgtcaatattacttttgcagatggtcgccaagaaactattatggctcgttgtcgtattgatacgcaaactgagctggcttattttgaacatggcgggatcttgcattatgttattcgtaatatgttgtaa

SEQ ID NO: 315651 - DNA, 1284 bp, Proteus mirabilis
  misc_feature (1229)..(1238): n is a, c, g, or t
atgtcgttacgtctgaaaaaggagagtctttctacgctctctgtaggtactcatcaatatgagtattaccgtctttctgaagttgctcgtcaattaggggatatcactcgtctccctaaatcgttaaaggttctgctagaaaatttagtccgctatcttgatgatgatacggttgttgaagatgatattaaggcattggtggattggcaaaaaaatgcccacgcctcccgtgaaattgcctatcgcccagcaagagtattaatgcaagattttacgggtgtacctgccgttgttgatttagccgctatgcgtgaagccgtaaaatctttggggggaaatgtagaaaaagttaatccactttctcctgttgacttggttatcgaccattcggtgatggttgataaatatgccagtgatgatgcttttgagaaaaacgttgaaattgaaatgcagcgtaactatgagcgttatctctttttacgttgggggcaacagtcgtttgaacgttttcgtgtagtacctcctggaacgggcatttgccatcaggttaacttagaatatttaggtaaagcgatatggtctgagcaacaaaatggccgacatattgcttaccctgatactttggttggaaccgattcacatactactatgatcaatggtctgggagtattgggttggggcgttggtggcattgaggcggaagctgcgatgttaggccaaccgatttcaatgctgatccctgatgtggtaggttttaaattaacaggtaaactacgtgaggggatcacagcgactgacctagtattaaccgtaacgcaaatgttacgtcaacatggtgtggtagggaaatttgttgagttttatggtgatggactagcttctttgcctcttgctgaccgagcgacgattgccaatatgtcacctgaatatggtgcaacctgtggcttctttcctattgacgaaattacattagattatttacgccttactgggcgtgaagagcaagaaattgcattagttgaagcctatagtaaagagcaaggcttatggcgtcatgctggtgatgaacctattttcacctcaaccttatcgttagatatgggcactgtggaagcaagtcttgctggccctaaacgaccacaagatagagttaacttgctgaatgtaccaaaagcatttaaagctgctgtagagcttgaaacaaataaaaaacctcttgctcaatatcnnnnnnnnnncaatatcctcaggtcactattgataatcagcctccttttaccttaa

SEQ ID NO: 315652 - DNA, 1290 bp, Proteus mirabilis
gtgacggcttctgactttgtttatagttggcaaagattagttgatccaaaaaatctttctccttttgcttggtatgcagccctagcttctattgagaatgcccaaaaaattattgatggtaaattaaaaccaacctcgttaggtgtggaagccattgatgaaaaaacgttaaaagttaccttagaacgacctgttccttatttccctagtttagcaaccaatttttcactttatcctgtacctaaacacacaatcgaaaaatacggttcagaatggatcaaagtaggtaatttagtcggtaatggggcttttatactaaaagatcgcgttgtgaatgagaaaattgtgttaacgccaaacccttactattgggatcaccacaatacggtgttaaccaaagtcacttttgtgcctattaatcatgaatcacaagcgactaaacgttatttagctggggatattgatattacagagtcttttcctaaacacttatatcacaaattgatgaaagagattcctgatcaagtgtatatccctgagcagttaggtacttattattatgcatttaatacacaagcagggcctaccaaagatattcgggttcgcaaagcgttagctatggcaattgatagaaaaattattactgacaaagtccttggtactggagaaaaatcagcgaatcgctttactcctgatgtgacggctaattttacgcctgagccaacgctatatgatgaatacagtcaggatgaattagatagccaagccaaaatattgttatcagcagccggctatggccctcataatcctttaactctctctttgctttataataattcagaaaatcatcaaaagatcgccattgctgtcgcttctatgtggaagaaaaagttaggcgtaaaggtaaacttacgcaatcaagagtggaaaacttatattgatagtcgtaattcgggtgattttgatgtgataagagcgtcatggataggcgattacaatgaaccctccacatttttatctttattaggctctaagcatgctggaaatatcccaaaatatcagagccagcaatatgatgagattttagtccaagccaatatgacgacagatgaagaggaaagaaatcgtctctataatcgtgcagaacaggttattgcggaagaggcgcctattgcccctatctatcagtatactaatggtcgtctaatcaaaccttggctaaaaggttatcccattgagaatcctgaagatgtcgcttatagccatatgctgtatgttataaagcattaa

SEQ ID NO: 315653 - DNA, 375 bp, Proteus mirabilis
  misc_feature (286)..(295): n is a, c, g, or t
atgcgcaaaatattcgttatatcatgtgcacttgtcgttcaaggattgctcatatcacaggctaatgcggcagtggtgccatcaggaacgatactcgacaaaaaacaggaagtagtgcgacatttaaaagatgaacccgcatcacttgatcccattaatgccgtaggtttaacggaggctcaagttcaacgagacttatttgaaggattagtgatagaagatgagcgagggcgtcccattcctggagtggcacaatcatggcgagcagaagataaccggggttggnnnnnnnnnnatcatggcgaacagaagataaccgggtttggatttttacattacgtgataatgctaaatggtcaaatggcgaaaaggtga

SEQ ID NO: 315654 - DNA, 531 bp, Proteus mirabilis
atgaattataatttaccaagcccagaggaaatgattaaacaattaggtgatttaattaataaaaggaatgaaaaagagagattgggagattttttcaataatgattatttttctgagatcagaaaatgtataaacaatgaagtttctgaaataaaaaacatggaggttaaaaggtcaataaaaggtgcatatttaagcgcttgtataaaaagatacaaaaggaacatagtaaaagactacatacttaaaatagcgattattgaggggttagacctgactcagaggatagcagatctattttttattgaatgcctaggaagaagtgtgggagagttctttctcaatgagcatttttctggattgcaatataaagaaaataaattaactaaaataaaaagaacgagtgaaaatattgtattaaatccagtaaaaaaagaagaagtaaaaggaattatagcaaaatataaaaatcaaattatcgactcagtagaaaaaataaaatgttatttttacgaagctaagctttcttga

SEQ ID NO: 315655 - DNA, 522 bp, Proteus mirabilis
atgtctaagtttaaatgttcagtattagctttaacggtattagctttgtctggttgtggtgagaaaagcgatatagagaacgcgataaataaaaacatagaaaataaggagtattgttatagcctacaagataatgatatttcatttcctatcacaataggacgagataacttttctcaagatttttcacctattttaaaaggattagctaatcaagggttagtaactttacataatcaaggttatagggattatgttataagcttaaccgaaaagggggctaaaacagatttttgggataaaaaacgtggtgtgtgtatggggaaacgggttgttgacgatataaaagagtggactgaaggtgagcaaaatacaatcatggtcacatatacagagaaattagttgatgttcctcgttgggtagataaaaagtctttctctgatattgaaggaatggatagccctgcagagaaacgtgctgttttaaaaaaaacaagtaatggttggaaagtttggaattaa

SEQ ID NO: 315656 - DNA, 312 bp, Proteus mirabilis
atggctgagtgtccattttgtaaatcagaggttcatgatgaagcttcgatatgtcgaagctgtggagctgagaaagttgactcattcggggggcactttaataaagcatttaaagagactcaacatggagtagcgccattaggttttgtaggattgcttattggggggcttttggggctttcagtcggcatgaattcaaatggtgttctaggttttattgtattcatacttattcttttattttttataacgctccctgctttattaagaacactactttttagaagaaataagacaatttggtatagataa

SEQ ID NO: 315657 - DNA, 1401 bp, Proteus mirabilis
atgtcaaattcagcaacacaaaagcaaaaaacaccagataacgatgaatatacagacgctcagggtcgttgggagtcatgtaagccaccttacacaagtacacacataagaatctgtgttactgccgtcaaaaccattttaaagcatatcaataagccacgtcgctctaaatatgaaaaagagcactacttgcgtattgattttagtaaggcgggtaaggttaccatatacgcggaatatcctaaacacatggatataaaaggtcagaaattaggggaatggccagaactatcattaccgatagcaagagagaaagcgaaggcattagctgaagaagggctaagtgctgaatctgttcatcagctattagatctttatgaaaaagatttagcaggaaaagtcgaacgttcaaagttaagtgaaaatagtttttatacttatcgttgcagagtaaagcaactgaagctgacgttcggatcgcgtgaagtttttagtgatgtgaaatactcacgattagtggaaatattggataattggatccaaacaaaatcaaataatcatgcattagagttatttgctgagatgcgccgattttggaagtatgcatcacccatttattctaatggaagaaatattgcatcgagcattcctgatgattatgtgtcatcacgggtgcagaaacccatgccaacgaaacgatatactgatattgagtccatagccactttatggatgaacgttgcttcaagcacctctgtgcatcaaaaaaatgcagttagatatatgatcctcactggagttagaccaatcaatgttgtcaatttgaagtgggaatatgttgatttagataacttagaaataacttatccagctggtttaattggtatgcgtggtgcaatgaaaactcaaaaagagtttagaatgccaattacaaaggcaatgaaaagcttactcgaggaacaattagcttggaaaaattccactgttaattgcaataaagaatatgttttcctacaacctagagatccacaattagcgttttctaaacgctcacttgataaactagttaaaacatatagccctgaaggagctgtcaaaggggttgttcatgaaggaaccgtgaaaggaaaatcgggtgcttttaatactatgtgccgtaagttttttaaaagtaatataattgcacaaatgcgtcaaaaaggcttttcacgttctgatactaaagaaattagcatgctatgtttacatcactctgataaaagtgaagatccaatggctgaacattatgacttttctgatgagatactgcaggaagagatagcgctaaagcgtcaagcatttgaggctcatgaaaatagtatcttgactcaagtagcgctattacgtcgtaaacttagttaa

SEQ ID NO: 315658 - DNA, 312 bp, Proteus mirabilis
atggccggtttctcttcacagatttggtctatcggtgatttacagcttaatccctcgaatcatcaagtcactttaaatggtgaactattgttattatcaggtaaagagtaccagttattatatgagctgatgcgcaatacagataatgtagtacgtaaatctgatttagaacaacgcttatttggcttagatgacaaaattgaaagtaactcacttgaagttcatatgcacaacttacgccgtaaaataggcaaagagcgtattattacggttcgcggtatcggttatctcttaaaaaaagaagtgaactaa

SEQ ID NO: 315659 - DNA, 495 bp, Proteus mirabilis
atgaaatcattatcaatcatattcatatcattatttacgttaaatggctgtgcatattactctcaccagttcgggttaggtgaccattccgctttttgttctaatatagaaaatgatagagatcgacataacgaaaaatattacattagtggctctcaatttttctatatcacaaagaacggtgattactactctgaaaaagagttcaaccaattgacctctccaacactgatcaatgtttcctatggtgggctatctgctaaagagctaaaagacacagccaaaaaagccttcactgttaaattcacaaatacgaatacaaacaaaaatatttgttcttcaacactagttagctctgattcttatgaaaaaaactatatggattctatcttaggtagaaaacttcttatttcaagcgagaaaggcaagggagcttctggaaaagagatttatcgagatgaaggcaaaaaaagcctttcaattcaatatctttaa

SEQ ID NO: 315660 - DNA, 591 bp, Proteus mirabilis
atgggtagaatttttatttattgtagatgttcaaaggtagaacaagatacagaaaaccaagttatggcaatacgtaattggagagcagaatttaaagatattccagattatagggttgtgaatgagactattagtggtggcgttcctgcaatgcaacgtccccattttgctaacttggttaacaataagctggaagcgggtgactcgttagttgttttgaaattagatcgcttaggaagagataatatcgatattcaaaaaacgataagcttattaagtgagaaagaaataaacctaatttgtctcgatttaccaatagccgatctcatgtctgcagaaggtaaattaatgatgcaactttttgcctcttttgctgaatttgaaaaatctcggattatcgagagaacacatgaaggattaagaaaagccaaagcgaaaggcgtcacactggggagacctaaagggtcaagcattcataaagaagctatacaaatagccaaagaagcaggtttaagccaaagcaaagtagcaaagcatttaggtattggtatagcaacagtaaaaagacactggaacgctaataaaatttaa

SEQ ID NO: 315661 - DNA, 216 bp, Proteus mirabilis; identical to SEQ ID NO: 315458

SEQ ID NO: 315662 - DNA, 339 bp, Proteus mirabilis
  misc_feature (324)..(333): n is a, c, g, or t
atgataatgaaattaaaagatcttaatactaatcataaacgcccactaacaggaaaagaatatctaacatcactacttgatgatcgccaaatttacatttgtggtgaaagaattaaagatattactattcaccctgcttttcggaattctattgcttcaatagctcaattgtacgacgcacttcattcttcagaaaatcatgatattctctgctgggatacagatactaataatggaggttatactcacaaattcttccgttttgctaccagttcagatgagatccgtcaacaaagagatgccattgcagaatggtctcgctannnnnnnnnnctatag

SEQ ID NO: 315663 - DNA, 306 bp, Proteus mirabilis
atgaatacattgaattacatcatcagtaaaaaaataaagcaaaaaagaaaagaattagggatgacaggcattgaaatagcccattcattggaaataagtcaacagcactattcacgtatagagaatggacataccaaaataacagtagaacatttattctctatcgcgtttattttaggtgtcaaacctaaagaactattgcctaattataaattttcaaatgaaaaagaaatgattaaagcaaaacaatcattatcagcagaaagcattatgccaataaagaaaagcgacatgtatcccacataa

SEQ ID NO: 315664 - DNA, 231 bp, Proteus mirabilis
gtgagtaatcaagacagcacacaacaaaagaatatttatcgtcctgcaccacctcgtttggtgcaagtaaaacgtatagtagatatcacgccgggcatgcgctctattacctttactagcgatgacttggacaattatccaagtcacacagggggtgcccatttaaaaatatttttacctgtagaaggtcaaactaaacttacagtgtgcgagctattcgtcctgaattaa

SEQ ID NO: 315665 - DNA, 411 bp, Proteus mirabilis
atgaaaggtgacggctctgatgttgttcagggctatatgttatttacatcatggtctatggagtttccaacaaaagaaatctctacctattcaggtgagctgaaagttgctgatgcagaaacggttgaatggctacaagaagaaatcgttgttgaaagtatcgcagtcgagccagccaccctgtctgtaaaagtgggtgaaactaagacatttgccgtcaaatttaccccaactgatgcaactaacaaaaactacaccgctgtaagtgataagccgaactttgcaacagttactcagcttgtgaatgtagtcactgtgcgcggcgttgccgaaggtactgcaaatatcactgttacatccgaagatggtaataaaactgcaaaatgcgtggtcaatgttaccgctgcttaa

SEQ ID NO: 315666 - DNA, 1104 bp, Proteus mirabilis
atgagtagcagccaaacgctggttgttaaattagggacaagtgtactgactggtggttcacgacgtctggatcagtctcatattgtagagctggttcgccaatgtgcaaaacaacacgaaaaagggcaccggataattattgtcacgtcgggagcaatagcggcagggcgtgaatatttaaactaccccgatttgcccgcaacaatagcatctaaacaactgttagccgctgtggggcaaagtgctttaattcaggtatggaagcagctatttgctatttatggtattcatattgggcaaatgttattaactcgcgcggatatagaagatagagaacgttttttgaatgcgcgtgatacactgcatgcattattagataacaagattattcctgttatcaatgaaaacgatgccgttgctactgcagaaataaaagtaggggataacgacaatctttcggcattagctgccattttaggtggcgctgataaactcctgttacttactgatatcgaaggtctatatacggccgatcctcgtagcaatccggatgcgaagcttattcctgaagtttttgatatcaacgatgaattacgtcaaatggccggtgatagtgtctctggtttaggtactggaggtatggcaactaagttacaagcggccactgttgcagggcgtgctggtattgacgttgttattgccgccggtgttaagcctgatgttatcagtaaagttattgataatgaacctgtcggaacactctttcatggtttaaaaagcccccttgaaacgcgtaaacgatggatttttggtgctccagtcgcaggggttatcattgttgataatggggctgaaaaggcgattaaagagcaaggtagttctcttttacctaaaggtattaaagaaattaaaggtgacttttctcgagggtgtgttatccgcattcaaagtttgcaaggaaaagatcttgctcatggtgtcgcgcattataatagtgatgcgctacgcttaattgcggggcaccattcgcaagagattagtcaaattttaggttatgagtatggcagtgttgcggttcaccgtgatgatatgattgtgagctag

SEQ ID NO: 315667 - DNA, 264 bp, Proteus mirabilis
  misc_feature (166)..(175): n is a, c, g, or t
atgtattatggttttgatatgggcggcacaaaaatcgagctcgccgtttttgataaagatctgactcaagtatggcaaaaacgtgtaccaacgccaaagaatgattatcaagctctattaaatgtttttaaaacactcactttagaagctgataatgatttaggcnnnnnnnnnnaaaggaaaaataggtatcggtgttcctggcatcgtcaacgcaaaagaaggaactgtatttaccaccaacgtgcctgctgccaaatataa

SEQ ID NO: 315668 - DNA, 651 bp, Proteus mirabilis
atgatccacgatctggctaatattcttgaacgccccgtcaaagttgagaatgatgctaactgttttgccttatcagaagcatgggatcttgaatttcgtcattatccttcagtactgggtttaatattaggtacgggtgttggcggtggttttgtcattgatggcaaagtactctctggtaaaaatggtattgccggtgaaataggtcacatgaatcttaatgtagatgctgataatgtgattggtgagaccatgccaaaaatattgtgtggttgtggtagaaaagcctgctttgagacttatttatctggtcgtggttttgaacgtatgtataaagcctttaatggctcaccacaaagagcggtagatatcgttgcacaatattatcaaggtgatgaacagacccaacagcatgttgaccgctatatgaaagtattagccatttaccttagtaatattctgactgtacttgacccacatttaattgttattggtggcggtttatcacaatttgacgcactgtataccttattaccggattatctctcacattgtgtatacggtaatacacaaattccaacaatagaaaaagcacgttatggtgatgcgggtggagcaagaggagctgcctgcttaaatttattagactga

SEQ ID NO: 315669 - DNA, 549 bp, Proteus mirabilis; identical to SEQ ID NO: 310633

SEQ ID NO: 315670 - DNA, 303 bp, Proteus mirabilis
  misc_feature (265)..(274): n is a, c, g, or t
atgattgatatgccatatgtaggccctaatatcatgagttctgccgcatgtatggataaagatatcactaagcgcttactggatgatgcaggattagcggttgcaccatttattacactgatggctcaccaattaaatgatatttcctataatgaagttgttgaacaattagggcttcctttatttattaaaccagcaaatttaggttcttctgttggtatcagcaaagtcaataatgaagccgagtttaatgctgcattatccnnnnnnnnnncatggcatttgaatatgaccttaaagtga

SEQ ID NO: 315671 - DNA, 198 bp, Proteus mirabilis
atgaaaggaaaacagtatcaatgccatgactgcggagatgaaacaaaaataatccaatcttatgatcagacgtcaaatacatacggtttcataattcaatgccttaattgtggatatgaggctggtctattcgacaccattgaagatgcgaagatggtaattaagtgtaactcgcagggatgcaatgaagaggaatga

SEQ ID NO: 315672 - DNA, 141 bp, Proteus mirabilis
atggcaagaacgttagagcagattctagagcaggagaaaccagatgttgttcagcaagctaatgaaaaggcaaaggaaattataaaagatattgatgagaaggctgaggcgtcagccgctaaggagcaatccgacggctga

SEQ ID NO: 315673 - DNA, 423 bp, Proteus mirabilis
atggcatatcatttacatcttgattttgaaaaaaaagagtatttttattccgagcaagcttggtcaactcaagagacaatccaaggccttcttcttcctatatcagcgcacccttgcgcagaggatgaagaagttttgagtgctattgaggatgttaagcctctaattgttcaagtgctgagtaaggttgagattgagtggcacgactggatgacacaaaagccgacaattatttatcaggacggcgttaagcctatgatttctaaattgcagaaggagttttttatcaattcgttctgggcttattttaatggtaagaaacgtaccgctcaggcagaactgaaccttgaggaggcattttctactgagctggagcagcttgaacatgagggcgcctttatttttaaaggtgtagataattaa

SEQ ID NO: 315674 - DNA, 2112 bp, Proteus mirabilis
atgaagaaaaaactttcacatgtgaaagtttttgtgcccacagtcttgttggccgcagctttcacactcacatcttcaccaactcgtgcggatgactacctgatgaagtttgtcgtgaacggacaaaacaagggggaataccttgtttctcgtgaagtagatagcatcacggctgagccagggctatggcaagccgctggtgtaaacacaacagcatcacttcccttggaaaggctaaacaacattggtcatgccaaaattgtttggtcagaacaaaccatctacttttaccctcgtaacagcgtagccaaagccagaaaggtcaacccagaggttacaattgagccagatgtatccagtctcgatgtaaaatcctttgactactttctcacctatcaaagcaaaggtgatatttcggggagcatcacgggaacaggccgagtcggaaacctcgatgcagatattagagctggactaggagggcaagagtcatatttctccagccagtggcacgacgaggagaacagcaacgtcaaagacattgaagtcggtcgtgttcagcgctacgggctggatggtttctcactcacgaatgaaagtagccttgccactggatcattttctaatgaccaaattgagctttattggcctgttggaacaagggtagatgtataccgtgacgggacctatttacaatccttggttctggatagtgagccgttctcttacaaaatcgaactggattacagcaataatcaatataaatttgacgctgtattgcccgatggcacaacggacaccaaaacagtagaaagagccatttcgggacgacttgcacccgtaggagggctcaactatcaagtggctctaggcaagtctccaaccactgatgaaagcaagttaattggacgcttgagctacgggatgaccagtgaattgtcacttttcgctggtcaggatgagcaggaaagacagtatttttccgctttatattcaagtgataacttttcatttgagcctgcttggtatggcagtagtggatacgctctgagcggttcttggcaggatgacgatctttcgatctttggacaactaagtgatttagacaactatcaattacgttctgttagtgtttcatcacgctctctgtttcaaccaacgattcagtactcctcccgcacgcacgacggctatgaaactcaggaaacgacgctacgcacgtatcacagcacgcgcattgaggcactgaatacattaatttctttatctccatactattcgaatcgtttaaccaatggtgtcagatccaacatctttggagggcggatgcttgctagcatggcagaaggttggcaggttttggcgtcttatgagcgtgaaaataaagatcttgatggtattggagatatagaacgcttcagtggagaggtatcaaaacgattcagcttggggcggatcacctaccgctacacggcaagcaattttggtcatgggtgggaaggtcagcaacaaagcctacgttctgatctttggaactggaaatttgcaactgtgtcagcttcgttcaatcatttgtctggtgggggtaacaacattactttatcaatcagtggtagctttggccgcacgggattctcaagaacgcctcagcgaaatcaagctcagttggagctatcaacctgtgaagatttaaaccttaacggcatctgtgaaccatctgagccagaagttgaaggcattaaagcaacagtcgctgggcgggaagtagtaacaccagccatcattggttcactcacaccttatcaaagttacaccattcaggtaggtagcggctttaacttgtcccctcgttacaaagcagttgaatcaacaagattgattagaggcggagtaaataggttacgtttaccgttaactgaaattagagaagttgaaggccagcttgatcgagacggaattcgagtcgctctcgttgacgctgaaaagggagatgttctagcggaacaaaccactgagtttgggggatggtatctgttttatgcaccggctggacgcaaggtcaaggttgtggaagaacctgagttaaaaccggctaaaaactttcacatgtga

SEQ ID NO: 315675 - DNA, 372 bp, Proteus mirabilis
atgaagccctttactaattcaatcatgatggtgacgctagcagttcttctatcagcacccgcgactgcatttcaacttaaagcccatgacgtagagatcagtcgtaagtcaacgactgaaatcccagtatcaaataccctaaattcgccaataatagtgaaaatcaccccaccagatggggtacaagtatttccccgacgcttccaactgctgccaggagagcggcaagtagtaaaagcacgagagagagatgggaaagtcttatctcaaaatgcaaagatggcattttcctatgccgtacaaagcgaagaaaaacaaggcgttcactcaagaatcacgctgagactcccggtgagggaggtttctcgatga

SEQ ID NO: 315676 - DNA, 588 bp, Proteus mirabilis
atgcaaatttttaaatacgccaccctcactaccgttattttcctgtcgtccgctgccgcttttgctggtacagggacgggaacttctcaaatttcagcaacaccgccagctttgtctgtggtcgaagttcagccgtacacgatgacgttggaacgcctgcccggagccgccccaacaggcgggttctctttaaaaagttgggcgacttatctggcgcaaaatccggaggacacagtacagcccggctgcttaaaagtgacaggagatatggataaatcggtcgggattaccatcactaacctgtcaaatcccacagcgccgggtggagcaaccttaagcttctctggaacaccaaaaatcaacctaactacttcaactgttgactgcgcagatgcgatttccaaaacaagtacaggcgtcggtataaacgcggcaccagttacatcaactacttcatcttctggcgagctttatatcgcctggtcgtatcgccaacccgccacagcctcatcaggattcatgcagctcagtgcatgggaagaagggaccttttccggaacggtcgatatcaccgtcgattaccaataa

SEQ ID NO: 315677 - DNA, 567 bp, Proteus mirabilis
atgcaatccaacatcttcaaaccattaccatttttaccagctcgacatcatcttaaccgatgggcgtttggctattaccttgtaaaaaaagggttttctacttgcattgtcatggaggaaacatcctttacttataagcaaatcagaaaaataagagaagatttagccatcaaggagcgtcgccgagcgagttatgggcaggatatcctgtcaaaggaggattggataaagtactcggcggcaattaatgtttatgttgaacttagtgaaaaaatggctcacatggaagctgttataaaagcatgtgagtggttaagaagtgaaaaagactttgatatatctggcttttacaaagcatgtaaagaaataaaaagtggtgaggctttttttgttgaatgtgtacattgtcagagtgaagtttttagtgggcctggattgagagataaagttgtcagtaaatgctgtcctacttgtggaaagagtaattgggagcatcccaaagcagatcaccgtcatggacatattgttacccgccctaaatctggtgaccaacaaccgttgttttga

SEQ ID NO: 315678 - DNA, 126 bp, Proteus mirabilis; identical to SEQ ID NO: 284446

SEQ ID NO: 315679 - DNA, 234 bp, Proteus mirabilis; identical to SEQ ID NO: 284447

SEQ ID NO: 315680 - DNA, 858 bp, Proteus mirabilis; identical to SEQ ID NO: 284448

SEQ ID NO: 315681 - DNA, 720 bp, Proteus mirabilis
atggcactaaaatccattgcagaagttattgagcttgatcaacagaagcgtgtcgtttgctcggcaaaaaacgcaaggcctacacagtcttcttttcgtgaagtggaaagcaaaccagattctgatcaacttcaagctacggcaaggatcatcaatatcttatttgccgagctccagtcatgcttccccgcttggaaggcgacattcccgagcaaatctgacgttgacgcggcgaagaggacatggaccaagggcttgctggaagcaggtatcataactgaacaacaactccaatgtgggctccggaaggctcggcaagcagaatcaccattctggccgccgcttggacaattcgttaaatggtgtcagccagatcctgcggattacggcctaccaagcgtcaggcaagcatacatagaagcctgccgtaacgcgcatcgcctcgcagagatggcaaatgatgagtggagtcacgctgctgtgtacattgctttaaaaaatacagggacgtttgacatccgaaatcgcaaagaagcagaaacttggccgatttttgagcggaactatgaaattgctgtccggcgcgtccttgctggtgaagatcttaatgtagagatccccaaggcactgccgccacggcctgcaccacggccagtagaccctgaagtagccaaacagcatttagaacggctgaaaaagatgttgaagggcggtaagtag

SEQ ID NO: 315682 - DNA, 321 bp, Proteus mirabilis
atggaatggtactggtgggtaatattggtggttgtcggcttttttgttctgagttcctaccaggaaaaggctaggagagaacgccttattgaaaaatatggcgatgttgatcttgttgataggttaatgaaaaaaatgttttggcaaggtcaatctgaggagcagcttatagattcacttggcaaacctgtcgatatagatcaaagggttatgaaaacaaaggttaaagaagtttggaaatacaataagactggtaaaggtaggtatgctttgagaataaccttagaaaatggtgaggttattggttgggatcaaaagtag

SEQ ID NO: 315683 - DNA, 1305 bp, Proteus mirabilis
atgactgatgtgaatctaccggcggtgatgggcaacacacttcccgtcctggatcaacttacggatgcacttggcgttcctcgggacattcttgcttctggacaagaaattcaaacggcgtggaataatctcccaggagtaatgaataaaattcctccagcgctacgaacggaaggtctagctcgaatgtgcgtggcggttgctgcgggcttgttcgatagcgcgattaactatatttggaatacttccgttatcgagcttcgggagaaagtaaagcgcttcggcctcccggttgtagaacagctccttagcaagcaaaattttgatgagcaatccttgctagatttaaaagatgcagatttgcttaatctgtgccttaaactgaacctaataactgaagatgggtatttctttttagaccagtgccgagatataagaaataacttttctgctgcgcaccctgttgtcggaaaaattgatgaccatgagttcataggttttgctaatcgctgcgcaaagtacgcgctaggaaatgagcataatcctgttggcgttgacatatctgctttcatggccgctgtcaaaggaacaaagttttctgaagagcagaaaagccagtgggttcagagaatccagaagacgcatgaggcacagcaataccttctgttcggtacgttacatggaatctacagtgaccctgccagcgtcgaacagtctcgcgtcaatgctcttatgattgcatctgcctttgcccctcattttacccccaaggcaaaatcagacttaatcaatcgccatcatgactacattgctaaaggcgatgagaagcggcataaagcatcgcagcagttttttgagcggcttggaatgctttctctcttgggtgagcatgagttccattctcttatatcgaatgctgcaaaacggctgcttggagtgcaccaggcaatggacaatttttacaatgagcctccgtttgcagagcgattactacaacttacggaacagggagctataccagatacagtaaaggaagagcttgtaacggtcgtaataacttgcgctgctggaaaccgctatggtgtctctcacgcagccgcacctcactacactaagatcattcaaggattttcacctagcgaagtagagattatgcttggattgccaaataagaagcttctggtcagcgaacgtattaaggcacatcagagctgccgtaataggtttaaggggttggttggcttaatcgatccaagttctgttcccacaaaatcggcgtcagcatatgctaattggacgaaatag

SEQ ID NO: 315684 - DNA, 465 bp, Proteus mirabilis
atgaaattgatcactttaactactgcgctcgtcgctgtcggtatgctgactggttgtacaaccaaaagcattgattcaatcacgatgcaccactacttccttaatgcccgcgacctgttcgttattgacgaaaaaaacggaaatgtgtcatgcatcgtgtctcacgatactggcaactcggatcaatttaagaaagatcttggtgagattcgggagaccatttacaagtatcagtgtgactccatagtgattcatggccggtatcttaatcctgaagttaaatttcaatgggataatcgaggcaagagacctgtttgctcagtaacattaaaagctaaaaatgaaggtaaacatggtttatggccagatgaaccagcagccatcagtcggtcttatgaatcaatggcggagctcaatttaccaaactgtgattccattgatatccgatggcaggaggctaagtga

SEQ ID NO: 315685 - DNA, 393 bp, Proteus mirabilis
atgcgtaatcaatttagtcttagcaaccctcatacctgccagcattgctgtggtagcagctatctaaaaatactagagattgctgctgaatctagtaccgccgttgatgcaatcaataccatagcttctcagttggcatttttggcagcagagcgacgcgaatattctaccagaaaactagcggaactattttcttcaatcaccccgagcttagcgctcggggaccccatctcacagcaagaaaaatccgtgcttcgtccggatttttctccacaccccactcaccgcgagtggtctgtctcatccggcgcagtagcgccttctgaggggactccctgcacctctgtacacacagagttgcaagggagttacacgcaagagaatcagggataa

SEQ ID NO: 315686 - DNA, 357 bp, Proteus mirabilis
atgggagtttctaaggcgtatcgcgtacaaatatatccacctaggcaagtacatattttgttgaaggaattagctaaagaatcggggcaaacggttagtaaaacggcggtgtctttgatcgaacaggcgttaaataatgactcaacattgagcgaaatcagaaatgtacaagtggatcagaaggagatttatcagcagttaattaacctgctgtcgatcaacgtggcaaccacagattttctgctcaaaaagacctgctctgaggatgaaatggctgaggctaaacaggtcatttcagcgcgcacaaatgctttgcgagagtatttcattggaggtgctgaaaatggcaacgattag

SEQ ID NO: 315687 - DNA, 1977 bp, Proteus mirabilis
atggcaacgattagaaaaggtcgagtcggtgactttgttcgtggtgcggacacatggcttcatagccagcagatgttgttattcagcggaatttggatctttctgcctggtgttttgttggcgattgtcggtggcctgttatacctctggatagatgccgataaatgtgttttgcaaaacgctagtacatatctttgggcacaattgaaggcactagtacaaccattttcaagcgtaactgtaggaacctgtgttgccctagatgggcgagaatctctgccatcctctgtggtgataaatgaaccactattccaagacgctgctgttaagcttctcaaatcctttggatgggctttcagttcgctctttgtattgtacttgcctattggtgtttatcttgttgtgaaggcagttaagagaggtgaggagatcaaagaagacaaatatattcgaggtgcgaaacttgtttcagccgaaaaattgaaaggagaaatcgtagaaaagcatggtgtttctgatttaaccctcggcgatttccctttacccacaggattttcaaaaaagcatgccttgattagtggcaccaccggggcaggtaaatctacagcacttactcatttgcttaaagctattcgcgctcgtggagaccgagccgtggtgtatgacaagaaaggcgagttcgtagagatgttctatcgggacggaattgatcacatactcaatccggcagatagccgctcacaccaatggactccatgggaagaaatggcctcaccatttgatgcagactggatagctgagacacttttacctagttctaatagtaacagtggttctgataaattcttcacatccgcagccagagcagttgtttctgccgcacttcagaatttatatctagacggaccgaagtcattgctttcacttcttcgggcgacagcgtggaatgatcttgagttactcaaagaactagttgcaggtactccagcagcgacatatttcaatgaagataacgagagaactctcgaaagtattcgttcaaccatcgtagatggtgttcgtccacttcgcctgttgaaagaagagaataaaaaggggttcttttctataagagattggatagcagaaggcgatgaacctaatgccgatgatagttggttattcttaccagtacgtgaatctgaaatagaaatacagaaacctctcatctcaacgtggatacaagctgcggccaaagggttgatggcgcgtggggttaataacgagcgaactctttggattgttgtcgatgagctaccaagcctcaaaaaaattcctgctctttcaatgttgatggccgaagggcggggcttcggtgcggctgttgttttgggtattcaggaaataaaccagctagaggaagagttcgggaaaaacacctctaaaaccatacttggcttatgctccacgcagcttcatttccgtttgaataatgccgacactgcggaatgggtctccaaggtacttggtgaagctgagcgtgaggaagttgatgaagacttaaactactccgccgatgacattcgagacggcgttcgggtcagttctaaacgtcaaaaccgaaaaattgttcttcccagtgaaatcatggacctgcctgatttgtcttgttttgtcaaaatttggggtgtggagagtaaagcccgtattgatattcctttcttgaggcttccgaagatcgctgacggttttattcaaggtgatgagaatgagacggttggtatgcgcctgctcaatgccgcacgagccttaaaaatggaagctgatgttggctatgttccgaaagagctttccgatgagcgggacgttgatgagtctaataggccaataccaagcccaagtgacttagagcaggaactaaattcagtattgggaacggttggaatggatgatgatttggtatttggcctgcttgggaaaggaggcaaaaaatcatga

SEQ ID NO: 315688 - DNA, 3111 bp, Proteus mirabilis
atgatgtctgcgtcttctattaaaagtgccggagctgccggtcattactttgagcatgatgactactatgtagacgggctatctccttccgcatgggtaggctctggagctgaggctctcagtcttgttggtgaggtggagcgggaaacttttaaatcacttctggatgggcggctcccagacggtcaacaggttggcacttttcgtgacggcgagtggaaacaccaaccagggaccgacctcactttttcagcacctaagagtgtttctattctggcagaggtagcaggcgacaaacggcttctcgaagcccatgaccgggctgtccaagcggtacttcaatatatagagagcgaatatattgtcacaaggaatcgcaaccgtactcaggataccgttgaatacgagaaaacaggttcgctggtcgcagccactttcaaacacacaaccagtcgtgcccttgatcctcagcttcacacacactgcgtggtaatgaacttaacacagcgcaatgacggccagtggcgctcaacggagaataaaccaatcttcattgaccaaaagcaccttggtctggtctaccgtcaatttctcgctcaagaggttggttcactgggctttcgactagagcaccagggtaaagatgggacctgggagattgctggggtaagtaaagatactgtacgtgaactgtcgaaacgatcagaggcaatcagagatgcgctggaggctaggggaaagactcgtgaaacggccacggctggggaaaaggagaccgccacgctcgacacgcgggatcgaaaagtcgctgctgagcgtggtgaacttctgaatcgctggcatgcagaattgggcgaagagaagctgacagaattggaaggggtcatagctctgtctcgggagaataccccatccctggagcggcaatccgaggcgattttggcgcgggttcaattagccaacgaagccgtcatgtgggcgactgagcaccttggagaacgtgatacgtcttgggcacaccacgatctagtcaaagtggctagccgttatgccggatcgcgagtattactttctgatgtaacgaatgcaattgatgctgcaattcgcagtggtcagctcatagagaagtcggttagaacctttaataaggtcagcaagcaagagattgatgtgcggggatatacgtcgaaagcggccatcgccatcgaggatgaggtgattaaggaggaataccttggccgcgaccgagttcaggcattgtgcagccgggaacaggcggctgtggccatttccaatgccgaggagaaagccaacgaattgggatatgagtggaacgctgaccaacggagagctactgagggcattcttctctccgagaatcggatcgttggagtgcaaggattagctggtacagctaaaaccaactccgtgctcagcactgttgctggaaaagcacgagttatggggtacgaagtaagaggtcttactccaactaactcggctgctcaaagtttatctgagggcgcgaatattccctccagtacaatccaaagttttctgggacaaaatcgcaatgaatgggtagaagagaaacgactgatcgcccaagtagagagaatagacagacggctggatcggatcaagaaggcccttgaaaacccaggagtagacctaaaaactggtgctcagatccctaaaacctctcccatttaccaaaagcgactcgatgaactttgttacgaacaaacagagttaaaaagtcaacgggaggagttagctaagggaatgcagcggtcccctcaactttggattgttgatgaagcatctatgatcggtacaaaattgatgcgcgatctacttcaaagagctagacaggtcggtgctagggttgtgttgactggtgacgtccgccagcttgcttctgtggaggctggtgctgcctttcgtcagcttcaggctcatggaatggaaacatatcgactagaggaaatcgttcggcagacgaaccgaggcacaagggatgcggtatatctctccctaatgaaaaaagcctctaatgctctctctcggttacaggagagtggcagcacgataaaagaattggtcgcgcataagaaaagtggaaaaattgaccatgagaaaagcggtgaagtccgcagacaagagcttgtgaaggactacatggctcttgcgccggatgaacgagccaaaagtattatcctcgaaccaagccgtgagggccgacgtcgcacgaatgaattagttcgtgatgcccttaaaaaagaaggtgctctgggcgaagagctgcatactaaccagctatcaccagtcgatgcaaccgaagctgaacggcgtgtggtgacatcgtatcaaaatgggcaaatcgtccggtttgcgcgtagcttcaagcgtgagggcatcaagaagggcctgtattatcaggttgttggtcgagataaccacgatatcttgcttaagaagttcggggccaatgagcaggctgagctgattcgcttctctcctgaaaactatgcggccaagaacatccagttgttcgaactaactgaaagtggcttggccgttggtgagaagatcgtgtggcgtgataatgataagccaactggacgattgaacaatgacacggccacagttgagaagatagaaggcacgaacgtaaccttcagactttcaaatggtaaaactggtgagtttgacatgtccaaactggctaattcccattgggatcacggttacgccatgacggttcatgctgcccaaggtaagacagcccagaacgtgtttgtgcacgccgaaaccaaccgggaagctttattgaacacggaacagttctacgtgcagatatcaagagcaaaggaccgcgtgtatctatacaccgattcaacggaagggtttgtccgagctgtggagcagcgttcaggtcaaaaacagacggctaaggaaagccgttaccagtctctggaaccgctggatcacttgattgataagctatggcaacaaccagagtcaggacgctcgtcaacgcagacaactggtaaatctcaggctaaaggtatatcaagaggcgacagtgaacgcagtctaacaagataa

SEQ ID NO: 315689 - DNA, 1524 bp, Proteus mirabilis; identical to SEQ ID NO: 284457

SEQ ID NO: 315690 - DNA, 261 bp, Proteus mirabilis
atggcggcagagattcaattgaacggactggtacttccaataaatgatgctcacattcatcaaagacgaggcgtaaccgctgcaagagcagcgtctggtgaacctcttcatttcactgtattgaagtgtctcgatggtcgatacacgaaaacatattgtggacttgccagagtcgataacaccgatgactttttgaagatcatggagtggggagatcacttcgaacctattgcttcttggtatcaaggcggcactcaatga

SEQ ID NO: 315691 - DNA, 228 bp, Proteus mirabilis; identical to SEQ ID NO: 284458

SEQ ID NO: 315692 - DNA, 813 bp, Proteus mirabilis
atggaattgaacgaaaaagcgaaagttgcggcgctctatcaagaacttagcaaagctgatgtctctgaccctaacaagttggttggacagcttgaatcggcggctaagtcaattgtgcaaagtatgaatagtcatcctattaaagatgagcagattaaaactagcgtttttgatcatgctcacatgaatgagcagtatcgacagctatctgagcagcagatgaaaattgttgattctgtccagttgctaatgaagcaggttgaaagcatggggctcgataaaccaactcaagataactggctatctaaaacgctctctaactatcaaagaggttacctggagaacgatattttcactgaagcagcaggtgccatggtgtggatggctgcaaaggctatccagaaaatcttttttgagtcagataacgctaagcagcaacaagctgcccaggaactaaaaaaagatattgggaaaatgacaaaggcgctaggtgttgagttatcccgccttcaactagaggtcaaaacagaacagcggcatggactgatgtcagatgccataagcaatgccaaacggctagagcaaagtggccaacagaaggaggcggataagctgatagttagtacctataacaagctatctcactctgccaagaaagagtacagccaatatcaacctcgcccagaacatcaaaaatctatatcccaggctcaatcgagagaaaaagaacgccaagctgcatcgtcaattcagcaccaacaacacagtgaaaaaagaatcgaccgcgacaaaaaacagtcaattggtcgttga

SEQ ID NO: 315693 - DNA, 258 bp, Proteus mirabilis
atgaaaaaagcaatcttagcagtggcaatcgcatctatgctctctttggctgggtgtgctgcgaaccctgatcgagtggatggcgtaatgttcaccatcgagaaagctagtgacggcgagcctctttgtcgtttcgtctacgatcctgccaaggtcacacaggctaattgggaggaagtaggccaacgcctgcgctcggcatatggcagcaagttagaacaatgcaccaggtttgaaaatgtggaggccaaggaataa

SEQ ID NO: 315694 - DNA, 360 bp, Proteus mirabilis
atgaaatctgtactgtatggcatcatcattgcctgcccaatcactgccattgtgatctactttgccttaaccggtaggcaggaagttcttatccaacaaaaaacacatgaagttcaacaacaaattcgctcggaagaatttcatcgtgacttctctaaggcttggtctgagtttgatctacccaaccagcatgataaggccgtcatctcgtcagaagatactgagcggaatgagcgaatcatgcagctcaaaaaacttcgctctcagttggaagcggctaacggtgagtcaatggatgacctaaaaggagacttagcagagatgagaaaagcattgaaggaggcagagcaagaaaaatag

SEQ ID NO: 315695 - DNA, 1161 bp, Proteus mirabilis
atgattaaaaagtcattgagtttgctggcctttacattaattgcatactcaaacattacacttgctcaagaaagcgccactgtgggccaaaaatcctcacaggaaaagcgcacccaaaaagaaaccacgttgaacgatgagacaagcatggagttacaacgccaaaagggagaggaagcaagaaaaggtgaggaaaaaagagacacgacttccacgtcagctcgacatgcaagcgaagcatcatctaggcagcaatatcaaaatgctcgccgtctttcagtaaaaacagcaccactttctattctcatagagctatttgcctatgtcgaaaaaggcaaatctataagagggaaaacagcaaacctcatcagaaattgttcgctcattacaaacccacaagcgccacaatttccagagctagaacccaaacccttagttacaagcgttcaggcctgcatggcctggaacaaagaaaaaacactgggacaatgccaagttgagttgcagcaggcagctttcaactgggcgaccactggcatgccttcatctataagagttccatctgaacgactgaaaagagaaggtgtttgctgggcagtctacggacttgtagcagaagcaacgctggatgaaatatcaagcgggatttcggtcaacggaagtggcaagtcagcgataaaaatggcgcttgccaaggcaatgagtaaacagctcatacgtaatgacttaccagaaaaggccttgaagatagtagatagacaatttggaaggaactgcgtagtgccatcgacacgagggtatcagtatgaaggaaaatacgaatggtcatgtggctctttttctgctgatccaaaaaatctatcagcttcaattggcgagttcactgtctttggccgaggaaactcactctttggagagtcatgggagctggagacatcattaaatcacgacactcttttttcattatcgactaccagaactaactcaaaagaagcatcaacgtctaatgctcagtatgcaagcaccgacaaccgctcatccaagtcccgtaacctttcaatgagaacgtctgaacgattacaaaccgaggaagcatccaatctcagcaactctacggaggcaagcttcacagtgtctcagccaggcataaaaggggggtaa

SEQ ID NO: 315696 - DNA, 387 bp, Proteus mirabilis; identical to SEQ ID NO: 284470

SEQ ID NO: 315697 - DNA, 1224 bp, Proteus mirabilis
atggcatcaatgaccgcaaagcaggtggcgtcacttgcaaaatcaggagagccgacaagaaaatccgacggaaaaggactctactttgtcgttccagactcgggagcgccctattgggcccttcgatatagtggaaatggcaaacgaaaacaaatgactctgggtcagtaccctgatatgtcgttggccgatgcaagatcagaagccgaagtgtttaaacgtgacttaaggcaaggcgtagatcccctcattgcaaaacagcgtcaaaagtggactggtatcatatcggtcgatgatttatttgaggattggtataaaaacgatttagcgccaaggctaaagcatcccaacattccagctcgaatatatagaaaggaaattaagccagtcattggcgaattcaaaattcaggacgtcacagctctggatgttcgagagataattcaaagagttagggatagcggccgtctaaccattgccaatgacactctgggttatatgaagcagcttttcaagcacgctttaaagcttggattaaccgccaataatcccgctgcacctttcacaataaacgatgctggaggccttgaaaacagttgtaaacgggcattagatctggatgaaatcgagaaagtctttaaagtatttcgaagccatctaaatagctttggtagagataactatttgctgtgctgcctctttttggtactaggtaacaggaagagtgaactatgtgaagctccttggtgggaatttgacatgacagaatctgtgtggcacatccccgaatcgcgggtgaaaactggaatagctatttctatccctttaccaactcaggcaatgacatggcttagtgagctcaaagtaagatcgatgggctctgattacgtttttcctgccagacgccgaagcaatctgttacatatgggacctgataccctgaatagcgcaatctcaaagttatttggacgagaagctgggaggaagattcagccccccaacgtaatgggtgatatcgagcattttacagtacatgacttacggcgaacattcaggagtctcgctgcatcagtaggaacaccaaatcacgtcgctcggttgtgcatcaatcacaggcagggaggagttgacggtatatacgatcggtatgagtacttcaaagaacgaaaagttgctcaccagaaagttgccgatctagttacacctctcattcaactggattga

SEQ ID NO: 315698 - DNA, 975 bp, Proteus mirabilis
  misc_feature (14)..(23): n is a, c, g, or t
atgatattaaagannnnnnnnnnaccattaaatggtattaaagatccaaatggtgaaattgccctgtgtacactttcggcctttaatcttggggcgattgaaaatctagacgatttagaagagctagcacgtttagccgttcgcgcgttagatgctttgttagattaccaagattatccaattttagcagctaaacaaggtgctatgggtcgtcgtacactgggtattggtgtgatcaactttgcttattatctggctaaacacggtgttcgctactcagatggtagtgcaaacaacttaacacaccgtgcctttgaagctattcaatactatttattaaaagcatcaaatgaattagcaaaagagcaaggggcatgcccatggtttaatgaaaccacctatgcagaaggtatcttacctattgatacttataaaaaatcattagatgtactgactaatgaacctctgcattatgactgggaaagcttacgcaaagagatcaaacaatacggtttacgtaactcaacgctctctgcattgatgccatcagaaacatcatcacaaatatcaaatgcaaccaatggtatcgaaccacctcgtggttatatcagtattaaagcttctaaagatggcatcttacgtcaagtggttccagagtatgagcgcctaaaaggggcttatgaattactgtggcaaatgccaagtatcgaaggttatttgcagttagtcggtattatgcaaaagtttgtcgaccaagcgatttctgccaacactaactacgatcctactcgtttccctagtggtaaggttcctatgaaccagctgctaaaagatttgctgctcgcctataaatatggtgtgaaaacactctattatcacaatacccgtgatggtgcagaagatgtacaaggtgatctggaagaagtcgttgaaacggcagattcagattgtgaaggcggcgcgtgtaaaatttaa

SEQ ID NO: 315699 - DNA, 153 bp, Proteus mirabilis
atggaaccgacactatgggtactaggtactctgattataagtatcttgctcattgtttttactataataaaacttaagtttcatccatttttagcactactacttgccagtttttttgtcggtatgggattgggggaacgctgggatttttag

SEQ ID NO: 315700 - DNA, 291 bp, Proteus mirabilis
  misc_feature (179)..(188): n is a, c, g, or t
atgttccatatttaccattcaaatcaattatcactacttaaatcactgatggtacattttatgcaaaatcggccactatcatcgccttttgagcaagaagtgattttagtgcaaagtcccggaatgtcgcagtggttacaaatccaattagcagaaagtttgggtattgctgctaatannnnnnnnnngctaatatccgttatccattacccgctacttttatttgggaaatgtttactcgggtattatcaggtatacctaaagaaagtgcgttttctaaagatgccatga

SEQ ID NO: 315701 - DNA, 639 bp, Proteus mirabilis
atgctaaagcgtcctttgtctattcaacatcatgattttgcgggttttatgttgatggagtgcctctttgtgatgacgataagtagtattttattagtttgtattggacgtgcttatccttatattatcaatgagttaacttcttcttatcaacaatatcgtttagaaatttatctaaagcagcgtttgcagttattggaaacgcaattaaggcgagcagggtactgcaatggtgattgcactgttaaaaaggcttctttacctgtaccacttaaaataggccattatccttattaccctcatggctcttgtgttttgtttgtttacgatatgaacaataacggccgttgggagagtccagaagaacaagagagtgattactttggttttagattaaaaaacggtcaacttgaacaacgtcgtggtgtgcaaaattgtgattcaacaggttggcaacagatcttcgaaaaagaagaaattgaggtgacagaatttatcttaactccctatacacactattctccaataaaaaaacgtgcatttaactatctatcattatcattaaaattccaagcaaaacaaaatattaacctaaaagtacactatcaaacatcaatactattaaggaatatttcgtga

SEQ ID NO: 315702 - DNA, 210 bp, Proteus mirabilis; identical to SEQ ID NO: 315502

SEQ ID NO: 315703 - DNA, 381 bp, Proteus mirabilis
atgtcatttctaactttattaattaactcacctcgatttctaactaattgcgcagctgaacctaaggttccgcctatcatggcatccagagtaacgttaatcgcactctcagttaatgttcgtgtttcttgggtactatgtaatgccatttcagaagctacgccaccagcagtatttgccaatgcaaacttacctgctgttgcaccaacactaccgccttttactattgcaccacctggtatcatcattgcagcgacattaattggatcaataactcccatagctatgctactcacaataccagcaccacctgaatccattaattgctgtctatcattcttctcacgatcaatgcgttgttttattgcagcggtttcttga

SEQ ID NO: 315704 - DNA, 603 bp, Proteus mirabilis
  misc_feature (571)..(580): n is a, c, g, or t
atgagcaaaattttcgaagataactcgcaaactattggccatacccccctagttcgtttaaaacatttcggtaatggcaatatcttagctaaagtagaatctcgtaatccaagctttagtgtaaaatgccgtatcggtgcaaatatgatttgggatgcagaaaaaaaaggtatcctgaaacccggcgtagagctagttgagccaaccagtggtaatactgggattgccttggcttatgtagctgctgcacgtggctataagctgacactgactatgcctgataccatgagtattgagcgccgtaaattattaaaagcattaggagctaaccttgtgttaactgagggcgctaaaggtatgaagggagcgattgataaagcgaacgaaattcgtgatagcgatcctagccgttaccatctactacaacaatttagtaatccagcaaacccagaaattcatgaaaaaaccacaggccctgaaatttggaatgacactgatggcaaagttgatgtagttatcgcaggtgtcggaacgggtggtactatcacgggtattggtcgctatttgaaannnnnnnnnntatttgaaaaatacccaaggtaa

SEQ ID NO: 315705 - DNA, 423 bp, Proteus mirabilis
  misc_feature (409)..(418): n is a, c, g, or t
atgaataaagtagcattatattgtcgccctggttttgaaaaagagtgcgcggcggagataacggataaggcaggacaaataggtgtttatggcttttctcgagtgaaagagggaagtggttacgtcatttttgaatgctatcaagaaggtgatgcagataaaattgctcgtgatgtggattttagagggcttatctttgcacgccaattatttgtttgtggtgaattattaaagaacttaccaccagaagatcgtattacccccattattgaccagctaaaaggtagtacagaaaaagcaggtgaattacgtgttgaagtcgctgataccaatgaaagcaaagagttattaaaattttgccgtaaattcactgttcctttgcgtaatcaattacgtaaagaaaagatcnnnnnnnnnngttga

SEQ ID NO: 315706 - DNA, 930 bp, Proteus mirabilis
  misc_feature (916)..(925): n is a, c, g, or t
atggtgcagttttattcccctaaaaaacgtcctgctaaaaaacaggtaaaaaacttggcggtaaccgctaatgcattggatgctaacggtcaaggtattgctcatgctgagggcaaaactatttttgttaaaggattacttccacaagaaactgcacgcattcgtttgaccgaagaaaaacgccagtttgccaagggagaagtgatcacacggttaaccacaaacccagaaagagtgacaccaccctgtcagtactatcaacattgtggtgggtgccagcaacaacatgtgcctattgattggcaacgcaccactaaagctgaggttttatcacatcttattaaacgtgaaactaatgtggtcatttcagcacagcctgttattgccggtgcggagtatggctatcggcgccgagcaagattagggttacgttatcaccctaaaaagggtttggtgatgggatttcgccaagcactttctaatgacttagtgatggtcaccgaatgcccagtattaaaaccacaacttaatgcattgttgttgccactgtggcagtgtttaaagcaactctctgtcgtgcgtgatttaggtcatgtggaattagtgttagcagataatgggccattagtgattttgcgtcatttatcaccgctatctgagggggataagcaattgttagatgatttttctcatcatgctcaagtgatgatatatctggcgagtgataatggtgagatcgcacaattaacaacgattgagaaggaacccttctatcagatagagggtctaaaattacactttgcaccaacggattttattcaagttaatgatgaaataaatcataagatggttgctcaagcgatagcatggctcgatttatcgccaaacgatcgcgtactagacttgttttgtggcnnnnnnnnnncctag

SEQ ID NO: 315707 - DNA, 360 bp, Proteus mirabilis
  misc_feature (297)..(306): n is a, c, g, or t
atgccgttaattagtttgactggggcttatttagcgtttagtgatgcccctttattagataatacagacttgtttattgatgaaaatgaacgcgtttgtttagtcggtcgcaatggtgccggaaaatcgaccctattaagagtgttagccaaagagcagcccttagatgatgggcaagtggtgtatgaacaagatctggtgactgcacgtttacaacaagatccccccagagatatcgaaggcactatttttgattttgtcgcgcaaggcgttgcagaagatgcgcaatatattacnnnnnnnnnnatatattaccgaatatcatcgtgtttcaaaggtaatagaaacggacccttctga

SEQ ID NO: 315708 - DNA, 681 bp, Proteus mirabilis
atgaatactctattagttaaccagttacaaaaaaaactgggttatacttttaaacaaaatgaattacttttacaggcacttactcaccgtagtgcaagtagtaaacataatgaacgcttagaatttttaggtgattcaattctaagttatgtcattgctaatgcgctttaccatcgtttccctcgtgtcgatgaaggggatatgagccggatgcgtgcaaccttagtgcgtggtaataccctcgctgaactagcacgtgaatttgaactcggtgaatgtttacggttagggccgggagaattaaaaagcggtggttttcgtcgcgaatctattttggccgacacagtagaagcgttaattggtgctatttttcttgatagtgatattcaaaatatcgaaaatatcatcttaaaatggtatgagaatcgcttggctgaaatcagtccgggtgataagcaaaaagatcctaaaactcgcttgcaagaatatttgcaaggacgtcatttaccactaccttcttatgttgttgtacaagtacgtggtgaagctcatgaccaagagtttacgatccattgtcagataagcggtatcgaccaacctattaaagggatgggtacaagccgtcgtaaagccgaacaagccgctgctgaacaggcattaatacaattggagcttgaatga

SEQ ID NO: 315709 - DNA, 1401 bp, Proteus mirabilis
  misc_feature (1369)..(1378): n is a, c, g, or t
atgaaattaccggttttctccatttcaaacattacgagttcggtaaaaaaactcttttttgctgataaatctaaaattgcctcctttttgctatttttattggcattacttcccgctttgctcattatttggatctggtggtgggggccaacatttcgttatcaagattccataccgtttagcgaggtcaccacacgttggttagcaaccgtcgttattgtattgcttgttgtgagttggattggtctagcaacatggcgtcgagttaaaaaattggaagcattaaaacttgatgtcgaattggctgtagttgatccggtaagacaagatcttgattttcaaaaacgttatttaaactattggaaatcacaatttattcgtcacttaaatggtcatactaaagcggtttatttacgcccttggtattttgttttaggagctaaccaaagtggaaagcatagcttattaaaaaatacggtaaacccattagatattgcgcctagcgacaatattgttaacgaacaaaatattgcattaaatattcaatgtctattaaccgacaatgctgtactttttgtccctaatggtgatctattaacccaaccggcaaatcaggctgataaacctcaactttatcaccgtttgtggggcgatttactcaattggatcaaaactaatcgcccaagacaaccaatgaatggcatcgtcttaactgtcgataccctatcgttattaaccaatagtaaggagcaaaatagtcagctacttgctgatttacaaatgcgtattgaagaaatacgcatgacatttaatagtcgcttgcctttatatatcgtcttaaccaagctagatctattacgtggttttgactcaatgtatcaatcattagatgttcaacaacgtaatgaagtattaggtgtttctttcaaccagaaagcaaaaagtaattggaaaaaggaattaaatcatttttggtcacaatgggtaggccaaatgaacagcgcattaccagaaatgatgctacaaagagcagaaggtaaccagcgtagtgatctatttagtttcgtgcgccaaattgaagggttacaacattctgtatgcacattaattgatgcattgctcatcaataatgagcaacataatatctgtttaagaggggtttatttaacttctgcattgcaaatcggtcaaatcgatgatgtgtttagccaaacagcgtccgaacaatatcatttaccgacagcacctcttactacatggccaattaatgatagccacccttattttactacccaattatttagtcaagtgctatttagtgagcctaatattgcagcagaaaaccattattgggttaaaaaacatcgannnnnnnnnnccggtgctcaatccattacgtga

SEQ ID NO: 315710 - DNA, 531 bp, Proteus mirabilis
atgaaagttgagcaatcacaagttactaagttagtaataacaggcatagagcgtcacgaccctattcatgtttatcttgaggactacggtgataatcaaaacggccgcgtcacaattagcgaaagcggttgttcttggtcttgcttttggggctcgatgggaggctcactaattgagtttattcagaaaataaataatcattactggataggtaagttagattctaatttaatctatgagatagatgatgataacgatgcaaatgctgaatatgccaaaaagcaagttatcaaactacgcaaagatgatgaaatagaccaatacgaagcaagggaatactgggatttaatcgaactatccgacaatgttaaagatgattgttgcaatagttttataggtggaaaattaacaactttatttgatgatgcttggcatggcgattggccttctattccaaaccctaaatatataagaatggaatcacgattaatcgctgttcgtgaagcattaaagcaaataagtgtgaattaa

SEQ ID NO: 315711 - DNA, 180 bp, Proteus mirabilis
gtgaaattaacagagcgtcaaattagcacattaaaaaatgtagataatggatataggcagttaagtaatgggctgttaattttctcactggagaataaaggacttattaaacttcaccctaaagatggatggaaattaacagaatcaggcattgaagaattaaataaggtggagcaatga

SEQ ID NO: 315712 - DNA, 132 bp, Proteus mirabilis
atgagttatcaacatgcaggaatatatgccattgtaaaacgtgttattggttggcttatttttattcctgcctttatttcaacgacagtttcgttgattgagttagctgcgagcaaatggcgagggtgttaa

SEQ ID NO: 315713 - DNA, 273 bp, Proteus mirabilis
  misc_feature (153)..(162): n is a, c, g, or t
atgtcaaaactgatttttgatcccgttgagcatcctcatcgtcgttataaccctttgactgggcagtggatattagtttcaccccatagagcaaaacgaccatggaatggcaaagatgaaaaacctcagatagcgacacttccctcttatgannnnnnnnnncttatgatccacattgttatctgtgcccagggaatacccgagtttcgggtgataaaaatcctgattacacaggcacttatgtttttaataacgatcactctgcattattga

SEQ ID NO: 315714 - DNA, 198 bp, Proteus mirabilis; identical to SEQ ID NO: 299913

SEQ ID NO: 315715 - DNA, 399 bp, Proteus mirabilis
atgatctgccaaccaaatatgaggtccacagacagaacaggcattaggttgtgcatgaaaacgtctatctgcgggatcttgatattcatgttggcaaatcggacaaaatggaaacgcagacatagaggtaaaaggcctgtcgtaaggcattttttttataatagtaaaacgggggccgcaatgggtgcagtttataaaaggataatgataacgacgattttgtggatcaaacaactcatcaatgcaagcctgacaagtcgctgcatcaggtacaacttgtgtatccatttctccaccaccactttttacaatagtaaagtccgtggggagttgctcccattgataaggtgtttgttcaatacgttcaatgcgtgcaagaggaggacattgagccgttaa

SEQ ID NO: 315716 - DNA, 2535 bp, Proteus mirabilis; identical to SEQ ID NO: 300680

SEQ ID NO: 315717 - DNA, 1725 bp, Proteus mirabilis
atgtcagacactaagcacttaaatgtgttgattgcaaaagctcttttacttaaccaagatattactgatagcgaacaagtagatgcgctaacagctcatatcaatggtgatattgaaaaagaagagtttaagcaatatgaccactttattaatatcacgttacttgcactttcattggttcctaatatcagcagcgaactcagtgaagagcaaatcgttaacgctattatgtcatttattgataaccctgatatgcgtagcgttcgtcatagatttaatcactttaactcattaataaatccaaaaaccacctcaaatgaggtagaaaaaaaggaagtacctcaggaagaggtgatttttaacgccagcaaagataaccaaaatggtcaatcaaaggaggcggaaggtattccacaggaagaaaatgaccaacctgcttattttgaacctggtcgttatcccgatattcctaacgaggtgtatcacagttcaaacggtatcagtagttcgatgttaaaagatgcccgtattagtttgatgtattacgagttacgccatgtaacaaaagttattgagcgtgaaaataagcgttgtttcgacttaggtagcgcatttcacacgttaacaatggaacctgaaaagtttgatgctgaattcagtgttaaaccaattattccagaaggtgcctttacaacaacagaaacaatgaagtcatggattgacgaatacaacaataagttgcctaagaagctctcacaagatgagttaaaagcaattattgaagaacataatgccactctgacaccgcaactttccaccagcggaaaagccgaagagctaggtcagatatacatgcagttgcccgatgaatttaaaaccatccctgaagatgggaaatttactggtgcagcaatgaaagcctgtatcaaagcctataacgatactttgccaacaccattgaaaatctcaggtaatacagatgcattacttgagcagatataccaccacatcaatcctgaattatatttggcagaaacaaataagcctgagccacttagaaaacccgtcaaaaaagatgatctcatgcaggtcattaaagaagttaaccctgatgctgtatttgaagatgaaatcattagccagtggcttagtgacgattcgaaaattcatgttcaaaccgttgactatgaaatggcaaataacatgcgtaacgctgttatgaaccacaaagaagcatccagtttattaaatcaccctaaccgtgtatcagaagtgagttactacggcattgatgaagataccggtcttgaaattcgtgttcgtcctgatatcgaaattcaaacagaaaataaccgattaggttttgacctcaaatcagtagcacttggtcgatttaaacaagatgccattgaagccatgatccgcagagaaatcattaatcgcgattatcacatcagtgcagctatgtattgtgatgtggcaatgctggatcagttcttctggatattcgttaacaaagacgagcattaccactgggtcgctatcgttgaagcctctcctgaattacttgaactaggtcgcgcagagtacaaaaagacactgcgtgatatccgtgaagctatggatacaggatattggccagcgcctatcaccactactctcactatcggtatcactgactttgagcagagaaagttagaagaactgcaaaacgaagtcgcttaa

SEQ ID NO: 315718 - DNA, 1491 bp, Proteus mirabilis
atgatacccgttattgccttagtagggcgccctaatgtgggaaaatccacattatttaaccgactaacacgcacaagagacgcattagttgcggattttcctggacttacccgtgaccgtaaatatggtcgtgcagaattagacggtgaagaatttattatcattgatactggtggtattgatggtgcagaagagggtgtagaaacccatatggcatcacaatcactgcaagccattcaagaagccgatattgtgctatttttagtcgatgcgcgagcaggattaatgccagccgaccaaggtattgctaaacacttgcgtggtgttgagaaaaaaacctatttagtggcgaataaaacagatggtatcgatattgataccgctttggctgatttctactctttaggattaggggaaatattccctattgctgcctcacatggtcgtggtgtttctcaactgattgagcaagcgttgttacctattgtgggtaaagtcgtcgaagaagagaaagaattaacagaagaagaagagaatgccgcttattgggctgctttagaagcagagcagaaagagcaagaagaagaggaagaagaggatgatttcgatccgacaacacttcctgttaaattagctattgtaggccgccctaatgtaggtaaatcaactctgactaaccgtatgttaggtgaagagcgtgttgtagtttacgatatgccaggcactacccgtgatagtatttacataccgatggagcgtgatggtaaggagtatatccttattgataccgctggcgttcgtaaacgcggaaaagtaaaagaaacggtagaaaaattctcagtgatcaaaacattacaagcgattgaagattgtaatgttgcactacttgttattgatgctcgtgaggggatttcagatcaagatctctctttattaggttatattcttaattctggacgctctttagttattgctgtcaataaatgggatggtatgacccaagaagatcgcgaacaagttaaagatatgcttgatctcaaattaggttttgttgattttgcccgcgttcattttatctcggcattacatggtagtggtgttggtaatctgtttgagtcgattcaagaagcctatacttgcgcgacacgtcgtgttggtacatcaatgttgacgcgcataatgaagatggcagaggatgatcaccaaccccctcttattcgtggacgccgtgtaaaaatgaaatatgcccatgctgggggatataatccacctgtcgtggttattcatggtaaccaagtgtctgatttacctgatagctataaacgctatttaatgaattatttccgtcgcacactacaagtgatgggaactcctatccgtattcaatttaaagaaggggaaaacccttatgcggataagaaaaataaattaacagcttcacaaatacgtaaacgtaagcgtttaatggctcatttaaagaaatcaaaataa

SEQ ID NO: 315719 - DNA, 1491 bp, Proteus mirabilis; identical to SEQ ID NO: 315718

SEQ ID NO: 315720 - DNA, 507 bp, Proteus mirabilis
  misc_feature (491)..(500): n is a, c, g, or t
atggactataaacttaatttagattggcaatcatttttagaaagccattggcaaaaacgtcctttattaatcaaaaacggcttctctggttttgttgatcctttatctcctgatgaacttgcaggtcttgcaatggaagatgaagtggatagccgtcttgtgagttgtcaagatgggcagtggggagttaaacatgggccttttgagcactttgaaggtttgggtgataaagattggtcgttattagttcaagcggtcgatcactggcattttccaagtgcggcattgatgaaaccttttcgtgtgttgcccgattggcgtattgatgatttgatgatctcttactctgttcccggaggcggtgtgggccctcatcttgatcaatatgacgtatttattattcaagggcaaggtcgtcgtcgttggcgtgtgggtgagaaaatcccaatgaaacagcactgccctcacccggatttacttcaagttgatcnnnnnnnnnncttttga

SEQ ID NO: 315721 - DNA, 216 bp, Proteus mirabilis; identical to SEQ ID NO: 315458

SEQ ID NO: 315722 - DNA, 162 bp, Proteus mirabilis; identical to SEQ ID NO: 296253

SEQ ID NO: 315723 - DNA, 258 bp, Proteus mirabilis
atgaatatagcaagtcttcttgaacaaattgcagataaaggttggtgtgtatgggatgatttccttacacctgaggcggttaaacaattgcgtgcttgttttggtaatgatgcacaacaagcacgtataggacgtcatgaaaacctattagcagaaaccacgagtttgaatatgaagcgcatttcgcttgttatgaaaaaggtgctttctataaaaaacatcttgatgcatttaaagaaaatgtcacaagacgtttaa

SEQ ID NO: 315724 - DNA, 675 bp, Proteus mirabilis
atgacatttaataaattatcattaggggtagttttactttctgcttcattactagcaggttgtgcctcagaatcttctcgctctttagaggttgctaaagtggctacctataatacgacttactcaggacctaagagtgccatttctattggtaagtttgataaccgttctaattacatgaatggtattttttctgatggtgtggatagattgggtaatcaatctaaaacgattttaattacacatttacaacaaacaggccgttttaatgttttagatcgcgctaacttaacggagttaacacaagaagcgaagattaaaggccaaagtcagcaattaaaaggcgcaacttacgttattactggtgatgtgacagagtttggtcgcaaagaagtcggtgatcgccaactatttggtatcttaggacgtggaaaaacccaagttgcttatgccaaagtgaacttaaatgttgtgaatgtgaatacctctgaagtggtgttctctacgcaaggtgcgggggaatatgagctttctaatcgtgagattgttggttttggtggcacagcaagttatgactcaacacttaatggtaaagtgcttgatttagccattcgtgaagcggtgaataatttagttgcagggattgaaagccatgcttggcagcctgagcagtaa

SEQ ID NO: 315725 - DNA, 453 bp, Proteus mirabilis
atggctgaaaaaacgaaattagctattcatatagctaaaaaattaaggaaatgttttgacgagtattacaacgagatagcaagaaatattaactttccatttcatgcattccctcataattcctgtgaaggagcttctgcactgcttggtggagtactaagtagaaaattaaatacagaagaaatatttattatacatatatatagctccactttgtcaggtgaacattactttgttgaatttgaggagttgtattacgatttaacattcgatcaattcaaacttggtaaaggtataattattgctgaagaaaaagaatatcttgatagcataacaacgaagagcatttcaagaagaaaggttattgactttcttaatgagttctatctagaaggtgagaatcataaatttaacacagagcaagctataaaaaacctaatgtaccatatttaa

SEQ ID NO: 315726 - DNA, 189 bp, Proteus mirabilis
atgataagctcatcaacaagaccaagctctaatagtgcgccagcaaaatgtgcgccactctcaacccatacactattaatattgcgtttacctaactgcatcattaataacactaaatcgacactactatttttgccattagtaggaagcaaaatttctgagacatcaccttgccaagcttcttgctga

SEQ ID NO: 315727 - DNA, 462 bp, Proteus mirabilis; identical to SEQ ID NO: 300354

SEQ ID NO: 315728 - DNA, 348 bp, Proteus mirabilis; identical to SEQ ID NO: 315147

SEQ ID NO: 315729 - DNA, 180 bp, Proteus mirabilis
atgcaactgaataatgctaataaattccctgagtttaagtatattatttcaggtcaattaaaaatgaaggagatttcacatactggaaaaaattattcctttttgtcacatttaaaatatgaaacactcagtaaaatgattaaaaataaaattaatgctaggagtaaacgtgatgcttga

SEQ ID NO: 315730 - DNA, 348 bp, Proteus mirabilis; identical to SEQ ID NO: 295830

SEQ ID NO: 315731 - DNA, 627 bp, Proteus mirabilis; identical to SEQ ID NO: 313575

SEQ ID NO: 315732 - DNA, 207 bp, Proteus mirabilis; identical to SEQ ID NO: 295825

SEQ ID NO: 315733 - DNA, 621 bp, Proteus mirabilis
atgtcaaaaccatcatttgattctattgaatcgcaggcaagttacggtattggtctgcaagtcggtcaacaactgactgaatcaggtctccaaggattagagccagcagcactgcttgccggcttgactgacgcgttagaaggcaatactccttctgtacctgttgaaacgttacacaatgctttacgtactatgcatgagcgtgctgaagctgttcgtcaagagcgtcaagcggcactggcagaagcaggtaaagtattcttagcagaaaatgtaaaaaaagaaggcgtgcaagtcactgaatctggtttacagtacaaagtactgaaagcaggagatggcgctattccagctcgtactgatcatgttcgtgtgcattatactggtcgtttaatcgatggtacggtatttgatagctcagtacagcgtggtcagccagcagaattccctgttaatggggtgattgcaggatggattgaagcattaactttgatgccagtaggttctaaatgggaattatatattccttaccaattagcttatggtgaacgtggtgcgggggcggctattcctccttttgcaacattagttttcgaagtagaactattagaaattttataa

SEQ ID NO: 315734 - DNA, 648 bp, Proteus mirabilis; identical to SEQ ID NO: 306848

SEQ ID NO: 315735 - DNA, 126 bp, Proteus mirabilis; identical to SEQ ID NO: 295415

SEQ ID NO: 315736 - DNA, 249 bp, Proteus mirabilis; identical to SEQ ID NO: 295416

SEQ ID NO: 315737 - DNA, 660 bp, Proteus mirabilis
atggttcgtgctagtatggcaacaagaaataaaaaagaggttacaattagtgatagtgattcacagttcaatcatgaggtgaatatgggcaaattcccaggcttacatcgtcgagcaatcgttgttattgccattattttgttagtcgtttttttctggccaacaagtgaaaataccaccccacctcaaccctcatcttcgacacaagatcttcctgtgcctgtagcaccttctgtctcaaatgaaacacaaaatgtccctaatacactaccaccagcacaagatagtctaaatgctgagcaagagacagaagacttaccagaagaaggtgaagccaataataccaatgacaatacgccagtaaacacaatgcctcaaacaccgtcaaccgcgactgaaaattggcaaacttataccattaaagaggggcaaacccttgcacaactatttagagataatcagttgcttgtcaatgatgcgtttactatggcgaaatcagaaggcccacaaaagccgttaagccagttacgcgccggacaaaccattcgtttacaacgaggttcacaaggtgaagtgagtatgcttgaagtgactgacaataccggtactgttattaccttcactcggctaagtgatggtagttattatcgtacgccatag

SEQ ID NO: 315738 - DNA, 450 bp, Proteus mirabilis; identical to SEQ ID NO: 295418

SEQ ID NO: 315739 - DNA, 228 bp, Proteus mirabilis; identical to SEQ ID NO: 295419

SEQ ID NO: 315740 - DNA, 318 bp, Proteus mirabilis; identical to SEQ ID NO: 295420

SEQ ID NO: 315741 - DNA, 396 bp, Proteus mirabilis; identical to SEQ ID NO: 295421

SEQ ID NO: 315742 - DNA, 744 bp, Proteus mirabilis; identical to SEQ ID NO: 295422

SEQ ID NO: 315743 - DNA, 2490 bp, Proteus mirabilis
atgtccaaagatccttttcaggatagagaagccgaaaaatacgcctctccaattgctagtcgtgaatttattttagaagaaatgaagaaacgtccggccccgatgagccgtgaagatatcgcgcaggcattgaaaatttcaggtgaagaaaatctggaagcattacgtcgtcgtttacgggctatggaacgagatggtcagttagtttttactcgacgtcagtgttatgccttacctgaacgcctcgatctttggaaaggtaaagttatcggtcaccgtgacggctatggttttttacgtgcggaaggccaaaaggatgatctctatctttcacaagatgaaatgaaaaaaaccatgcatggtgatgtgattttagcgcaacccctaggcatggatagaaaagggcgtcgagaaggtcgcgtcgttcgtgttcttgaacccagaaacagccaaattgttgggcgctattttattgagtcaggtatgggatttgtggtacctgacgatagccgtttaagttttgatattcttatccctaaagaagatatcatgggcgcacgtatggggaatgtggtggtggttgaagttaccacaagaccaacacggcgtactcaagcggtaggacgcattgttgaaattttaggtgaaactatggggacgggaattgcggtagaaattgcactacgcacccatgaaattcctcatacttggccacctaaagtagaaaaagaaatcgctgatttaaaagaagatgtgccagagtcagcgaaacaaggccgcgttgatttgcgtgatctccctttaattaccattgatggtgaagatgcgcgagactttgatgatgccgtttattgccagcgtaaaaaaggcgggggctggcgtttatgggtagcaattgcagatgtgagctattatgtacgccctcaaactgcattagacacagaagcgcgtagccgaggcaattcggtctatttcccatctcaagttgtccctatgctgccagaagtactgtcgaatggattatgttcattaaatccacaagtcgaccgtttatgtatggtttgtgaaatgaccgtttctgagcaggggcgcctttcatcttataaattctatgaagccgtaatgagctctcacgcgcgaatgacttacaccaaagtatggaaaatcattcaaggtgatgaagagttacgtgagcactaccaaccgatcgtaaaagatattgagcacctttatgagctataccaagccctcgataaggcgcgtgaacagcgtggtgccattggttttgaatcggaagaagcgaaatttattttcaatgcagaacgtcgtatcgatcgtatcgaaccggttgtacgtaatgatgcacataaattaattgaagagtgcatgattttagccaatattgcggcggcgcgttttgttgagaaaaatgaagagcctgcgttatatcgtgtgcatgataaacccaaagaagagagcgtaatgaatttacgttcggtatttaatgaactgggtttaacattaccgggaggattaacaccggagccaggcgattatgcgcgggtcatgaaagaagtcgaagagcgtccagatcacgaaatgctacaaaccatggtattgcgctccatgaaacaggcaatttacgatcctgaaaatcgaggtcactttggtttagcattaaaatcttatgctcacttcacttcccccatccgtcgttatcctgacttagcattacatcgtgctattaaataccagatagcgaaacagcaaggccatggctcacaacgctggaccccaacggggggctatcatagtgatatggataccatgcttcaattaggggagcactgctctttaactgaacgtcgggcggatgaagcaacccgtgatgtggctgattggctgaaatgtgatttcatgcttgatcaaattggtcagcaatttaccggtattattaccagtgtcactggtttcggtttctttgtgcgcttaaacgatctatttattgatggtcttgttcatgtatccacattaaataatgattactatcaatttgataatgttggacagcgtttaattggtgagtcatccggtcaggtgtatcgtctgggtgatgaagttgaagtgaaagttgaagcggtcagtatggatgaacgtactattgacttctcattgatttcaacaacacgtaaagcacgtaaccccgggaaaacagcacgtgttcgtgcgttaaaagggggaaaagacaagaaaaatgcgagcagtagtaagtctcgtcgtcgtgatgccagcaaagacaaaaactttgaacctgatagtgcctttagaaaaggtaaatcaagtaaagaaaaacagagtaaagataaagtcattaaagagaaaattgcgaaggacaaggcgagtactaaacgcaaaaaagcctctgcacaaaccaaaaagatagaggcgaaattaaaagccaaacgtgcggcgaaacgcactaaagcgtag

SEQ ID NO: 315744 - DNA, 429 bp, Proteus mirabilis
gtgcaattaaccagttttacagattatggattgcgagcgttgatatatatggcttcattgccagaaggcaaaatgacgagcatcaccgaagtgacgcaggtctatggtgtgtcacgtaatcatatggttaagattattaatcagctaagtcatatgggatttgtcgaagcgatacgtggaaaaaatggtggtatacgcttaggtaaacctgccgctgatattattgtcggcgaggtcgttcgtgctttagagccgctttcactggttaactgtagtgctgagttttgtcatatcaccccagcttgtcgattaaaacttgtattaaatcaagcgatagaacagtttttgaaagagctagaccgtcatacactggctgaattggtagaaaacaacagccccttatataaattgttattagaagatgtttga

SEQ ID NO: 315745 - DNA, 1299 bp, Proteus mirabilis
atgagtaataacgttgtcgtattaggcacccaatggggtgacgaaggcaaaggcaagatcgtcgacttgctgacagaacgcgctaagtatgttgttcgttaccaaggcggacataacgcaggtcacaccctagtcattgacggtgaaaaaaccgttctccacttaatcccatcaggcattcttcgtgaaaatgttgtcagcatcatcgcaaacggtgtcgtattatcgccagaagcattgatgaaagaaatgacacagctcgaagagcgtggtattcctgttcgttcacgtctactgctgtcagaagcttgcccattaattctgccttatcacattgcattagataacgcccgtgaaaaggcgcgtggtgagaaagcgattggtactacgggtcgtggtattggtcctgcttatgaagataaagtcgcacgccgtggtttacgtgttggtgatctatttgataaaaaagcattcgctcagaagcttaaagagatcatcgaataccataatttccaactggttaattattacaaagttgagcctgttgattaccaaaaaaccttagacgatatcatggcgatcgctgatatcttaactgggatggttgttgacgtttctgacttactttacaaagcaacacaaaaaggtgagttagtgatgtttgaaggggcgcaaggtactctattagatatcgatcacggtacttatccgtatgtcacctcttcaaataccaccgcaggtggtgttgcaacaggttccggcttaggtcctcgttatgttggttatgtattaggtatcattaaagcctattctacccgtgttggtgcaggtccattccctacagaattatttgacgaaacgggcgatttcctacgtgaaaaaggccaagagttcggtgcaacaacaggtcgtagtcgccgtactggttggttagatattattgctatccgccgtgctgttcaaatcaactcattgtcaggcttctgcatgaccaaacttgatgtcttagatggtctgaaagaagttaaagtgtgtgtaggttatcgcttaccaaatggtgaagtgattgaaactacaccattagcagcagatgattgggaaggtattgagcctatttatgaatctatgcctggctggaacgaaagcactttcggcgttaaagataaagcacagttaccacaagccgcgttaaattatattaaacgcgttgaagagttaactggtgtgcctgttgatatcgtttctacaggtccagatcgttcagaaacgattattctccgtcatccatttgatgcataa

SEQ ID NO: 315746 - DNA, 1005 bp, Proteus mirabilis
atgcgtaaagttatcgctgttgttgcagttattattttagcgttgttgtactcctcagtatttgtcgtgcaacaatatgaacgcggtattattttacgtttctcgaaagtggtacgtgatggtgaaaataaaccggtcgtttatgaaccgggtattcactttaaaattccatttattgagaatgtgaaaaaactggatgcgcgtatccaaacgatgaatatccagcaagatcgcttcttatcaggtgagaacaaagacttgttagttgactcttatctgaaatggcgtatcagtgattttagtacttactacctagctactggtggtggtaatacgatgcaagcagaaaccttattgcgtcgtaaatttagtgaccgtttacgctctgaaattggtcgtatgagtgtaaaccaaattatcactgattcacgtggtcgtttaaccattgatgtgcgtaatgcgttgaatgaaggtacaccttctcgtgataaaagtgatgcagatgatgctattgctattgctgcgaagaaagtggccgaagagaccaaaggtaaagcccctgctatcaatatgaacagtatggcggcattaggtattgaagtgattgatgttcgtatcaaacaaatcaacttaccaatggaagtttctgaagccatttatcaacgtatgcgtgcagagcgtgaagcggttgctcgtcgtcaccgttcacaaggtcaagaagaagcggtgaaaatccgtgctgcagcagataaaacagtgacagaaaccttagctgaatcggagcgtgaatcgttacgtattcgaggtgaaggggatgcgcaagcaactaaactatttgctgatgcattcagtcaagatcctgacttctatgcgtttatccgtagcttacgtgcttatgagaatagctttaataaagacggtaatgacgtcatggtgttaagtccagatagcgatttcttacgctatatgaaagcaccaactaaagcgagagcgattgaagagtaa

SEQ ID NO: 315747 - DNA, 1275 bp, Proteus mirabilis
atggcgtggaatcagcccggtaacaacggacaagaccgcgacccgtgggggaaccgaaacggcggtaataataacggcgacgggaactctaacggtaatcaaggaggtcgggatcgtaaagcatcagatctcgatgatttgttccggaaactgagtgcaaaacttggcggtttcggtggtaaaaaaggaggaaactcctcttctgggcaaaatggcggacctcgtggtaatgctggaaacgtattagtttctcttgcattaggtgctgtggttgtcgtttgggctgccagtggtttttataccattaaagaagccgaacaaggtgttgtgactcgtttcggtaaattttaccaaatcgtcgagcctggtttaaactggaaaccgactttcattgatgaagttcagcctgtcaacgtaaaaactatccgtgatttaactacgggtggcatgatgttgacatcagatgaaaacatggttcaagttgagataaacgttcaatatgttgtctcagatccagaagcattcctctttaatgtcacaacgccaatgaatagcctaggacaagcgacagacagtgccgtccgtggtgtcattggtcgttcagaaatggaaaagatcctgacatcgaaccgttcagaaattcgtgatcaaactcgtcaagaattagaagagacgatccgcccttataaaatggggatctccattgtggacgtcaacttccaagttgctcgcccaccagaagcggtaaaagcggcatttgatgacgtaattgcggcacgagaagaagagcagaaaaccattcgtcaggctgaggcttataaaaacgaagtgttaccattagcaaaaggtaacgcacaacgtatgattgaagaagcaaccgcttataaaacgagtgtggtgatgaaagcagaaggtgaggtggcgagtttcgccaaaatcttacctgaatatcgcgcagcaccggaaattactcgtgagcgtctgtatattgaaacaatggaaaaagtgttgtcgaaaacacgtaaagtcattgctaatgacaaaggtaacagtatgttggttctgcctttagagcaaatgttacgccagcaaccaaaagcgccaacgtcatttaatagtgtcacagaggcacctgcgcgtatttcaacccctacgccaagtaccaacacaacacctactcagaaaccagcaacaacttatggtaacggtggatatggtagcaataatagtggtggttatggtcagccttatggctctaatcaaggaggacaataa

SEQ ID NO: 315748 - DNA, 1284 bp, Proteus mirabilis
ttgtttgatcgttatgaaggtggcgaattagccgttttagtgcacgttttcttttcgcaagaaaaggatattgatgacttgcaagagtttgaatctttggtgacatctgccggtgtaaaaccagttcaaattattacagggagccgtagagcgcctcactccaaatattatgtgggagaaggtaaagcggaagaaatcgcagaagcagtaaaagcgagtggtgcagatgtggtgctatttaatcacgcactctcaccggcacaagaacgaaatctggaaagactttgtgaatgtcgtgtggttgatcgcacgggagttatcctcgatatttttgctcaacgagcaagaactcacgaaggaaagctacaggtagaactcgctcagttacgtcatttatcaacccgtttagttcgagggtggacacacttagaacgacaaaaaggggggattggattacgtggccctggcgaaacacagcttgaaacggaccgacgtttgctcagaggcaaaattagtcaaattctaatgcgtctaggcaaagttgaacgtcagcgtgaacaaggacgacaagcgcgaagtaaagctgatattccaacgttatctctggtgggttacaccaatgcgggtaagtcgagtttattcaatcgtataacctgtgctgatgtgtatgctgctgatcagttgtttgcgacactggatcctaccttaagacgaattcaggtcgatgatgttggtaccgtggtgttagctgatacggttggttttatccgacatctacctcatgatctggtggcggcatttaaggcaacgctacaagaaacacgtgaagcgacattgcttcttcatgttattgatgccgctgatagccgttttgaagagaacattcatgcagttgaaaatgtattagaagagattgatgctcacgagataccgacactgtatgtgatgaataaaattgatcttcttgaggacttcaccccaagaattgatcgaaatgaagataatttacctgttagggtttgggtttctgcacaaacaggtgaaggtattcctctgttatatcaggcgttgacagagcgcctttcaggtgagatcgcacacgttgaattgcgtttaccgccagaagaagcagggcgattacgtagccgtttttatcaattacaggctattgagcgtgaatggattgaaaaagacggtaaagttgggctaatcacccgaatgcctatggtagactggcatcgactttgcaagcaggagcctactttattggattacgtggtctga

SEQ ID NO: 315749 - DNA, 291 bp, Proteus mirabilis; identical to SEQ ID NO: 306863

SEQ ID NO: 315750 - DNA, 942 bp, Proteus mirabilis
atgagcgaagtaaaaacgcaaataaaacctaaagcaatctttctgatggggccaacagcctctggtaaaaccgcattagccattgcgctaagacaaaaactgcccgttgatcttattagtgttgattctgctcttatttatcgtggtatggatattggtactgcgaaaccggatgagacagagcagtcgcttgcaccacatcgtttaattgatattctagatcccgcattaccttattctgccgcagactttcgtaaagatgcgttaaaagcaatggaagaaattacggctgcaggacgaattccactattagtgggcgggactatgctatattttaaagcgttattagaaggcttatcgcctttacccagtgctaatccagaaattcgtgctgaaatcgaaaaaaaagcagccgaacaagggtgggagacaattcatcaagagctagcatccgtcgatcccgttgcggccaaacggatccatcctaatgatcctcaacgcctttctcgtgcactggaagtttacctgatttcaggtaaatcgatgacagaattaactcaaatatcaggcgaagcattgccttatgatgtttatcagtttgcgattgctccgaaagatagaaatgtacttcatcaacgcattgaagcacgttttaaacagatgttaacgtgtggctttgaagatgaagtaaaatcattataccaacggggcgatctgcatgaagatttaccttctatacgttgtgtcggctatcgccagatgtggtcatatttatccggcgaaatcgactatgatgagatggtttatcgagggatctgcgctacccggcaattagcgaagcgacaaatcacttggttaagaggttggcatgatgttcattggttagatagtgaagattttgaacagtctcttaacactgttttgcaggtagttagtgcatag

SEQ ID NO: 315751 - DNA, 2010 bp, Proteus mirabilis
atggcgattaatttattacctcctcagttagcaaatcagattgcagcaggggaagtcgttgaaagacccgcttctgttgttaaagagttacttgaaaacagcttagacgcgggtgcgacaacaattgatatcgatatcgataaaggtggcgctaagctaattcgtatccgcgataatggatgcggcatttcccgtgatgatttgaagttagcacttgctcgccatgcaacaagcaaaatatcgacactggatgatcttgaagccattatgagcatggggtttcgtggtgaagccttagccagtatcagctctgtatcacgtttaaccttaacatctcgtaccgcatctcaggaggaggcttggcaagcctacgccgaagggcgtgatatgacagtggcagtcaagccagcagcacatccggtggggagcacagttgaagtgctcgatcttttttataacactcctgcaagacgtaaatttttacgtaccgaaaaaacagagtttggtcatatagatgaagtagtacgtcgtatagccttatcccgctttgatgtgtcaattaatttaatccacaacggtaagcgtgtgcgtcaatatcgcgctgcgaaagaaactcatcagcatcatcgtcgtttaagtgctatctgtggtaatcattttgttgatcaagcaatgcaactgacgtgggagcatggtgatctggcaataaaaggctgggtagagcatcctttagctccagtgcaaagcagtgaagtacagtactgttatgtcaatgggcgtatgatgcgcgatagattgattaaccatgctattcgtcaagcatatgagggttatttgcaaggtgaacagcaaccctcttatgtgctttatttaaccgtcgaccctcatcaagtggatgtcaatgtgcatcctgccaaacatgaagtgcgttttcacgaatcgcgcttagtacacgattttatctatcaagctgtcctgagtgtgttaaggcaggttacagaagatacgttatctttagatgaagaggataatggggctttaactgccacaacatttcctgaaaatcgtcaagttgcgggagaaaatgttttttcgcagccttatcaagcaccagtaacctcatctacgcaaaaaaagagtacgggagcttaccaaggaagtgcaggaaaagggttaacagatacgcaaaagagtccccaaaaaacgctagatacacgtcagtttggtgagagttatcaacgtacgcaaggcatgctttatcaaaaaatgatgcaagaaagtgcgagcgatgttgaaaataaagaaaaaatacctctatttccccctcgtcccccattgaatttggttgatgttggtcatacaactaataacaatgaaacaaatgtaatttcagtggtgcctcgttctgttaatgccagcgcagcgcaaacagattatacttttggccgggtattggcgatttatcagcagaaatatgcgttaattgaatcttcgcaaggtctagggctgttagcattggaagaagctgattttctgttaaaatgtgcccagttattgccagaaaatgaaaatctgaaaccccaacctttgctagtgcctttaaaagtcacactcagtaaagatgaaattaatacatttaagcagtttcaggcgttaatcagtgattttgggattgttatcgacatctctcatggtaaagcgacgatccacgcggtctcgttgccgttgcgacagcaaaatttacctgtattactgacaaagctattagcttatttggcaacagaaaaattatgctctaaacaacaaattgggcattggttagcaaaacagttaagtcatgagtcgggtgtttggtcacaggctcaggcagtaggattattggctgatattgaacgattatgtccacaatatgtcagacagccgtccaaaaacttattacaattaatagaattacaacctgtggtagcggcactgaataatgagcgaagtaaaaacgcaaataaaacctaa

SEQ ID NO: 315752 - DNA, 1317 bp, Proteus mirabilis
atgtcgagtctcatcactattgtgagccaatgtcagcgttatattgccacctttttgttggttgttctgtcactttttgtggtgcaaatagcacaagccgctacggtaacagaagtgaaggccgaaaatggggatgtggctacaacacttacattttcgtttagtggtgggaaaccaagctatagatattactcactgaaaaatccagataggttagtgatggattttaagcaaggtagccaaataacgggtttacctgtgacattaaatcgtcagcaattagcacagaaaattcgcacgacacaatcaaaagatagccaatatcaaagtatggtggtagagcttgccaaaccagtggtggtgacggagcgcttgttaaatagcaatggtgaatataagttagtacttactatcaaacctattaatgctcgacaaaataacaatacatcaacgacggtcagtgtagtggcgttatcagcaaacaaagccacaaatacggtggctaatcaacagatggcgcctttagtgagtacacctaagcaacccgttgcacctgtagtaccggtaaagcctcgcacaacctcgaataagcccgcgtcgagtgatcggcaaataattattgcgattgacgcagggcatgggggtcaagatcccggcgctattgggcaaaaaggtaatcgtgaaaaagatgttaccttaagagtggcaaaaaaattagaagcgattttgcgtaatgatcctatgttcaaacccgttttaacccgcaatggcgactattttatttctgttgctggacgctctgaagtggcccgtaagcaaggtgccaatatgttagtgtctattcatgccgactctgcacctaatcgtagtgcgcgcggggcatctgtttgggtattgtcaaatcgtcgcgcgaatagtgaattaggtaaatggcttgaacaaagcgaaaaacaatcagagcttctcggtggcgctggtgatgcactcgcagaaggggttgatccctatttaagccaagcagtattagatttacaatttggtaattcacagcgtgtaggctatgacgttgcggtagcggtgttatctgaacttagaaaagtaggatcattacataaaaaaacaccagagcacgccagcttaggggttttacgttcacctgatattccgtctattttagtcgaaacaggttttattagtcatgccgctgaggaacaattgctgatttcagatgcttaccaagagaaattagccgcttcaatctatgccggattaaaaaattactttctcgctcatcccttacagaatgggccaaaataa

SEQ ID NO: 315753 - DNA, 474 bp, Proteus mirabilis
atgaatatgaaagaatgggttgttacattagaagatgaagctgcaacagtaaaactagggcattcagtcgcaatggcgacaaataaccaagggcttattatttatttatttggtgatctaggggccgggaaaaccacctttagccgcggatttttacaagctttaggtcatcaaggtcatgttaaaagtccaacatataccttggtagagccttatatgctgacaccacgcccagtctatcatttcgatctttatcgcttagcttcagcggaagagttagaatttatggggatacgtgactattttgcacaagatccactgtgtctcattgaatggccttctcaaggggaagggtttatacctaatgcggatttagagcttcatttaagctatgaaaatgaaggtcgtaaagcccattttattgccctttcacagagagggaatgctgttttatcccgtattcagtctgcataa

SEQ ID NO: 315754 - DNA, 1155 bp, Proteus mirabilis
atgtcatcactcgatcttcatcaccttgctcaaaatataaaacgttggggaactgaactaggattccaacaaacaggaatttgcgatactgatttatcgctcgaagagcctcgtttacaagcttggttagataaacagtatcatggtgaaatggcatggatggctaaatatggcatgactcgagcaagaccccatgaattggtgccgggcacattgcgtgtgatcagcgtcagaatgaactatttgccaacagatgccgcttttgctcgtacccttaataatccagagcaaggctatattagccgttatgcattaggtagagattatcacaaagtattaagacaacgccttaaaaaattaggtgaaaaaattacgcaatattgccaacagtttgaatatcaaggtattgttaattttcgcccttttgttgattcagcgccgataatggaacgaccattggccgtgaaagctggccttgggtgggttggtaaacactcacttgttatcaataatcaggccggctcttggttttttctcggtgaattattaattaatttacctttgcctattgattctcccgttgaagagcaatgcggtaaatgtgtagcttgcatgaccacttgcccaacaggcgccatcgtagagccttacaccattgatgctcgtcgctgtatttcttacctaacgattgaacttgaaggcgctattcctgaagaatttcgccctttgatgggcaatcgtatctatggttgtgatgattgccaattaatttgcccatggaatcgtttttcttcgctcacagaggaagatgatttttctccgcgccgtgccttacatacaccagaattgctggatctattccaatggagtgaagaaaaatttctgcgtattacagaaggttcaccgatccgacgaattggctatttacgttggctaagaaatattagtgttgcgttaggcaatgccccttatcaggacaaaattgtactggccttgcaagagcgctttggtttaggggaggttttagatgaacatttgcactgggctatcgcccaacagaaagccaaaagagaagaaaaaacactaaaaatacagacttcacaacaaaaacgtctagtaagggcaataactaagggcctacctcgtgatgcttag

SEQ ID NO: 315755 - DNA, 270 bp, Proteus mirabilis
atgcgttactcagaacaaatcaaaccaattagttatttaaaagctaatgccgccgaagtgatgactaaactcactgaatctggtgcaccgatgattattactcaaaatggcgaagcaaaagcggttattcaggatattaccttttatgaagagacacaggaaacattagccttacttaaaatattggcgttaggtcagcaacaagttgaagcaggtgaagtaaaagatataaaaagcgttgttcagcgtttaaaaagtaaaaggaaataa

SEQ ID NO: 315756 - DNA, 327 bp, Proteus mirabilis
atggcgtcctataaagtggtaatgacgaaagatgccgaaacagacttagaggacatcaataactatattgccgaccacgacagcatagataatgtagattatgtattagatgagctgcttaaggtcactaatacactggctaactttcctatgaaaggctgtattccaaaggaattacaaagtttaggtattcgtgaatatcggcaaatcttttttaaaccttatcgtgtcatctatcacacaatagcaaaacaagtggttatctttattattgcggatggcagacgagacatgcaagccctgcttactcggcgacttttagggtaa

SEQ ID NO: 315757 - DNA, 897 bp, Proteus mirabilis
  misc_feature (847)..(856): n is a, c, g, or t
atgaatacacctacaacattatcctcagcaaataggctgagcttacctgtagaaggtatgacatgtgcttcatgtgtcggacgtgttgaacgagcattaaaggcagtacctgaaataaaagatgctgtcgtgaatcttgcaacagaacgtgctgatattacatttagcagtacccccaatcctgtacttgctgtaagcgcgattgaaagctctggctataaagttcctgaagagatcactgaattagctattgaagaaatgacctgcgcttcctgtgtcgggcgtgttgagaaagcattagctcaaattcctggtgtattagaagccaccgtgaatcttgccactgagcgtgctcgtgtgcgtcatttatccggcgtagtatctattactgatttagaagtggcggttgtccatgccggttataaaccacggcggctatcagataatccagccaatactcgtgatttaagtgaagagcgtcgtgaaaaagaagcccgctcgttacgccgagcattacttattgccactatcttcacattaccagtgttcgttattgagatgggctcacattttatccccggagtccatcattgggtaacgcaaacattagggcaacagctcaactggtatattcaatttgttcttgccaccatagtgatgtttggccctggcttacgctttttcaaaaaaggaatacccgcattattacgcggtgctcctgatatgaactcattagtatcagtcggtacagtagccgcttacgggtattctgtcgtttcaacctttataccccaagtcttacctgcaggtacggcaaatatctattttgaggctgctgtcgtgattnnnnnnnnnngtcgtgattgttaccttgatcttattagggcgaaatcttga

SEQ ID NO: 315758 - DNA, 756 bp, Proteus mirabilis
atgcgtgcggctaaaaaagtggtgagaaaaaaactgacttcggggcctgcattaccgggtaaattagcagattgtacttcgcaagatttacgttataccgaactcttcttagttgaaggggactctgcggggggctctgctaaacaagctcgcgatcgtgaatatcaagcgattatgcctctacgtggtaaaattcttaatacttgggaagtctcttctgatgaagtattagcgtcacaagaagtgcatgatatttctgtggcgatcgggatggatcctgatagtgatgatttaagccaattacgttacggaaaaatttgtatccttgcggatgcggactccgatggtttacatatcgccactttgctttgtgctttatttgttcgtcatttcccggcattagtaaagcaaggtcatgtctatatggctatgccacctctttatcgtatcgatttaggtaaagaagtgagttatgcccttgatgaagcagaaaagaacgctattttgcaacgccttagccgtaaaaaaggtaagccaaatgtgcaacgctttaaaggcttaggtgagatgaatccactgcaattacgtgagacaacgcttgatcctaatacacgtcgtttagtgcaattggtgattgatgatgaaaattatcaagaaacgttgggcatgatggatatgttacttgccaaaaaacgttctgaagatcgccgtaactggttgcaagaaaaaggcgacgaagttgacatcgaagtgtaa

SEQ ID NO: 315759 - DNA, 228 bp, Proteus mirabilis
gtgcctgtttgtgtctctaccacacaaggtaagataaaattaaatcgctggaataatggctacgttattgttgaaatgttgcctcccattgatgtatcaaaatataacaaagatcaggtgagagaattagctgaagattgtcgtcagatcatgaaggctaaaattgaagagcttgataaagaagtggaagaaatgaataaacgcgattttgcaggtaagttaaattaa

SEQ ID NO: 315760 - DNA, 345 bp, Proteus mirabilis
  misc_feature (304)..(313): n is a, c, g, or t
atgaaaaagaatatttccctaatattatttttactattttccctcataacggctagccaagctgctggaataagtgtgggaggaacacgttttgtctatgacgataatctacgtgaaatcagtattccaattatgaatacagataaggaaaaaccctatttaattcaaagttgggtttcagcttatcaaggtgatgaaaaaacaccttttattgcaacacctccactatttcgtattgagccagatagttcaggcacggcgcgaatttcatataccggagcacctttggcatcaaaccaagaannnnnnnnnnagtccagagaatcaactccaattagtgattaa

SEQ ID NO: 315761 - DNA, 1116 bp, Proteus mirabilis
  misc_feature (1087)..(1096): n is a, c, g, or t
ttgtatctttatattgaaacactgaagcaacggctggatgcgattaatcaactcaggctggaacgtgcatttgcatcgatgagtgatgtgtttaaacaggtgtatggtttaattcctgttttactgcattaccaccaccctcagttgccaggctatattcaaggaaatgtccctcatggtacatgtttctttgaacctgatgacgtgcaacgtcaatgggtcaataagctgactaatgcatcatgtgatgagccaatgaatggatacaccagcggagagttacctattacgggtatctattcgatgggaagtacttcctcgattgggcaaagtcactgctccgatattgatatttgggtctgtcaccaatcttggctggaccaagatgagcgtgcacgtttacaacgtaaatgtttactgatcgaacaatgggcgggagaattaggtattgatgttacttttttcttaattgatgagaaccgcttccgtcatcatgcaagtggtagcttaggtggggaagattgcggctcaactcagcatatcctgttacttgatgagttctaccgtaccgctgttcgccttgcaggtaaacgtttgttatggacgatggtaccagtagaagaagagtaccattacgatgaatatgttaattcactctatgcccaaggtgtattaacgcccaatgaatggcttgatttaggtggattaggtgagctttctgccgaagagtattttggtgcaagcctgtggcaactctataagagtgttgattcaccttataaagccgtattaaaaagtattttattggaagcctattccgcggattaccctaatggcaaattgttggcattagaaatgaaacagcatcttcatcgtggtgaaatcgtaaattacggtttagatgcatattgtatgatgcttgagcgcgtaacccgctatttagtttcgattaatgatttaacccgccttgatttaatccgtcgctgtttctacctgaaagtttgtgaaaaattatctaatgaaaaaaatgagaatgaacctgcaggttggcgacgccaagtattatctcagttagtcacgcagtggnnnnnnnnnncgtttagcgatattagataa

SEQ ID NO: 315762 - DNA, 255 bp, Proteus mirabilis
atggaatttaagcacacgccagcgccttggaatttaaataaacgtccagatggatttaatatttatgatgagcatagtggtggatttgttgctcacgttccaaaagaatataacgcccatctaatcgcatcagcaccagagttattagaacaattaatcaggcttcgcaataaaattgcaagctataaaccagatgatgacgatgatttagacatcgttgacgctgtaatcgcaaaatacctcggtcagcagtaa

SEQ ID NO: 315763 - DNA, 255 bp, Proteus mirabilis
atgagtcaactatctgtattttcagataatttattttcaaataaatctcagtttggaactcagatcacttctttggaggggatagggcgcaaaaaagccctcgcgtggagggctgggagggttaatctttggtatggcctttttcatcaaactcaaatggcatttccatttgctcttgtccgttttgtctctcttgaagcttttgaaactgttgccacatgtgttgcatgttatcggataactgaaataatgtaa

SEQ ID NO: 315764 - DNA, 849 bp, Proteus mirabilis
atggcttttgcttatgaaaaaaatactaaaaaagggttaaccaaaaaggcaaccagctatttgttgggtttttcctataaaggaagtattgttgacgctctgaaaaaaaatgaaaggttcaaagagaatgcagattttgaagtagataaaagtacgaagataagaataagaaagcttgagtatatggatgaaagtaaatctttttttgctcattttacattttatgatccagatgcttctgtttcagttaccccttctatcaataacaataaggaaaagagcaataaagaaaacgatgatttgatgcgcattgagaattatgacaaaagacatatttttgcgattattgatgatagtgatatatacgccataagccagatagtaaactcacatcactcatctagtctgaatgcaatttttaaagctttaggctttgagcttaatgttagggataagattgataaaagtacgatacaaaaaataagagcagagaaaataaggaatattggaatcgcagttcagacaaccgcaaaagatatcgatgatataaaggtaaagtctaaactaagtattttttccaaagaagaagatgacgagcctttttatgggacattgactttagggtataaggagaacttagggttaataaatgaagctactgacaacattgaaaaatatatagatgaattatcagaggacttctttattgttacaagaaaggggagcatgatcaagagctctgaaattaagactaaaagagattatttcaccactccatacggaacaaaaacaataaaagacacaaatgcgaaagaaattctagaggatttcatcgagtatacactatag

SEQ ID NO: 315765 - DNA, 504 bp, Proteus mirabilis
atgatatttagaggcagagatatcaaatacatagcagcgtttcttgcgataccattgcttgctggcgtattgacgtttttgttttatgaaaaaataaggtacaacaaagatttacttaacttcatagctaatattttctctatattaactggttttttactgctagtaatatctacatcaggcgaagtagctgcgtcaacaatgaatggggcaagcgaagaagattcatatagaggtaagagaaaatttaacattaggtttcagaggtatttgtttttattttttctttatttgatagttttgtgtttgattttcacatactatctagtaataccccagcaacaaaatactgcaagtaatactgtcacaagtaatatcacttggctactaacctcattagaggtattgatttgcttttttagtattgtggcttttttgtgttcattttttatcccattaaaaataaagcaattatttgaagagaagattaataaaagcaactaa

SEQ ID NO: 315766 - DNA, 261 bp, Proteus mirabilis
atgtcagatgcacaaaaaaatatagatttatataaagaaatcgatgagattgcggaaaaggccattgaagcctttgagttatcatatgttaaaactgctcattctaatctccacaaaccgctactgagatggtgtgattttcttttgcgctatatagtcccagcaaaacgaatgattttaaaatcagaccgattccctattaatatttctgacgaagcaaaagtgggactgcaaagaatgcagtacttttcattgatataa

SEQ ID NO: 315767 - DNA, 150 bp, Proteus mirabilis; identical to SEQ ID NO: 303094

SEQ ID NO: 315768 - DNA, 225 bp, Proteus mirabilis
atggaatcaccacttgcacgaatgattaagcaacaggtgttcgatgccaacgtcgacaggcttgtagtgctcaatgatgagcagtgggactttatactgaatgatcaagacgaacgcgcatggtctggcggtcactactacggacacgattaccatgagtgggaaatttttatagctcacaatatcaaatatgtgaaaacaggattacgggagccgttgttatga

SEQ ID NO: 315769 - DNA, 681 bp, Proteus mirabilis
atgaatactctattagttaaccagttacaaaaaaaactgggttatacttttaaacaaaatgaattacttttacaggcacttactcaccgtagtgcaagtagtaaacataatgaacgcttagaatttttaggtgattcaattctaagttatgtcattgctaatgcgctttaccatcgtttccctcgtgtcgatgaaggggatatgagccggatgcgtgcaaccttagtgcgtggtaataccctcgctgaactagcacgtgaatttgaactcggtgaatgtttacggttagggccgggagaattaaaaagcggtggttttcgtcgcgaatctattttggccgacacagtagaagcgttaattggtgctatttttcttgatagtgatattcaaaatatcgaaaagatcatcttaaaatggtatgagaatcgcttggctgaaatcagtccgggtgataagcaaaaagatcctaaaactcgcttgcaagaatatttgcaaggacgtcatttaccactaccttcttatgttgttgtacaagtacgtggtgaagctcatgaccaagagtttacgatccattgtcagataagcggtatcgaccaacctgttaaagggatgggtacaagccgtcgtaaagccgaacaagccgctgctgaacaggcattaatacaattggagcttgaatga

SEQ ID NO: 315770 - DNA, 468 bp, Proteus mirabilis
ttgccattaagggtcgatctgcttgataaaaataatgacgttattgaacaatttcgggtgatcaccgctaatcaaaataaagaaatcatcagtgagttagattcactcaataaagtgaatatgcccccgctattgttgatccccaaagccactcaagcactgaattacaattggcgtgtgacaacgttaccagaaggatttaaagaggtaaaacgtagcaatcatcaaattgctgaaaatgaatttagccaatctattttatatagtgacggcttattcgatttctctatttatgttaacaaaagtggtcagcaattaaattcccccgaacgtgataaagcattgagatatggccgtaatacaatttatacctatgataaagatggcaatgaaattacctttattggacaattgccatttataacagcacagaaaatcgtcaacagtgtggtgtttaccaaaaagtaa

SEQ ID NO: 315771 - DNA, 261 bp, Proteus mirabilis
  misc_feature (35)..(44): n is a, c, g, or t
ttgctacttcaaccttacccaagccaccttgctcnnnnnnnnnntgctacattggaagtaataacaccgactgaggtaaaactgaccatcagtgaagggaagtaccatcaagttaaacgtatgtttgctgcgttgggtaatcatgttgtcgcgttacatcgagagcgtatcggtgatatcacattagatgatgctttagcgccaggagaataccgaccgctaacagaagaagaaatcaatagcattcatctacctaaataa

SEQ ID NO: 315772 - DNA, 138 bp, Proteus mirabilis
atggaaagctcatttacgccaacagaagaactactaaacactcgcgctacacaacagaaatcgcttaacaaagatattccttaccaagaaattttgttaactcgccttcttgtaaattttctaaactacttactttaa

SEQ ID NO: 315773 - DNA, 867 bp, Proteus mirabilis
atgaacagcagatgcgcttcgataaataaaatactgcctttttcttgtgttgatggcccaggcaatcgcctcgccatcttcctacaaggatgtaatttacgctgtaagaactgtcacaatccctacactatggggatttgtgataactgcggggattgcattgccacttgcccacagcaagcgctttcattacaaaacggtgtaataaattggaacgctgacagctgtgagcaatgtgatacttgtattcagcaatgtcctcgccaatcaagccctatgacattgacctatacggttgatgaactaattgcaattacgcgtaaatatgcagcctttatcaatggggtaacagttagtggcggggaatctacgttacaacttccatttttaattgattattttaaagcaatcaaagaagcccctgatcttcgacatcttacctgtttaattgacagtaatggcactctttcacttaatggttggcaaaaaatcgccccctttatggatggagcgatgattgatttaaaaagttggagtgaagaaacacatatttatttaaccggacgtagtaatcaacgtattaaaaaatcaatcaaatggttaagtgagcataatttacttgcagaattacgccttttatatattccagaaaaaaccgattatttagagaatatagaaccgctttctcattttattaattcacttggtgaatcaattacaattcgtattaatgcgtttcatcagcatggcgtatatggtgaagcgaagaattggcgttccgcaaataaagaacaaatcataaatctacaaaatgaattaatacttagaaaagtaaatttaattaaaacaccaaatatatatacataa

SEQ ID NO: 315774 - DNA, 1542 bp, Proteus mirabilis; identical to SEQ ID NO: 311519

SEQ ID NO: 315775 - DNA, 693 bp, Proteus mirabilis
atgcttaaagataaactaaaattcaaactacaaaaaaccgcgattatactgatttgtatcgcattattggcttttttgatgcaaggtgcctcttattttagccgtgcaaatcagcacgcccgtatcacccagtttgaagagcttgccaaaacactggcagaacaagttgccttctcattatccaattatatggatgacagtagcaaagataacgtaaatccacacattatagctaatttaaatcatctaactcacgatagtcgggtactggatgcaagtctttattggcaagatggcacacaaatagcgcatagtggtgaaaatgtgacggtaaaagagcgattggccttagaaggacaaaaaagtggcggttcttttaatcatcagctggtggtgcctatccctggtcaagatcagccaaagggttttctaagattgacgttagatacacaccaacttgtcacagaatctggccaagtcgataacaccaccaatttattgcgtgtgatgctattggttgctctggcgattggttttttactgtcccacagcttattgcaattaacaccagtgcattggcagcaatcgccctatttattaaccgcaagtttacccactcgtcatgaaaaagaagatgatgaacaaaaaagtgatcagcaaaaagaaacagaaaatagatctgaagttaaataa

SEQ ID NO: 315776 - DNA, 978 bp, Proteus mirabilis
atgtcaaatagtctgacctattgctatttaccggatgagatccgtaaatggccaggtctaccgctatcactcagtggtgaagaagtgatgccactggattatcgtgcaggcgatagcggatggttactttatggacgagaacttgataaaaaaagaataagtgagttccagcataaattaggtatggctattgtggtggtttcttcatggcgtattgatgattaccaagtggtacgtattgcgggaagtttaacccgtcgtattcgtcggttatctgatgaatgtggtttagatgttgtaccctttgggcagatcccacgtttacgctctccgggacttttagtgatggatatggattccacggctattcaaattgagtgtattgatgaaatcgctaaactggccggtgtcggtgataaagtggccgagataacggagcaagcgatgcaaggtgaaatggattttagtgaaagcctaaaattgcgtgttgcacaattagcgggagctgatgcgaatattttacaaaaagtaatggataatttacctctgatgcccgggttaacaagtttagtgcgtaagcttcaggcaatggattggcaaattgcgattgcatcagggggatttacttattttgctgataacctaaaacagcgattacgtttagttgcagcggttgctaatcagctagaaattaaagatggtaaattaacgggcaaagtcaaaggccctattgttgatgctaaatataaagcgcaagtgcttacacgcttagctaaagatttagatataccgctggaacaaaccattgcgataggtgatggcgcaaacgatcttaaaatgcttagaaaggcgggtttaggtattgcctaccatgccaaacctaaagtatatgcacaagccaaagtagctattcgtcatgctgatttaatgggtgtgatgtgtattttaagtgcaggattaaagcacgaagaacgataa

SEQ ID NO: 315777 - DNA, 180 bp, Proteus mirabilis
gtgaaaacacgatatcgccaagctgatattccgtgtacagtaacaccattagatgaagataaaattgaagtccgttttgactatcctgttgctgctgttacaccggggcaatcggccgttttctatcaagacgaagtctgtttaggtggcggtattattgaaacacgtattcaggagtag

SEQ ID NO: 315778 - DNA, 1401 bp, Proteus mirabilis
atgtcattttctaaatcaatgcttgcactcgctgttatggcggtttcttttactagtcacgcagccaaacaggctgatttaatgattgtcgatggcacagtgttaacaatggacgcacaaaatcaggttatcgaacaaggaacggttgttgtaaaagaaaataaaattatcgccgttggggggcctgagttaacacaagaataccaagccaacaaagtgttagatgtggatggtgatatcgtgatgccaggattaattaatacccacacacatgcatcaatgacggtttttcgctctttagccgatgacgtgccagaccgattacatcgttatattttccctttagaaaataaaatggtgtctcgcgatatggttcgcgtgggagcaaacctcgccaatgttgaaatggtaaaagggggagtaactacctatgttgatatgtattattttgaagatgaagttgctaaaacggttgataagatgggaaatagagccatcttaggtgaatcagtgattaattttccggtggctgatgcacaaacccctcaagaaggccttcaatatgctgtcaattttattaatgaatataaagatcacccgcgtattactcctgcctttgcacctcatgcaccttataccaataccacagagaacctgcaaaaaattgctaaactatcggtagagcttgatgctcctgtgatgatccatttagcagaaaccgatagagagaaagaagaaattgcaaaacgaaccgatggtaaaagcccagttcaatatatggcagatattggcgctttaaataataaagtcattgccgctcatgcgattatggttgatgagcaagatattgatttattaaagaaatatgatgtaggtgtggctcataatattagtgctaataccaaatcagccaaaggtgtttcgcccgttgttgccatgctagaaaaaggtgttcgtgttggtttagggactgacggtcctatgtcgagcaatacactcacaacgatgaatgagttaaatttagtaggcaaaattcataaattagagaataaagatcgcgccgcaatgccaccattaaccgtcgttgaaatggcaacaataggctcagccaaggcattacatatggaagataaattaggctctttagaatcgggaaaacttgctgatattattgttgttgatactaaagcacctaatatggtgcctatgtatagcccatatgcagcattagtttatggtgcgaatggaagtaatgttcgtcataccattgtagatggtaaaattttgatggaagatcgtcagctgttaaccgtagatgaacaagcgattatcagtgaagctcaaaattttgcgaataaagtacgtcaaaccgttgttgatagtggtgaagtcgttaaatag

SEQ ID NO: 315779 - DNA, 171 bp, Proteus mirabilis
atggaagataataagtcagatattggctggggtagccaaatccgctcttatgttctagatgattcacgaattaaagatttacgcactggtgtggaaacgcgtaatacacaagcagtgttagatggtgatctcgataaatttattgaagctagcttaaaagcgggcctgtga

SEQ ID NO: 315780 - DNA, 555 bp, Proteus mirabilis
  misc_feature (526)..(535): n is a, c, g, or t
atgagtacaaaaaatttatcaacacccttgctgatggtagcaactgtgttagcagggatgctatcaccaatgcagtctgcggtgaatgggcaactgggacatgtattaaaagacggtaatgctagtgcagttatctcttttgccagtggtttagtggtcatgttttttatcattatgtccaaaaaacaatatcgccagcaatttgcttctattccgacattaattaaaacacgtaaaattccattatggaattggtttgctggcctctgtggcgcaatggtggttttttctgaaggagcatcagccagtgcattaggaatagctacattccaaacagcattaatttcagcactgttattatcaggtttattatgtgaccgctttggtataggtgtggatgagaagaaatacttcaccccatatcgtgtattaggtgccgtattagctgttgttgctactctttttgtcgtttctccgcagtggcattcaacctcttttatttacttagctattctaccttttttannnnnnnnnnggatggcaaccagcaggtaa

SEQ ID NO: 315781 - DNA, 213 bp, Proteus mirabilis
atgttgacgggcatgaaagcgcgactaattaatcctgaagagccattaaatgcccaagagcgacaattattaaatattgtggaagagcttagtttaagtgcgactttgggctatatccctaagctttatattttagatacaccagaagccaatgcctttgctgccggctggtctgaaaaaatgcctttattggtgtcactcgtgggttgttaa

SEQ ID NO: 315782 - DNA, 231 bp, Proteus mirabilis
gtgtaccgcttccaaaatgattataatgaaattgcacatcctgcggtcatgaaggcaattacagatacagtaggtcaacgttatgatggttatggtatggataccctttgtcatcaagctaaagaattaatcaaacagcgaattaaacaacccgaagcgcagatccatttttttaatggtggcactatcactaatttaaccgctatttcatacaatcacaccctgtattga

SEQ ID NO: 315783 - DNA, 1077 bp, Proteus mirabilis
atgttacagttcaatataaactcacaaaatggctcaatgccacatattcgtgtagagaatattcaaaagagatttaatcaatttattgctttagatggtgtttctttagagattaaacaaggcgagttagtctgcctattagggccttctggatgtggaaaaaccacattattacgttgtattgccggattagaaacacaagatcacggtagtatctttaattacgataacaacatctcacaccttccccctcaagcccgtgactatgggatcttatttcagtcctatgcattatttcctaacctgacggtacagcagaatattgcgtatggtttagccggtcagcctcgtaatgtgattaaaaatcgcgttaatgaaatgctggagttagttggtttacaagaccgaaagaaaaaatatccaggagaattatctggcggtcaacaacagcgcgtggcattggctcgtgctttggctcctgctccttctttactattactggatgagccaatgtcggcattagatgcacaagtgcgtgaacatttgtgtgtggagctacgtaatttacagcaaagcttaaatatcactacgctaatggtcactcataatcaagatgaagccatgctgatggctgataggatagctgtaatgaataacggcaaggttgaacagtacggcagtagtgaagagatttacaaccatccacaaacaccatttgttgcagagtttgtaggaaaaggtaactggttacctttcaatagaaatcagcacggtgaggcgatgattggctcacgagaagtccaattaaaacatactgcagtacctcataatcaagggcgtctcttttgtcgacctgaatcaatcaaaattaacccaatacaaaacaaacataatcaatacgatgccaatatacaaaatgtggtgtttttgggaagtcgttgcattatgaagtttgaattagaccatttaccgggacatttattacaagccgagatctctgctgctgagctacatagtattcaaaacggtaaagttaaagtgactttaccggctaatgaactacacatatttgcgtaa

SEQ ID NO: 315784 - DNA, 1692 bp, Proteus mirabilis
atgtcagtgatagtacctaccaaatctattaatcgtttagatagtttgtttgttgctggtggtaagttatttattatttgcttacttactcttggggttttattgcctttattggctattttctggcgaggttttacgcctgatatatcacaaggtggtggttttcaggctgccattgatttgttcaccagtgctaattttctgtggttggtgggtaacagtattagtgtttcgttaagcgttgctgttattacggtgccactggcttacctgtttgcttatgctctacatcgcaccttgatcccttttaaatccttgtggcgtggaatatcactattacccttactcgctccttctatgctaccgggtattgcattggtttatctatttggtaaccaagggttattgcgtagcttactcacagagagtatttatggttattggggattagtgcttggtgaggtgatctatacttttcctcatgcgctaatgattttactctccgcattatccatgtctgatgctcgtttatttgatgctgcatctagcttaggggcctcttcttggcgcacttttcgtagtgtcacttggtcatcgagccgacatgggattttcgcagcattgtgcttggtatttacgttaactattactgactttggtattccggttgtcgtcggcggagattatcaagtactggcgttagaagcctataaagccgtgcttggtcagcaacaatttggccgcggtgctttaatcggtatgttgttattgctacctgcattgttgaccttcggtgtcgatgtttggttacgtaaacgtcaacgtgatgcaatgagctcgcgtgcccaattctatttaccaaaagctaattttcagcgtgacacgctttatctaatatttgtgatgcttatttgcgcgctatttttattggtatttggtacggccgtttactcctcttttattcagttctggccttataacttatcgttttcgttacgtcattataattttgaaggattgcctgggggatggctcgcctataccaacagtattattttggcattttacactgccactatcggctgctttctgatctttatgggcgcttacttaatagagaaaacggcttctcactcttggcttaacaatctgctacgtatgttaagttttgtaccgatggccgtcccggggttagtgttgggattagggtatgtatttttctttaacttaccgaataatccactgaactttttatacggcagtatggtgttattagtgctgtgctccattgcacactttttcactactgcctatatgactgcgagcacggcactgcgccagttagataaagaattcgaggcagcttcattatccttaaaagcgcctttatatcgtcacttttggcgtatcactattcctctttgtttgcctgcattattagatatttatcgttatctatttgtttctgctatgacaacggtttccgcggcgatcttcctttatagcccagacactattttagccgcggttgcggtattaaatatggatgatgcgggcaatattggtggcgcggcagctatgtcgacattgattttaaccacctcggcaggagtttcgatattgttatctattgcttcgcaaggtgttcttcgccgtacacaagcgtggcatcagcgtgaagctaaacaataa

SEQ ID NO: 315785 - DNA, 849 bp, Proteus mirabilis; identical to SEQ ID NO: 313827

SEQ ID NO: 315786 - DNA, 312 bp, Proteus mirabilis
atgaagatggcagaggatgatcaccaaccccctcttattcgtggacgccgtgtaaaaatgaaatatgcccatgctgggggatataatccacctgtcgtggttattcatggtaaccaagtgtctgatttacctgatagctataaacgctatttaatgaattatttccgtcgcacactacaagtgatgggaactcctatccgtattcaatttaaagaaggggaaaacccttatgcggataagaaaaataaattaacagcttcacaaatacgtaaacgtaagcgtttaatggctcatttaaagaaatcaaaataa

SEQ ID NO: 315787 - DNA, 510 bp, Proteus mirabilis
atgcaacagcattttccatgggatgtcattctctgtgttgaccaaagtgcatcaatgtctagttccattatgtatgcagctgtgtgtgcgagtattttagcttcattacctgctgttaatgtctccttaatcgtgtttgatactcaagttgtcgatttatcacacttagccgacgatcccgtagaagtgttaatgacagtccaattgggaggaggtacggatattgctagtgccatgcaatattgcgaaagcttagttaacaaccctaagcgtactgttatttcgcttatcagtgactttgaagaagggggagcattaacccgattattagattgcacacaacgtctcaatagccaacaagttaaattattaggactagcagcactagatgatgaggctcaaccggtttatgactcaactatcgcacaaaaactcgccgatagaggtatgcaagttgcagctttaaccccagaacatttcgcacagtggctagcagaggtaatgcaatga

SEQ ID NO: 315788 - DNA, 291 bp, Proteus mirabilis
  misc_feature (279)..(288): n is a, c, g, or t
atgaaatttactcctcaacataaaatggatgctgcattaatggcaggcgcatccttaaacacacccaataatcattcaatacaagagcaacatcatcgtttaaaagatgatgctaccgttagtgcttatatgagccagaattatatttctgtttctgtcgcagattcggttgaacatgtaaaagcacagctggttaatgatttaaaagatgaattaattccgacttatctgtatgtcgtagataaagataattatcttaacggtattttgccggttaannnnnnnnnntga

SEQ ID NO: 315789 - DNA, 777 bp, Proteus mirabilis
  misc_feature (19)..(28): n is a, c, g, or t
ttggtatggttggtaaatnnnnnnnnnnaatatgttgaattaccagatgcctataaatcagtgattgaagcattaaaacatggtggtttcaaaagccgtgttgcggtaaatatcaaattaattgattctcaagatgtggaaactcgtggtgtagaaatcctaaaagggttagacgcaatcttagttccaggtggttttggtgaacgtggtgttgagggcaaaattatggcagctcgatatgcacgtgaaaataaaatcccttatttaggcatctgtttaggtatgcaggtggctatgattgaatttgcacgcaatgttgccaatatggaagatgctaactccacagagtttgcacctgattgtaaatacccagttattgcgcttattactgaatggcgtgatgagaatggcaatcttgaagtgcgtacagaaaatagtgacttaggtggaacaatgcgccttggtgcacaaccttgtcatttaagtggcgatagtttagtgcgtactctgtatggtaaaaatacgattacagagcgtcatcgtcatcgttatgaagtgaataatctactgttaaaacgtatcgaagatgcgggtttacgtattgcaggtcgttcagttgataacaagctggtggaaattattgaaaatccaaatcatccttggtttgttgcttgtcaattccaccctgagtttacctcaacgccacgtgacggccatccgttatttgctggctttgtgaaagcagcctttgactaccaaaaaggcttgctaaaatag

SEQ ID NO: 315790 - DNA, 309 bp, Proteus mirabilis
  misc_feature (26)..(35): n is a, c, g, or t
gtgccaattatctgttatttttgtgnnnnnnnnnngatcttacctcgtcaccaacctaaacgtatctcattattaaaaggaacgcttatcgccgcaattggctttgagatcttaaagtcggtgatgacatggttattacctagattagccagttcaccttctggtgcagcttttggctctgtgattggtttaatggctttcttctacttttttgcacgactaacgctcttttgtgccgcttggattgcaacagatggacctaatatgcgcaaagaaaaacacaagagtgaaactcaatctatcacctaa

SEQ ID NO: 315791 - DNA, 261 bp, Proteus mirabilis
  misc_feature (225)..(234): n is a, c, g, or t
gtgaaatttggtacatcgggtcaccgaggcagtgccaaacgtcatagctttaatgaagcacatattctagcaattgctcaagctattgctgaagtccgagctaataatggtgtaacggggccttgctatgtaggtaaagatacccatgcattatctgagcctgcttttatttcggttttagaagtgcttgctgcaaataaagttaacgtgattattcaagagaannnnnnnnnnttgacgagtatgttgcccagctcttga

SEQ ID NO: 315792 - DNA, 747 bp, Proteus mirabilis
gtgaaattatctgaagcatatccagaagcaatggataactttaatactgatgagccgttagttagcgaatatcttgacggttctgcatgccctactttagatgctttcgatgaaaaatttgctgttgaaaatgagtatgacggtactcaatggaaacctattgaatataagaatttcaaaaaactaggaacgaagcctagaattgcgtgtttacttttatttggaaagactcaaataacaaacaaagagttctcttttacattgaaatatcttgctggcacagaagatcccaaaattcgtaatatcgccacaggccttgctgaaataacaaaattatctttgatggatgctgaacaaacgatggaaatagcacaggctatctatgagtttgctaatgaagatgtcaccgttgaagaagctaagtcattaggtgaaagttggctaacagaagaaccagaacaacaacaagaaaagatatcttctatcaagcgtaactattcaaccatagatactgaaatcgccttagcactgttagatgattttgatcctaataatgtcctcgcatctcaagtaaaaaaagcaaaagaactgatagatgacgacgacaaagcatggaagcgctggtcaatggatttacgcacaacagctggcatcttagatatacctcgtgaaaagatttttgcattaatagctgaaagtaaaaaacagcctgagttattagataaccctaatgcacgaaaagattga

SEQ ID NO: 315793 - DNA, 1113 bp, Proteus mirabilis
atgcacgaaaagattgatctgcatttgggcattagcaaacctaacgacactgaaaaagaagaaattactactaaattaattcaaacagataatgcctctttaatatccaaagaaaatactgttgagaaagaaactaagcctaaacgttcgcgtaaaaagcaagaagtagcgcctaaggcagaaacagctcaagtgattgagcaaactgcagaacctaaagagcctgaaatcccatcagtacagcacgacaattttgaacaacgagctagtgtgcttgatgaagttcttaacgcaggtgattccaataatctacatatctggaaacgcgtgcaacgaacagacccaagatttaccaagccattagaaggtgtagggtttgcaggaactagcataaacagcaattacatgattatgcgtgctactgaaatatttggccctatcggtgaaggttggggatatgaagtccttgaagaaaaatttattgatggaaagcctcttgtagaacctgttctcgatgaacgtaataaacaagttgcaacccgttttttacgtgatggtgatggagcgttattctgcgaacaaaaccactcaattaagatccgtttttggtacatcatcgaatgtgaaacccgcggtgagtttgaaagttatggtgcaacaccataccgctatcaaactaactatggcattaaagttgatggtgaagctattaaaaaatcactcactgatgccatcaaaaaagccctatcgatgcttggttttagctctgatgtctttatgggtatgcatgataaccctgaatatatagtaagcaataagcttgagtttgaaatcaaaaatgccagtgaaaaagcggaagatatcacacgtattcgcaaagaattagacgaaaaatttactaaacatacagaagtgatgcgtagtgctgttacagcaaatgaattacgaggcattgcatcgacattaacgcgcgaaatttctgcacatattaaatcagccaaagaacgtcgtgacgaagattacgagaagtatttgtctggccgtttacgtcgattaaaccaaatcgaaaaagagtgtttagacaaactgaaacagaaagaagaggcaatctaa

SEQ ID NO: 315794 - DNA, 843 bp, Proteus mirabilis
  misc_feature (783)..(792): n is a, c, g, or t
atgcgccgattttggaaatatgcatcccccatttattctaatggaagaaatattgcatcgagcattcctgatgattatgtgtcgtcacgggtgcagaaacccatgccaacgaaacgatatactgatattgagtccattgccaccttatggatgaacgttgcttcaagcacctctgtgcatcaaaaaaatgcagttagatatatgatcctcactggagttagaccaatcaatgttgtcaatttaaagtgggaatatgttgatttagataacttagaaataacttatccagctggtttaattggtatgcgtggtgcaatgaaaacgcaaaaagagtttagagtgccaattacaaaggcaatgaaaagcttactcgaggaacaattagcttggaaaaattccactgttaattgcaataaagaatatgttttcctacaacctagagatccacaattagcgttttctaaacgttcattggataaactagttaaaacatatagccctgaaggggcggtgaagggtgtagtgcatgagggaacggtgaagggaaagtccggagcatttaatactatgtgccgtaagttttttaaaagtaatataattgcacaaatgcgtcaaaaaggcttttcacgttctgatactaaagaaattagcatgctatgtttacatcactctgataaaagtgaagatccaatggctgaacattatgacttttctgatgagatactgcaggaagagatagcgctaaagcgtcaagcatttgaggctcatgaaaatagtatcttnnnnnnnnnncgctattacgtcgtaaacttagttaataagtgctcttacatttttcaataa

SEQ ID NO: 315795 - DNA, 411 bp, Proteus mirabilis
atgtcaaatatagcaacacaaaagcaaaaaacaccagataatgatgaatatacagacgctcttagtcgttgggagtcatgtaagccaccttacacaagtacacacataagaatctgtgttactgctgtcaaaaccattttagagcatatcaataaaccacgtcgctctaaatatgaaaaagagcactacttgcgtattgattttagtaaggcgggtaaggttaccatatacgcggaatatcctaaacacatggatataaaaggccagaaattaggggaatggccagaactatcattaccgatagcaagagagaaagcgaaagcattagctgaagaagggctaagagctgaatctgttcatcaactattagatctttatgaaaaagatttagcagggaaagtcgaacgctga

SEQ ID NO: 315796 - DNA, 1653 bp, Proteus mirabilis
  misc_feature (1617)..(1626): n is a, c, g, or t
atgacaactcttaatagctcaaaaaaaccacagaaagacaagctcaattctgttgtttttttcgcttccgcaacgctgattttagcgttctcttttttcactattttaatgacagataccgccaatgcgtggatcattaaaacactaggttgggtatcaaaaacctttggttggtactatttattagcggcaactttgtacattgttttcgttattttcgttgccacatctcgctttggtaatattaaattaggcccagaacaatcaaagcctgaatttagtgtattaagctggtctgctatgttgtttgccgcggggatcgggattgacttaatgtttttctcagtcgctgagcctattacccaatatatgctaccgcctactggcgaaggtgaaacaatagaagcagcccgtcagtcgatggtgtggacattattccactatggcctgacgggctggtctatgtatgcactgattggtattgcactcgggtattttagttatcgttataatttacccttgaccatccgctctgcactttatcctatctttggcaatcgtatttatggccccatcggtcatactgtcgatattgctgccgtattgggtactatttttggtattgccactaccttaggtattggcgtagtacaacttaattatgggttgaaagttctcttcgatttaccgcaagggttaggtgtacaaggtggtttaattctactttccgtaattatggcggtgatctcagccacatcaggtgtcaataaaggcatacgtattctttcagaattaaatgtattactcgctttagggttaattttatttatcctatttgctggtgatactgaatttttattaaatgcgttagtacttaatgtcggtgattatgtaaatcgattcttaggaatgacactaaatagctttgcttttgatagaccaacggattggatgaatagctggacacttttcttctgggcttggtgggttgcttggtcaccttttgtgggcttatttttagcacgtatctcaagggggagaactatccgtcaattcgttataggcaccttgatcatcccttttgtattcacgctattatggttgtctatctttggtaatagtgcactttatgaagtgatccacggtaatcaaacctttgctgaaacagtattagcctcaccagaaaaaggcttttattctctacttgaactctatccgggatttggtttaaccgcttccgtagcgactattacaggattacttttctatgtaacctcggcagactccggttcattagttttaggtaatttcacttctcaactgagtgatataaataatgatgccccaaattggctgcgcatattctggtctatcgctattggtctattaacattaggtatgttaatggcagacggggtttctgctttgcaaaataccacggttattatgggattaccttttagctttgttattttctttattatggcaggactatataagtcattaaaagtagaagattttagacgcgtcagttcattaaacaccaatgcgccagcacctctttatggtaacaccaccatgaactggaaacagcgtctaggtcgagtgatgaatttnnnnnnnnnngtactacctatacccaacggatgttag

SEQ ID NO: 315797 - DNA, 402 bp, Proteus mirabilis
atgttagatttagtttgtaccccagcgatgcaagatgtggctaatgagctgtcattacgtggtgcaaatgtctcgtttaatctttacccgttggaagaagagcctcgtttaaaccatttagaattagtggttgatttaggccaagaacagcattttatttatcaaatatggccacaaaaatattcagtacctgcatttacttatcgtgctcgtcgaggaaaatcccattattaccggctagaaacctatttatgggaaggttcacagggtaacgatttaatggactacaccaaggagcaagtgatcagtgatattctcgaccaatatgaaaaacacttaaactttattcacttaagtcgtgaagcgcccggtgcaacattaacatttccagaatcaaattaa

SEQ ID NO: 315798 - DNA, 999 bp, Proteus mirabilis
gtgagtatttataaagctgctgctaaatttaaattaggccatttctgggctcaaggtggatatattcaacctaaagggcaaacattattacgtcctcattggagtttcttacctggtacttatcgcggtgcagaagcgggcgctgtatttgatttcgataaaaatggtgaactctctttctcatatatgtggactgatgaatataaagcgccgtggtatcggaatatgtacaatttccgtaaggcagacttagagacaaatatcagttatttacactcttttggtgccaaatatgattttaaaaatagcttagtattagaagccgcatttggccaagctgatggttatattgatcaatattttggcaaagtttcttacgatttccctatcgcaaataatacattaaaaacctcttatcaattctacggtgcaaaagataaagtcaccggagggggaattaacgatgtttatgatggtttggcatggttacaagcattcactttaggctatacctacaatgtatttgattttaaagttgaaggtacttgggttaaagcagaaggtaaccaaggttactttttacaacgtatgacgccgggatgggcaacctcgaatggtcgtttagatatctggtgggatggtcgttctgattttaacgccaatggtgaaaaagcattatacgcgggagtgatgtatgatctaaaaaattgggatctaccgggctgggcgattggtacttcctatgtgtatgcttgggatgcaaaaccgagtagtaaccctatttatgaccaaagtaaacgtattagagaaagcgcatggaatgccgacatcatgtataccgttcaagaggggagagcgaaaggtacgttatttaaactccactacactcgttatgataaccattccgatataccaagctatgaaggtggttttggtaatatcttccaagatgaaaaagacgttaaattcaatgtgatcatgccatttacgattttctaa

SEQ ID NO: 315799 - DNA, 573 bp, Proteus mirabilis
gtgtttgcagcactggcagcagctatcgtttcttctttagcttccatgcttaactctatcgcgactattttcacgatggatatttataaagaatatattgggccaaaatcctcagaaacccgcttagttaatgtgggacgtattagtgcggtgattgcattgattattgcttgctttattgcgccactgttagggggcattgatcaggcattccaatatatccaagagtacacaggtttagtgagtcctggtatcttagctgtattcttgttaggactattttggaagaaaactaatgccaaaggggcaattataggggttgtactctcaattccttttgctttattcctaaaattaatgccactaggaatgccattccttgaccaaatgatgtatacctttattttcaccgcggttgttattggtttggtcagcttaacctcaacgaaaagtgatgatagcgtaggggcgattgtattaactgatgcaacatttaaaacccaaagtgggttcaatattgcttcttatatcattatgatcatcctctgtgtgctttatgctgtattttggtaa

SEQ ID NO: 315800 - DNA, 1113 bp, Proteus mirabilis
  misc_feature (1045)..(1054): n is a, c, g, or t
atgcatacagaaggtgttggattaagcacaatagattatgcaatctttgccctctatgtcatcattattattagccttggattatgggtttctcgttcaaaagatggagctaaaaaaggaacaaaggattacttcctcgcgggtaaaacactgccttggtgggcgattggttcttctcttattgctgctaatatctcagctgagcaattcattggtatgtctggctcaggattttcgataggtcttgctattgcatcttatgaatggatggcagcattgacgttaatcattgttgctaaatactttttacctatttttattgaaaaaggcatttataccattcctgaatttgttgagaatcgttttaaaagtcgtaatttaaagacgatcctcgccgtattctggttagcactctttattttcgttaacttaacatctgtattgtatttgggatcattggcgttagaaaccattcttggtgtgccgatgatgtatgccattattggtctggcactatttgcggttatctactcgctttacggtggactttcagcggttgcatggacggatgttgtacaagttttcttcctgatcctcggtggacttttcaccaccgtacttgctgttagctatatcggtggtgatggcggaataatggaaggcttaagtaagatgacagccgccgcgccagatcactttaaaatgatcttagcaaaagaaaacccacaatttatgaatttgccaggaattgctgtgctaatcggtgggctatgggttgctaacctctattactggggctttaaccaatacattattcagcgtgctttagccgctaaatctattaatgaagcgcaaaaaggtttagtgtttgccgctttcttaaaactgattgtgcctattttagttgttgtgccggggatcgcagcttttgttatcacaaccgatcctacgctgatggcaggattaggaacaatggcacaggagcatatcccaaccttagcgcaagcggataaagcctatccttggttaacacaattcttacctnnnnnnnnnnggggttgtgtttgcagcactggcagcagctatcgtttcttctttagcttccatgcttaa

SEQ ID NO: 315801 - DNA, 195 bp, Proteus mirabilis
atgcgtgataaatttagttatagcaccacaaaaattgcatttcgacgtagtggttttttacgcggttatatgtatgactttatgtggcgttttgccccacatctaacacgtaatttggtggaacaagcgacagctttacgcaccaatgaagaaattgaagagttatttaaagatatcgagttacctttagtttaa

SEQ ID NO: 315802 - DNA, 1062 bp, Proteus mirabilis
atgaaattacaacagttgcgttatatcgttgaagtggtgaataacgatttaaacgtctcaacgacagcagagcgtttatatacctctcagccggggatcagtaaacaaattcgtatgctagaagatgagttgggtatacaaatattctctcgcagtggtaagcacttaacacatgtgacgccagcgggggaagaaattgtcagattatctcgtgagatattatccaaaacagaagctatccgctcggctgcaggggaacacacttatcctgatcgcggttcgctttctattgccaccactcatacacaagcacgttatgttttacccccagtgattaaaggttttatagaacgttatcccgaagtgtcattacatatgaatcagggttcaccgacacaaattgcagaagatgtttgccgtggtaaaagtgattttgctatagcgacagaatcactacatctgtataacgatttagtgatgttaccttgttatcgttggaatcgtattgtggtggtaactaaagatcacccattggcgcaaaagcgtgaagttaccttacaagagcttgcaacttacgatatcgttacttatacccatggttttactgggcgttctgatcttgacgaagcctttgtgcaactgttattaggtgcagccattaatgcagcttcaccgtcattagccgagtttatcgattttttacgcaatcagggacaacaaattgaactaggaatacgccaatcctttgatagctataaaacaataactattgcaggtgtgacggaaatccttaatcataataatcagcttatttttgtacctaaattaaaaataatgagtctacgtttctcacatcgaacagccaaaatgttattagccagttgttcggggcgaaaatttacgatttcagtagaatacacaacaatcacctcaatttttgatattggtgcacttaatgatccactgattaatcgacaattttatgcttttttaaataagtttcgtcagttgagtattactcaatctgattcattttttagtggggattttttattgcaatag

SEQ ID NO: 315803 - DNA, 1017 bp, Proteus mirabilis
gtgggcgcttctgtacgtaattttggtcacggattaattttgggtcaagcgccgggaaaaatgctagatttagcaaaaaatagtcgtgaaatttgggcaactatggccaaacaggctaaatttttaacgcgtcaaaaagggacttatctgttagcacgtacacaatctgagcacgctgttcttgaagcctttgtcgatggtcgagctaaaacctatggttatgattgtgaattactttctaaaacacaattagccatggtttatggtggtcaattgcaacaccatagagcggcattgcatggcaaagaagatcaggtgctattttcgcgagaagcgatcccacagttagcggcttatctaggcagcttagctaatgtaacgagttatttttccacattggtacgggatattgatgtagatacgggggcattgatcaccagcaatggaacatttagtgcagaaaagatcattgtctgctcagggcacgattatcaaacattactggctgacgaaataaaaaagcttgatcctatagtttgccgcttacagatgttgcgagtgacagcagagcaaaatattggattggcgcatgcgctaatgacgggattaagttgtactcactatggtgcatttgctgatttacctgaggcacaggctttagcgaaagaaattaaaatgcaatcgccgttgattgagcagtatggtattcatttattaattaccccgactccttatggcgatcttattattggtgattctcatgaatatagcttagatgcacagccttttaacagcgaagaggttgataacctcctgatagagttagctgagcacacattaggttgttcggttcaagtaaaagagcgttggcaaggagtttatggggcaaaaggaaaggagccgatttcaattttaacgccgagtgaaaaagtcactgcagtattgatgcgaacgggtttaggaatgagtgttgggcctggtttaggtgaacaaaatattcgtcaactatttgattaa

SEQ ID NO: 315804 - DNA, 837 bp, Proteus mirabilis
  misc_feature (816)..(825): n is a, c, g, or t
atgtcatccaatgccaaacaggcgattattgatgcacttccccatgcttttcgctatccagatgatgcgcgaagcgcacttatcagtgcattaggtgaagaatttaagctatcagacaaacacatcactctaggtaatggctcctctgaaaccatacaagcagccgtacaatatgtggcgaataaagcgcaaaaagcaggtaaaacagtacaactgattgtgcctgatccaacgtttaattatgccgaactttatgctgaacctttaggtgttaatatcgtaaaagtgccggttgataacacattggcttttgatttaaccgccatgcagaaaaaagcacaagcatttgatggtattagcatggtatatctgtgcaatcctaataacccaaccgcaatgctgacaccaacagcggcattaacaaattggatcacctcagcaaaagaaaatgtcttttttattattgatgaagcttacgctgaatttgtgacaacacctgaatttaccagtgcgatagcattagttgctcaaggttataaaaacttgattgttacccgtacattttcaaaaatttatgcattagctggattaagggtaggctatggtgtggcagtccctgaggtaattagtgaagtagatagtttcgtttctattgataataccaatactgccggtgctgttagcgcattagcctcgttaaaagatcacgcttttgtggcatatagtcgcaagtcaattgatgtatcacgacaaatggtggttgatactttaaacgccttaaatatcgagtatgcaccttctcacgccaactttatnnnnnnnnnnaaggtgatgtga

SEQ ID NO: 315805 - DNA, 606 bp, Proteus mirabilis
  misc_feature (576)..(585): n is a, c, g, or t
atgatggattttataatacaactagccattatattagtttgtttattttatggagcaaggaaagggggaattgcattaggtctattaggcggagtggggctggttattttagtctttatttttaatttacctccgggtaaaccgcctgtcgatgtgatgttagtgattattgctgtcgtctctgcatctgcaacgttacaagcatcgggtggtttagatgttatgttgcaaatagctgaaaaattattaagaaaaaatccgaagtatatttctattgttgcacctctcgttacctgtaccctgactatattatgtggtactggacatgtggtttataccattttgcctattatctatgatgtatcgattaaaaataatattcgtccagaaagaccgatggcagccagtaccattggttcacaaatgggaattatcgcaagtcctgtatctgttgcggtcgtcaccttagtggcaatgttaggtaatgtcacttttaatggtaagcatcttgagtttttagatttattagcgattaccattccatcaacctttattggtattttagccattgggatnnnnnnnnnnggtttagaggtaaagagttag

SEQ ID NO: 315806 - DNA, 651 bp, Proteus mirabilis
atgaacgtattgaaaatctttttctgcacattgctccctttactcttcacttcaccgggaaaggccgaaaataatcttaatcagaaaatgattgaggaattaactcaatgccgtttggaatcatctcagctaattcgtttagattgttatgacaaaattgcgctttcttcaacatcttcctccaatgcactgcctgatgttactcaaatgggtaaaacatggcgccaagcaacagagcatgaaatgaaacggacgggaaacagtgcaggttttctcgtctcagtaccagaaaccggtgattatcccgtattaatgaccattccagcgattggctttcaaccgcctcgccccatcttaatgctgagctgtattgataacattactcggatgcaaattatcctgccaacaaaacaagatgctggcagtgtgatggtttcaacggataaaacacaatttactgcagaatggtttttacgtgaaaacggttatgtattggaatcaagccgcggtataccgggcatagatgaaattaaacgcttgttaaatgctgaaagattgacattgaaattatctaataacgaaaaactcaccttcaatatttcaggtatttcacaacaaataatccctttaagagcggcttgccactggtag

SEQ ID NO: 315807 - DNA, 462 bp, Proteus mirabilis
atgaaatacgggaaactctatgccatcatcgcgatggtaggcattattgtgggtagctattggatgattagctggcaagctaacaggattaatttactgatagataccaacaaaaaactgacagtggctctcgaagaacagaagtctattaatactgattaccaagcacgcataatgcgattaaaccaactggatattcaatatacgcaggagctagcgaatgctaagaatgaaattagtcacttgcgtgatattagtgagcgtcatccagagcgggtgtacatcaaagccgagtgtcccaaagtcaaaaccactccctccaccagcttggcttatgcaaccaccgcccgacctactgacaccgctatccgaaattattggttactcagagagcgaattgcagagtcagaacagatgattaaagggttgcaggattatatcaaacaagaatgcatggaataa

SEQ ID NO: 315808 - DNA, 588 bp, Proteus mirabilis
gtggcaacaaaaacactatcaacaaataaaatacttagtgatatagataagacaccacaatcaatcagtgtcattacacgcgaccagatggatgcgcaagatgtcagttcagtctctcaagcattgcggtatacacctggcgtattcactgaatatcgcggcagttcaaaccgaaatgatgaaatatttattcgtggatatagctatgccccccgttttcttgatggacttagttatggtatgggagcctcatcttctacaggagctattgacccttggctattagagagagttgagctgatccgtggcccgtcttctgttctatatggtcaattaaatccaggtggtcttgtggcaatgaccagcaaaagacccacttcaataaccattaatcatattcaagcacgtgtaggaaatgataaattagcagagacagcttttgattttgcaggctcattaagtgatgataatcgtattctctatcgccttaatggattagcaaaaacacaacatactcaaattaaagactataaagaagtgcccttgcccctgccatcacttttttgccaaatgagcagacacgtttaa

SEQ ID NO: 315809 - DNA, 459 bp, Proteus mirabilis
atgcagggtgcaatgacacgaattttattgggaagcgttatgttcagcgctgctatttgtcaggttcaagctgaagcactgcggcctgatcctgcttggcaagaagggcgactcgcaaatggtttccaatggcaaattttacaaacaccacaacgtccaaatgataggatccaaattcgcttattagtgaatacgggctctttatcagaaaagcgcagtgaaacagggttttcatctctggtgtcaaaactgaatgtgttagaaaacaccggattaacaccagaaaaacgcgataatctttggaaaaatgcattcgatcctgattatccattgccaccgatgatcgtctcttatgactttacggtttataacttaagcttgcctaataaccagcctgaattattaaaagatgcctttgcattattggcgggaaaagtcaccaccggaagcggtgattga

SEQ ID NO: 315810 - DNA, 306 bp, Proteus mirabilis
atggtcccctctggtatcaatttattaattgtaaaaggcccagaacaagcccaatgtgaagcagtaaaaatagaagatgcagaaaaaacggtttcgatgtttaaaacattaggttatcactgtattttaaactatacaaaatcccgtcaaatctactttctagagcaatttcatatcactattgatgagagtaaacttgctgactataaattacagttacataacttagcatatcaatttggctttaatgatagtgagcaagagcatcataactataaaacaatacttttaagtaagttagcttaa

SEQ ID NO: 315811 - DNA, 1743 bp, Proteus mirabilis
gtgccgagatactccgttatctacgttctctgtctgtcttctataacgtcttttgcttatggggcaaatttacgtttaaaagtagaaggtttagaagggcaactcgaaaagaatgtacgagtccagctatcaaacataacaacagaagaagttgcaccagacgggcgttttcgtgcgcgtgttgaaaaggcaattaaagagggcctacggcctttaggttattatcagccaacggtcactttctcttatcaagaaaatacccctccgacacgccctgtattaacagcaaaggttgagcttggtattcccgtactgttaaaaggggtcaatattgtactggaagggggagctaaaacagatgaacaatatgccaaagtgattaaagaaaacaccccccctcttgatagtgtgttaaatcatgccgaatatgaaaaattaaaaggctcgttaacagggcttgctattcgtcgtggttactttgatgcagatatggaaaaaagccagctcggtgtctctttagataatcacgcctcgtattgggattttgtctttaatagtggtgaacgttaccgttttggtaaagtgaattatactggctcacaaattcgtgaagactacctacaaaatattgtgccttttaaagaaggggaatattactcttctgaagatttggcagagtttaatcgacgcttagctgccacaggatggtttaattcggcggttgtcacacctaatatcgctaaagcacgtagtgaaggcaattatttgctaccaatggatgccgttgttacccctcgttcacgtaactatatggagctagggggcggttttgccacagatgtcggacctcgattaaatatgcagtgggataaaccttggataaattctaggggccatagtttaacatcgaatatgagtatttctaagcctgagcaatctattggtgctaattataaaattccattaaaagttaacccattagaacaatattatggcattcaaggcggctataaacgtacagatttaaatgatactcgttcggataccaccacactgaacgtttctcgtaactgggatatgtcaacgggatggcaatacagtattaatacccgctggagtctgagccactttacccaaggtgatgtgaccaatacaaccatgttgctttatcctggtgcgaatgcaagtcgcgtacgccaacggggtggcatgatgccttattggggggatagccaacgttattcagtcgattattccaataaaatatggggatctgatgttgaatttctcgccctacaagctcagcaagtgtggatacgcacaccttgggaaggccaccgttttgtggtcagagggacgtttggctggattgaaacgaatcaatttgagaaagtaccacccgaattacgtttctttgctggtggcgatagaagtattaggggttataaataccaaagtatttcaccggaagatagcaaaggtaaattaacaggggcatcaagaatgctaacgggatctgctgaataccaatataacgtaactggaaattggtggggagctgtatttgttgatagtggtgaagccgttaacgattttacgaaaagtgattttaaaacaggtgcgggtgcgggggttcgttgggcatctccagtagggcctgtaaagtttgatttagccgttccagtcaatagtggtgaagagcgtaagttacagttttatattgggttaggagctgagttatga

SEQ ID NO: 315812 - DNA, 1374 bp, Proteus mirabilis
atgcttaatagtttactcattgtgcttttgctgtgtgccattagcgcctttttttcgctgtctgaaatatcactggcggcctcccgtcgtattaaactcaaacagttggttgacgaaggaaatatcaacgccgctcgtgtattaaaaatgcaagaaacccccggtatgttttttaccgtggtacaaattggtcttaacgccgttgccattttggcgggtattgtcggtgaatctgctttttctcccgcattaaaagatctcttttcccgctttttagaagcacctctcgcgcaacaattaggatcggtctgttcatttattatcgtcacatcgatgtttattctgcttgccgatttaacccctaaacgtatcggcatgatcaagccagaagtcattgcactgaaaattgttaatcctatgcgtttttgtctcgccttattccgccctttagtttggttgtttaatggcatggcagatcttatctttaaactatttaaaatcccgatggtaagaaatgaagatattacatctgatgatatctttgcgattgtcgaagccggtgcagtagcgggggtattacgtaaacaagagcacgaattaattgaaaatgtgtttgaattagaatcacgtaccgtaccatcagccatgacaccacgtgaagatgttgtctactttgatcgcgaagagacagaagaagatattaagcataaaattgccacccagccccactctaaattcttagtttgtgaaggggatattgaccatattattggttatgtagattcaaaagagctactcaaccgtgtaatcaatgggcaaagtctcaacctcaaagaaggtgtgcatatccgtaaagcccttattattccggataccttaactttatctgacatgctagaaagctttaaaacctcaggggaagattttgccattattctcaatgaatacgcgatggtgatgggcgttatcaccttaaatgacgtgatgaccactttaatgggcgatctgattggcccgggtcaagaagagcaaatcgtcagtcgtgatgagcattcatggttggttgaaggtggaacacctattgatgatgttatgcgtgcattagatattgatgatttcccggattctagcaattacgaaaccattgcagggtttatgatgttccgcttgcgtaagatccccaaacgtactgactatgtgaagtttgcaggttataaatttgaagtggtggatattgataactataaaattgatcaactgcttgtcactaaaattgatgatattccgccagtaaaaccggttttgcaagaagcaatacctgctcctcaaacaacgacagaagtgccatttgagcacgaagagcataaagcctaa

SEQ ID NO: 315813 - DNA, 561 bp, Proteus mirabilis; identical to SEQ ID NO: 305172

SEQ ID NO: 315814 - DNA, 1449 bp, Proteus mirabilis
gtgaaaataactgacaatccctatttccgtgaacaaggatatattgacggtatttggtgtgatgcaaaaagcaaagacacggttgaagtgattgatcctgcaacaaatcagcccattggtactgtgccaaatatggcaacagaagaagccaaagcggctgttgatgcagccgccaaagcattaccgacatggcgtgcgttaaccgcacatcaaagaagcactttactgcaacgctggttccaactgatacaggataacaagcgtcaacttgcagaactgatgacatttgaacaaggtaaacctgttgccgaagcggaaggcgaaatcacctacgcagcctcatttattgagtggtttgctgagcaaggtaaaagaaccaacggtgaaattatcccctccccttcatcagataagcgtcttatggtgatcaaacaagggattggtgtttgtgcggctatcacaccttggaacttccctgctgccatgatcacccgtaaagcagccccagcattagcagctgggtgtactatggtgataaaacctgccaacgaaactccctatacagcccttgcgttagctgaattagccgcgcaagcaggaatacctgccggtgttattaatattgtcaccggtgatgcagttaaaatcggtgaagtgttcacatcagacaaccgcgtgcgtaaattgagttttactggctctacaggggttggccgtctattaatgcgccaatgtgctgacagtgtgaaaaaagtctcactggagctagggggaaatgcgccatttattgtctttaatgacgccgatattgagaaagcggttgcaggtgctatgggggcgaaattccgtaacgccggacagacttgcgtgtgtgcaaatcgtttttatatccataaagatgtatatcaacaatttagtgaacgctttgttgctgaggttaaaaaactaaaagtcggtaatggctttaccgaaggcgtgactattgggcctcttattaatcataaggcggtagaaaaatcacaatcactccttgctgataccttacaacgcggtgcgacactgctatgtggtggtgaaagagataaagcaggtgaaaatttctttcagcctaccgtggtcggtaatgtgcctgctgatagtcatattcttgaagaagagatctttggccccgtggcacctttagtcatttttgacaatgaagaagaagtagtacatctagccaataataccatctatggcttagccgcttatttctacagtgaagatccacaacgtatttggcgtgtggctgaaaatctagaatatggcatggtcggtattaacacgggtctaatttccaatgaagtggctcctttcggtggtataaagcagtctggcttaggtcgtgaaggctctgagcatggtattgaggactatatggaaatgaaatacctctgccaaggcctgtaa

SEQ ID NO: 315815 - DNA, 648 bp, Proteus mirabilis
atgcaaaaaccaatcctttcttgtcttttgattatgggttttttaggtagtgctatgtctgttttggcacatggacatcatcatgaaaaagtacgcacacaagcacaaatagatgctgcgaatgggatttttgaggacaaggacgttctcaatcgctcattaagcgattgggatggcgtatggcaatctgttgaaccctatctgcgtagtggcgaattagatatcgttttgcaaaagaaagcggagacaaagcaagataaaacagtagaacaatatcgagcttactatacacaaggctataaaaccgatgttgatatgattggtattgagaataatatcgtagagtttcatcgtggtgataaagtcgatagctgtgaatatcactatgatggttatcgtattctacattatcaatcgggtaaaaaaggtgttcgctatctgtttagatgtgacgatgccaacagccaagctccacggtttattcagtttagcgatcatattattgcaccagaaaaagcacagcattttcatctatatatgggaaatagttcacaagatgaattacttaaagagctaactaattggccaacctattacccttattcaatgaaaggggaagatattgttcatgaaatgctttaccactaa

SEQ ID NO: 315816 - DNA, 126 bp, Proteus mirabilis; identical to SEQ ID NO: 295415

SEQ ID NO: 315817 - DNA, 249 bp, Proteus mirabilis; identical to SEQ ID NO: 295416

SEQ ID NO: 315818 - DNA, 660 bp, Proteus mirabilis
atggttcgtgctagtatggcaacaagaaataaaaaagaggttacaattagtgatagtgattcacagttcaatcatgaggtgaatatgggcaaattcccaggcttacatcgtcgagcaatcgttgttattgccattattttgttagtcgtttttttctggccaacaagtgaagataccatcccacctcaaccctcatcttcgacacaagatcttcctgtgcctgtagcaccttctgtctcaaatgaaacacaaaatgtccctaatacactaccaccagcacaagatagtctaaatgctgagcaagagacagaagacttaccagaagaaggtgaagccaataataccaatgacaatacgccagtaaatacaacgcctcaaacaccgtcaaccgcgactgaaaattggcaaacttataccattaaagaggggcaaacccttgcacaactatttagagataatcagttgcttgtcaatgatgcgtttactatggcgaaatcagaaggcccacaaaagccgttaagccagttacgcgccggacaaaccattcgtttacaacgaggttcacaaggtgaagtgagtatgcttgaagtgactgacaataccggtactgttattaccttcactcgtctaagtgatggtagttattatcgtacgccatag

SEQ ID NO: 315819 - DNA, 450 bp, Proteus mirabilis
atgcaaattattctgcttgataaagtagcgaatctgggtagcctgggtgatcaggttaacgtaaaatcgggctatgctcgtaactatttaatcccacagggtaaagctgtttctgcgactaagaaaaacatcgagtttttcgaagcgcgtcgtgctgagttagaagctaaattagctgaaactttagctgcagctgaagctcgtgcagcgaaaatcactgcactgggatctgtcactatcagctctaaagcgggtgacgaaggtaaactgtttggttcaatcggtacacgtgacatcgctgatgcagtaactgcagctggcgttgaaatttgtaagagcgaagttcgcctgccaaatggcgttctgcgtacaactggtgaccacgaagttcacttccaagttcacagtgacgtattcgctgaactgaatgtaatcatcgttgctgaataa

SEQ ID NO: 315820 - DNA, 228 bp, Proteus mirabilis; identical to SEQ ID NO: 295419

SEQ ID NO: 315821 - DNA, 318 bp, Proteus mirabilis
gtgacggctaatcgattagtgctaacaggcactgtgtgcaaagcattgatacgaaaagttagccctgctgggatcccgcattgccaatttgtgattgaacatcgttcaacacaagaagaagcgggattaaaaagacaatcatggtgcagaatgcccattattgccagtgggaacgcgttacaaactgatactcacagtataacggtcggtagcaaagttaccgtttcaggattcattagtagccatcaggcgagaaatggattgtttaaactggtattgcatgccgaacagattgaattgatagattctggagactag

SEQ ID NO: 315822 - DNA, 396 bp, Proteus mirabilis; identical to SEQ ID NO: 295421

SEQ ID NO: 315823 - DNA, 744 bp, Proteus mirabilis
atgagcgaagatattatttatggtattcacgcagtaaaagcactgcttgagcgtgatccgacacgttttaaagaagtttatgtgttaaaaggacgcgaagatcgtcgtttaatgccggtgatccatgcgctggaagaacaagggatcttagttcaagttgctaatcgccaatggttagataatcaaactgaaggtgcggttcaccaagggataattgctaaagtaaaacctagccgtcagtaccaagaacaagatttaccggacttattagctgaagtaggtacaccttttctattagtgttagatggtgtgactgatccacacaacttaggggcatgcttacgtagtgctgatgcggctggtgttcacgcagtcattgtaccaaaagatcgctcagctcaattaaatgccacggcgaaaaaagtcgcttgtggtgctgcagaaagcgtacctttgatccgtgtaaccaatctggcacgtactttacgcttactacaagaagagaacatctggattgttggcaccgcaggggaagcggatcatacattatatcaaagcaaactcacagggcctttagctttggttatgggggctgaaggtgaaggaatgcgccgtttaacccgcgaacattgtgatgagttaatcagtattcctatggcaggctcagtctcttcattaaatgtctccgtggcaaccggagtttgtttatttgaagcaatgcgtcagcgtatttctgtaaaataa

SEQ ID NO: 315824 - DNA, 2490 bp, Proteus mirabilis
atgtccaaagatccttttcaggatagagaagccgaaaaatacgcctctccaattgctagtcgtgaatttattttagaagaaatgaagaaacgcccggccccgatgagccgtgaagatatcgcgcaggcattgaaaatttcaggtgaagaaaatctggaagcattacgtcgtcgtttacgggctatggagcgagatggtcagttagtttttactcgacgtcagtgttatgccttacctgaacgcctcgatctttggaaaggtaaagttatcggtcaccgtgacggctatggttttttacgtgcggaaggccaaaaggatgatctctatctttcacaagatgaaatgaaaaaaaccatgcatggtgatgtgattttagcgcaacccctaggcatggatagaaaagggcgtcgagaaggtcgcgtcgttcgtgttcttgaacccagaaacagccaaattgttgggcgctattttattgagtcaggtatgggatttgtggtacctgacgatagccgtttaagttttgatattcttatccctaaagaagatatcatgggcgcacgtatggggaatgtggtggtggttgaagttaccacaagaccaacacggcgtactcaagcggtaggacgcattgttgaaattttaggtgaaactatggggacgggaattgcggtagaaattgcactacgcacccatgaaattcctcatacttggccacctaaagtagaaaaagaaatcgctgatttaaaagaggatgtgccagagtcagcgaaacaaggtcgcgttgatttgcgtgatctccctttaattaccattgatggtgaagatgcgcgagactttgatgatgccgtttattgccagcgtaaaaaaggcgggggctggcgtttatgggtggcaattgcagatgtgagctattatgtacgccctcaaactgcattagacacagaagcgcgtagccgaggcaattcggtctatttcccttctcaagttgtccctatgctgccagaagtactgtcgaatggattatgttcattaaatccacaagtcgaccgtttatgtatggtttgtgaaatgaccgtttctgaacaggggcgcctttcatcttataaattctatgaagccgtaatgagctctcacgcgcgaatgacttacaccaaagtatggaaaatcattcaaggtgatgaagagttacgtgagcactaccaaccaatcgtaaaagatattgagcacctttatgagctatatcaagccctcgataaggcgcgtgaacagcgtggtgccattggttttgaatcggaagaagcgaaatttattttcaatgcagaacgtcgtatcgatcgtatcgaaccggttgtacgtaatgatgcacataaattaattgaagagtgcatgattttagccaatattgcggcggcgcgttttgttgagaaaaatgaagagcctgcgttatatcgtgtgcatgataaacccaaagaagagagcgtaatgaatttacgttcggtatttaatgaactgggtttaacgttaccgggaggattaacaccggagccaggcgattatgcgcgggtcatgaaagaagtcgaagagcgtccagatcacgaaatgctacaaaccatggtattgcgctccatgaaacaggcgatttacgatcctgaaaatcgaggtcactttggtttagcattaaaatcttatgctcacttcacttcacccatccgtcgttatcctgacttagcattacatcgtgctattaaataccagatagcgaaacagcaaggccatggctcacaacgctggaccccaacggggggctatcatagtgatatggataccatgcttcagttaggggagcactgctctttaactgaacgtcgggcggatgaagcaacccgtgatgtggctgattggctgaaatgtgattttatgcttgatcaaataggtcagcaatttaccggtattattaccagtgtcactggtttcggtttctttgtgcgcttaaacgatctatttattgatggtcttgttcatgtatccacattaaataatgattactatcaatttgataatgttggacaacgtttaattggtgagtcatcaggtcaggtatatcgtctgggtgatgaagttgaagtgaaagttgaagcggtcagtatggatgaacgtactattgacttctcattgatttcaacaacacgtaaagcacgtaaccccgggaaaacagcacgtgttcgtgcgttaaaagggggaaaagacaagaaaaatgcgagcagtagtaagtctcgtcgtcgtgatgccagcaaagacaaaaactttgaacctgatagtgcctttaggaaaggtaaatcaagtaaagaaaaacagagtaaagataaagtcattaaagagaaaattgcgaaggacaaggcgagtactaaacgtaaaaaagcctctgcacaaaccaaaaagatagaggcgaaattaaaagccaaacgtgcggcgaaacgcactaaagcgtag

SEQ ID NO: 315825 - DNA, 429 bp, Proteus mirabilis; identical to SEQ ID NO: 295424

SEQ ID NO: 315826 - DNA, 1299 bp, Proteus mirabilis
atgagtaataacgttgtcgtattaggcacccaatggggtgacgaaggcaaaggcaagatcgtcgacttgctgacagaacgcgctaagtatgttgttcgttaccaaggcggacataacgcaggtcacaccctagtcattgacggtgaaaaaaccgttctccacttaatcccatcaggcattcttcgtgaaaatgttgtcagcatcatcgcaaacggtgtcgtattatcgccagaagcattgatgaaagaaatgacacagcttgaagagcgtggtattcctgttcgttcacgtctactgctgtcagaagcttgcccattaattctgccttatcacattgcattagataacgcccgtgaaaaggcgcgtggtgagaaagcgattggtactacgggtcgtggtattggtcctgcttatgaagataaagtcgcacgccgtggtttacgtgttggtgatctatttgataaaaaagcattcgctcagaagcttaaagagatcatcgaataccataatttccaactggttaattattacaaagttgagcctgttgattaccaaaaaaccttagacgatatcatggcgatcgctgatatcttaactgggatggttgttgacgtttctgacttactttacaaagcaacacaaaaaggtgagttagtgatgtttgaaggggcgcaaggtactctattagatatcgatcacggtacttatccgtatgtcacctcttcaaataccaccgcaggtggtgttgcaacaggttccggcttaggtcctcgttatgttggttatgtattaggtatcattaaagcctattctacccgtgttggtgcaggtccattccctacagaattatttgacgaaacgggcgatttcctgcgtgaaaaaggccaagagttcggtgcaacaacaggtcgtagtcgccgtactggttggttagatattattgctatccgccgtgctgttcaaatcaactcattgtcaggcttctgcatgaccaaacttgatgtcttagatggtctgaaagaagttaaagtgtgtgtaggttatcgcttaccaaatggtgaagtgattgaaactacaccattagcagcagatgattgggaaggtattgagcctatttatgaatctatgcctggctggaacgaaagcactttcggcgttaaagataaagcacagttaccacaagccgcgttaaattatattaaacgcgttgaagagttaactggtgtgcctgttgatatcgtttctacaggtccagatcgttcagaaacgattattctccgtcatccatttgatgcataa

SEQ ID NO: 315827 - DNA, 1005 bp, Proteus mirabilis
atgcgtaaagttatcgctgttgttgcagttattattttagcgttgttgtactcctcagtatttgtcgtgcaacaatatgaacgcggtattattttacgtttctcgaaagtggtacgtgatggtgaaaataagccggtcgtttatgaaccgggtattcactttaaaattccatttattgagaatgtgaaaaaactggatgcgcgtatccaaacgatgaatatccagcaagatcgcttcttatcaggtgagaacaaagacttgttagttgactcttatctgaaatggcgtatcagtgattttagtacttactacctagctactggtggtggtaatacgatgcaagcagaaaccttattgcgtcgtaaatttagtgaccgtttacgctctgaaattggtcgtatgagtgtaaaccaaattatcactgattcacgtggtcgtttaaccattgatgtacgtaatgcgttgaatgaaggtacaccttctcgcgataaaagtgatgcagatgatgctattgctattgctgcgaagaaagtggcagaagagaccaaaggtaaagcccctgctatcaatatgaacagtatggcggcattaggtattgaagtgattgatgttcgtatcaaacaaatcaacttaccaatggaagtttctgaagccatttatcaacgtatgcgtgcagagcgtgaagcggttgctcgtcgtcaccgttcacaaggtcaagaagaagcggtgaaaatccgtgctgcagcagataaaacagtgacagaaaccttagctgaatcggagcgtgaatcgttacgtattcgaggtgaaggggatgcgcaagcaactaaactatttgctgatgcattcagtcaagatcctgacttctatgcgtttatccgtagcttacgtgcttatgagaatagctttaataaagacggtaatgacgtcatggtgttaagtccagatagcgatttcttacgctatatgaaagcaccaactaaagcgagagcgattgaagagtaa

SEQ ID NO: 315828 - DNA, 1275 bp, Proteus mirabilis
atggcgtggaatcagcccggtaacaacggacaagaccgcgacccgtgggggaaccgaaacggcggtaataataacggcgacgggaactctaacggtaatcaaggaggtcgggatcgtaaagcatcagatctcgatgatttgttccggaaactgagtgcaaaacttggcggtttcggtggtaaaaaaggaggaaactcctcttctgggcaaaatggcggacctcgtggtaatgctggaaacgtattagtttctcttgcattaggtgcagtggttgtcgtttgggctgccagtggtttttataccattaaagaagccgaacaaggtgttgtgactcgtttcggtaaattttaccaaatcgtcgagcctggtttaaactggaaaccgactttcattgatgaagttcagcctgtcaacgtaaaaaccatccgtgatttaactacgggtggcatgatgttgacatcagatgaaaacatggttcaagttgagataaacgttcaatatgttgtctcagatccagaagcatttctctttaatgtcacaacgccaatgaatagcctaggacaagcgacagacagtgccgtccgtggtgtaattggtcgttcagaaatggaaaagatcctgacatcgaaccgttcagaaattcgtgatcaaacccgtcaagaattagaagagacgatccgcccttataaaatggggatctccattgtggacgtcaacttccaagttgctcgcccaccagaagcggtaaaagcggcattcgatgacgtaattgcggcacgagaagaagagcagaaaaccattcgtcaggctgaggcttataaaaacgaagtgttaccattagcgaaaggtaacgcacaacgtatgattgaagaagcaaccgcttataaaacgagtgtggtgatgaaagcagaaggtgaggtggcgagtttcgccaaaatcttacctgaatatcgcgcagcaccggaaattactcgcgagcgtctgtatattgaaacaatggaaaaagtgttgtcgaaaacacgtaaagtcattgccaatgacaaaggtaacagtatgttggttctgcctttagagcaaatgttacgccagcaaccaaaagcgccaacgtcatttaatagtgtcacagaggcacctgcgcgtatttcaacccctacgccaagtaccaacacaacacctactcagaaaccagcaacaacttatggtaacggtggatatggtagcaataatagtggtggttatggtcagccttatggctctaatcaaggaggacaataa

SEQ ID NO: 315829 - DNA, 1284 bp, Proteus mirabilis
ttgtttgatcgttatgaaggtggcgaattagccgttttagtgcacgttttcttttcgcaagaaaaggatattgatgacttgcaagagtttgaatctttggtgacatctgccggtgtaaaaccagttcaaattattacagggagccgtagagcgcctcactccaaatattatgtgggagaaggtaaagcggaagaaatcgcagaagcagtaaaagcgagtggtgcagatgtggtgttatttaatcacgcactctcaccggcacaagaacgaaatctggaaagactttgtgaatgtcgtgtagttgatcgcacgggagttatcctcgatatttttgctcaacgagcaagaactcacgaaggaaagctacaggtagaactcgctcagttacgtcatttatcaacccgtttagttcgagggtggacacacttagaacgacaaaaaggggggattggattacgtggccctggcgaaacacagcttgaaacggaccgacgtttgctcagaggcaaaattagtcaaattctaatgcgtctaggcaaagttgaacgtcagcgtgaacaaggacgacaagcgcgaagtaaagctgatattccaacgttatctctggtgggttacaccaatgcgggtaagtcgagtttattcaatcgtataacctgtgctgatgtgtatgctgctgatcagttgtttgcgacactggatcctaccttaagacgaattcaggtcgatgatgttggtaccgtggtgttagctgatacggttggttttatccgacatctacctcatgatctggtggcggcatttaaggcaacgctacaagaaacacgtgaagcgacattgcttcttcatgttattgatgccgctgatagccgttttgaagagaacattcatgcagttgaaaatgtattagaagagattgatgctcacgagataccgacactgtatgtgatgaataaaattgatcttcttgaggacttcaccccaagaattgatcgaaatgaagataatttacctgttagggtttgggtttctgcacaaacaggtgaaggtattcctctgttatatcaggcgttgacagagcgcctttcaggtgagatcgcacacgttgaattgcgtttaccgccagaagaagcagggcgattacgtagccgtttttatcaattacaggctattgagcgtgaatggattgaaaaagacggtaaagttgggctaatcacccgaatgcctatggtagactggcatcgactttgcaagcaggagcctactttattggattacgtggtctga

SEQ ID NO: 315830 - DNA, 291 bp, Proteus mirabilis; identical to SEQ ID NO: 306863

SEQ ID NO: 315831 - DNA, 942 bp, Proteus mirabilis
atgagcgaagtaaaaacgcaaataaaacctaaagcaatctttctgatggggccaacagcctctggtaaaaccgcattagccattgcgctaagacaaaaactgcccattgatcttattagtgttgattctgctcttatttatcgtggtatggatattggtactgcgaaaccggatgagacagagcagtcgcttgcaccacatcgtttaattgatattctagatcccgcattaccttattctgccgcagactttcgtaaagatgcgttaaaagcaatggaagaaattacggctgcaggacgaattccactattagtgggcgggactatgctatattttaaagcgttattagaaggcttatcgcctttacccagtgctaatccagaaattcgtgctgaaatcgaaaaaaaagcagccgaacaagggtgggaggcaattcatcaagagctagcatccgtcgatcccgttgcggccaaacggatccatcctaatgatcctcaacgcctttctcgtgcactggaagtttacctgatttcaggtaaatcgatgacagaattaactcaaatatcaggcgaagcattgccttatgatgtttatcagtttgcgattgctccgaaagatagaaatgtacttcatcaacgcattgaagcacgttttaaacagatgttaacgtgtggctttgaagatgaagtaaaatcattataccaacggggcgatctgcatgaagatttaccttctatacgttgtgtcggctatcgccagatgtggtcatatttatccggcgaaatcgactatgatgagatggtttatcgagggatctgcgctacccggcaattagcgaagcgacaaatcacttggttaagaggttggcatgatgttcattggttagatagtgaagattttgaacagtctcttaacactgttttgcaggtagttagtgcatag

SEQ ID NO: 315832 - DNA, 2010 bp, Proteus mirabilis
atggcgattaatttattacctcctcagttagcaaatcagattgcagcaggggaagtcgttgaaagacccgcttctgttgttaaagagttacttgaaaacagcttagatgcgggtgcgacagcaattgatatcgatatcgataaaggtggcgctaagctaattcgtatccgcgataatggatgcggcatttctcgtgatgatttgaagttagcacttgctcgccatgcaacaagcaaaatatcgacactggatgaccttgaagccattatgagcatggggtttcgtggtgaagccttagccagtatcagctctgtatcacgtttaaccttaacatctcgtaccgcatctcaggaggaggcttggcaagcctacgccgaagggcgtgatatgacagtggcagtcaagccagcagcacatccggtggggagcacagttgaagtgctcgatcttttttataacactcctgcaagacgtaaatttttacgtaccgaaaaaacagagtttggtcatatagatgaagtagtacgtcgtatagccttatcccgctttgatgtgtcaattaatttaacccacaacggtaagcgggtgcgtcaatatcgcgctgtgaaagaaactcatcagcatcatcgtcgtttaagtgctatctgtggtaatcattttgttgatcaagcaatgcaactgacgtgggagcatggtgatctggcaataaaaggctgggtagagcatcctttagctccagtgcaaagcagtgaaatacagtactgttatgtcaatgggcgcatgatgcgcgatagattgattaaccatgctattcgtcaagcatatgaaggttatttgcaaggtgagcagcaaccttcttatgtgctttatttaaccgtcgaccctcatcaagtggatgtcaatgtacatcctgccaaacatgaagtgcgttttcacgaatcgcgcttagtacacgattttatctatcaagctgtcttgagtgtgttaaggcaggttacagaagatacgttatctttagatgaagaggataatggggctttaactgccacaacatttcctgaaaatcgccaagttgcgggagaaaatgttttttcgcagccttatcaagcaccagtaacctcatctacgcaaaaaaagagcacgggagcttaccaaggaagtgcaggaaaagggttaacagatacgcaaaagagtccccaaaaaacgctagatacacgtcagtttggtgagagttatcaacgtacgcaaggcatgctttatcaaaaaatgatgcaagaaagtgcgagcgatgttgaaaataaagaaaaaatacccctatttccccctcgtcccccattgaatttagttgatgttggtcatacaactaataacaatgaaacaaatgtaatttcagtggtgcctcgttctgttaatgccagcgcagcgcaaacagattatacttttggccgggtattggcgatttatcagcagaaatatgcgttaattgaatcttcgcaaggtctagggctgttagcattggaagaagctgattttctgttaaaatgtgcccagttattgccagaaaatgaaaatttgaaaccccaacctttgctagtgcctttaaaagtcacactcagtaaagatgaaattaatacatttaagcagtttcaggcgttaatcagtgattttgggattgttatcgacatctctcatggtaaagcgacgatccacgcggtctcgttgccgttgcgacagcaaaatttacctgtattactgacaaagctattagcttatttggcaacagaaaaattatgctctaaacaacaaattgggcattggttagcaaaacagttaagtcatgagtcgggtgtttggtcacaggctcaggcagtaggattattggctgatattgaacgattatgtccacaatatgtcagacagccgtccaaaaacttattacaattaatagaattacaacctgtggtagcggcactgaataatgagcgaagtaaaaacgcaaataaaacctaa

SEQ ID NO: 315833 - DNA, 1317 bp, Proteus mirabilis
atgtcgagtctcatcactattgtgagccaatgtcagcgttatattgccacctttttgttggttgttctgtcactttttgtggtgcaaatagcacaagccgctacggtaacagaagtgaaggccgaaaatggggatgtggctacaacacttacattttcgtttagtggtgggaaaccaagctatagatattactcactgaaaaatccagataggttagtgatggattttaagcaaggtagccaaataacgggtttacctgtgacattaaatcgtcagcaattagcacagaaaattcgcacgacacaatcaaaagatagccaatatcaaagtatggtggtagagcttgccaaaccagtggtggtgacggagcgcttgttaaatagcaatggtgaatataagttagtacttactatcaaacctattaatgctcgacaaaataacaatacatcaacgacggtcagtgtagtggcgttatcagcaaacaaagccacaaatacggtggctaatcaacagatggcgcctttagtgagtacacctaagcaacccgttgcacctgtagtaccagtaaagcctcgcacaacctcgaataagcccgcatcgagcgatcggcaaataattattgcgattgacgcagggcatgggggtcaagatcccggcgctattgggcaaaaaggtaatcgtgaaaaagatgttaccttaagagtggcaaaaaaattagaagcgattttgcgtaatgatcctatgttcaaacccgttttaacccgcaatggcgactattttatttctgttgctggacgctctgaagtggcccgtaagcaaggtgctaatatgttagtgtctattcatgccgactctgcacctaatcgcagtgcgcgcggggcatctgtttgggtattgtcaaatcgtcgcgcgaatagtgaattaggtaaatggcttgaacaaagcgaaaaacaatcagagcttctcggtggcgctggtgatgcactcgcagaaggggttgatccctatttaagccaggcggtattagatttacaatttggtaattcacagcgtgtaggctatgacgttgcggtagcggtgttatctgaacttagaaaagtaggatcattacataaaaaaacaccagagcacgccagcttaggggttttacgttcacctgatattccgtctattttagtcgaaacaggttttattagtcatgccgctgaggaacaattgctgatttcagatgcttaccaagagaaattagccgcttcaatctatgccggattaaaaaattactttctcgctcatcccttacagaatgggccaaaataa

SEQ ID NO: 315834 - DNA, 474 bp, Proteus mirabilis; identical to SEQ ID NO: 315753

SEQ ID NO: 315835 - DNA, 1155 bp, Proteus mirabilis
atgtcatcactcgatcttcatcaccttgctcaaaatataaaacgttggggaactgaattaggattccaacaaacaggaatttgcgatactgatttatcgctcgaagagcctcgtttacaagcttggttagataaacagtatcatggtgaaatggcatggatggctaaatatggcatgactcgagcaagaccccatgaattggtgccgggcacattgcgtgtgatcagcgtcagaatgaactatttgccaacagatgccgcttttgctcgtacccttaataatccagagcaaggctatattagccgttatgcattaggtagagattatcacaaagtattaagacaacgtcttaaaaaattaggtgaaaaaattacgcaatattgccaacagtttgaatatcaaggtattgttaattttcgtccttttgttgattcagcgccgataatggaacgaccattggccgtgaaagctggtcttgggtgggttggtaaacactcacttgttatcaataatcaggctggctcttggttttttctcggtgaattattaattaatttacctttgcctattgattctcccgttaaagagcaatgcggtaaatgtgtagcttgcatgaccacttgcccaacaggcgccatcgtagagccttacaccattgatgctcgtcgctgtatttcttacctaacgattgaacttgaaggcgctattcctgaagaatttcgccctttgatgggcaatcgtatctatggttgtgatgattgccaattaatttgcccatggaatcgtttttcttcgctcacagaggaagatgatttttctccgcgccgtaccttacatacaccagaattgctggatctattccaatggagtgaagaaaaatttctgcgtattacagaaggttcaccgatccgacgaattggctatttacgttggctaagaaatattagtgttgcgttaggcaatgccccttatcaggacaaaattgtactggccttgcaagagcgctttggtttaggggaggttttagatgaacatttgcactgggctatcgcccaacagaaagccaaaagagaagaaaaaacactaaaaatacagacttcacaacaaaaacgtctagtaagggcaataactaagggcctacctcgtgatgcttag

SEQ ID NO: 315836 - DNA, 270 bp, Proteus mirabilis
atgcgttactcagaacaaatcaaaccaattagttatttaaaagctaatgtcgccgaagtgatgactaaactcactgaatctggtgcaccgatgattattactcaaaatggcgaagcaaaagcggttattcaggatattacctcttatgaagagacacaggaaacattagccttacttaaaatattggcgttaggtcagcaacaagttgaagcaggtgaagtaaaagatataaaaagcgttgttcagcgtttaaaaagtaaaaggaaataa

SEQ ID NO: 315837 - DNA, 327 bp, Proteus mirabilis; identical to SEQ ID NO: 306870

SEQ ID NO: 315838 - DNA, 279 bp, Proteus mirabilis
ttgggttgggatattgaagcaacggcgataatcaaaggaactaataagcgagatgccgcgcaaaaattagctgatttttccgcctcaaaggaagcgatgaagctttatagtgctaattttgctgtattagctaataccagtgtacccgtaagccaaacagaattacctcgcgattatgctcaacgtttaattaaaaatgattttatttgggctgctgaaaagcgcgacaccattttaactgaatggcgtaagcgctatgacggtaagagtgcaaaataa

SEQ ID NO: 315839 - DNA, 573 bp, Proteus mirabilis
atgaaatatattattgggatcgcggtattgatgctgacggcttgttcaagtgtgcctgataaagcttattatcaattacctgatgtttatcaaggtgcaaataataaggttgttacaactactgagagcgcaaagcaagatcagatttgggttcagcctatccgtttatctgatatgttagttaacacgggcattgtctatcaaaccagtgatatcaattataccgttgctaaccaacatttgtggataaacccgcttgatcaacagctacagcaaaatctggttgtgggattagcaaaagaattccctaatcgagtggtctcgacacaacctattgaagataaacttgctaaattgactgtcaatgttaattattttcaaggtcgatatgacggcaaagtgattattgctggtgattggatctacactcaaggcaataaagtgattagtcagcctttttctgtcgcgttaacacaaacggaagatggctatccagctctggtacgtacgctaggggaaggatggcagaatgtcgtcgctgagatcgcaaaaacaattaaatcacaatattaa

SEQ ID NO: 315840 - DNA, 168 bp, Proteus mirabilis
gtgatttctgagaacaatgcgtggtgtgtgaatttaattgatactattcaaggtaattcagcagaatatgagctctatgtatttgtgaagtattcttatcatatttcacttcatcctcaaaaatggggaattcaaatttatcataaagatgttattacacacgcttga

SEQ ID NO: 315841 - DNA, 210 bp, Proteus mirabilis
gtggatgtcggttttccttgtgcagtattaatcacaacaatagggcagattggtatgatggattcgatgggaggaaaaacgattagagtaaccctctgtgggcgaggtaaccgcattattcctcattccatgatagtctccggacagatgtcaacaacctcactaggtaagcagtatttttatattgatgtgagggagtatggtgggtga

SEQ ID NO: 315842 - DNA, 225 bp, Proteus mirabilis; identical to SEQ ID NO: 301896

SEQ ID NO: 315843 - DNA, 1113 bp, Proteus mirabilis
atgtctttcttattgatcttgaatagtctttttattatttactcgatattactttctcgtggtgtttatcttgattgggaaatacacggttttgctgactggctaaaatcgttaggtatattgaaattacttgatattcctaaagtgatgttagcgagtgcacttattttgctctctttctttatgtatatgggggcgcggattgcgtggtgcgtttcattaatattattagtgacgatcgtttttttagatgtcgcggtttatcaccaagctggtactcaagcctatacttcattagcattagctattgtattggttatcagccggcgtgcttttcctcatcatagcttaaccagtgccggttttgttgcttttatctgtacgatttcgctactgtgtttctctatgttaggcagcctctatattggtgatgagtttaaaccacatatcacaacgttaatggatgctttttacttttccattgtctgtatgacaacactcggttttggcgatatcgttcctatctcaagtaatgcgagaatgtttaccctaacagtggttattttggggatcactgtttttacgacttctattgtttatgtgatgggatttttggctcgtggtactcgcgatattgtgaagaaaaggatcgctaaaatgcatgatcattttattattattggctcttcaatgttggcagcacaattagagaaagggcttagagagcaaggtaaaccggttattgcgatttgttcggataaaaagcaagccatgtatgataaagaagccaatattattgaaggtgatccaaccaatgtaaaaacattacaaacggcaaatattcgccaagcgagttgggtggcgacgttatctgaaagtgatgcggaaaatacctttattttattaactattcaagagtgtccagaccttcaagcgaaattaatcactatcattaataaagatgagaatagagaaaaaataagtcgattacgtccagatatgctgttgtctttagcttcgttaggcaaagaaattatgatgaaagtcctttgtggtgaatctattaattcgtctgatgttactgatttattaatcaataaatatttaaaataa

SEQ ID NO: 315844 - DNA, 237 bp, Proteus mirabilis; identical to SEQ ID NO: 301841

SEQ ID NO: 315845 - DNA, 249 bp, Proteus mirabilis
atgtgtgaaaatcctatggacattaatgaatccgaacaaaaaaatgctatacaacaacaaattgcggaagttcttatggactatgaacttccccctcccggagggatgaactcagcacatgtaggtcgttggatagagcaatttgaggaaagagacagacttttcattcttaagcaaacgctggcgttacttcgaaacgcatatataagcaaaagtaatttcttagatataagaagaatttttctataa

SEQ ID NO: 315846 - DNA, 1446 bp, Proteus mirabilis
atggacgtatgttatctctgcggaaataatttcaatctaagctccacagtggatcatggagagcatgttatacaacaggccataggtggaaatttagttagtaagggcattctgtgtaaacgatgtggcggtgatctcagccgtaaaatagataatccttttaatgcaatatttgaaggcatcgcaacaagattagatattaaaacagacagaaaggcaaacaaaagtccgtctatacttggtgaaataataagcgaagttgatacttatggtatgaatctcaaaggtactcaggtattttggaagggatttaaagtcgcccccgttaaaccctttcacaggtttactgaggataagaaaaatattattatctactcttccaagaaaaacttcgagaactacaaaacaacagtacagaaagaaatcgaaagtatggaattggataatcctccagaaatcattatgtgcgatgatattgactgcatcgttcaatacaaattccctatggataatgtagcctttaaaaaggggattgctaaaattgctattggttttgcctccactcacggaatctctagagagaccctacatttggcgttaaaaatcgcagaggataatcatggacatatagatgagcaagtatttttagtccaatacattcctttgagcataattgataaaactattgaaaaggataaagcaagtttagccaactatccttcgcataatttaatactctttacctccaaagaaagaccttcttatttatggtgttatgttgaattattctcaacatttcaatattacatattgttaactgataattatgagggtgaacctatttatgaataccattatcaacgtatcgaaaaagctagtgagtatgttttcactccagacagaaggcattataaagaacgtaatatgattttaagtggtttaggaattacggatgaacgaatccaagcagcgtatgaaaaacagaaagataaaaataacaaaaaaacattggaagaagtagaattcgacataatcatgcaagaaacggagaaacagaaaaacaaggttgacttcgaatacgacattaataactttgtcaactattgcgctcaaaaaacactactaagtaatgattcggactttaaatctaagatgaattttaaaaacaacttttctttgtttagtaggcttgcagaaaacagttatgatgatgaaattttcgacatatcaagttatcgccgttactatatagataacgacaaacttatagattacccagaggccttaatactaatgcgagcgagtaatgatccggcattgaaaacacatagttttttcagatttacacagctcgaaaattatggtcagaataaagggttaagagaaaaaacaaggcaggctaaaaaccttcttgaaaaatcaaaaattgagagccgttctgaatga

SEQ ID NO: 315847 - DNA, 642 bp, Proteus mirabilis
ttgaaaatcaatataaaaaaatcatttgcgaaaaaacgtgctcctacaaaatcactaaaaaaaacaatatcaaaagggattatcgcaatcatagttgcagcaggtggtgcgtgtcttgaggccagcacggacctcattaagaataattttgaaccagccctgatggcgacaagaaatttctttgaagatcagttctccccaattccggatggtgcccaacttggcctaaacctgactttttacataccgtcagctaaagctggagaaacatatgcagaaggggtatctgcaacgatcccaggagtactttgtcttaagccaaatggtcacagcattgtgcgtacatttgatcaatcatcctacgggcatcaaaccaatacagtgatacacctcacgtgtcgtccttcaggacgagtctcggtatcccttgtgcctcagagtggccatattgttaaggtttatgaggggcgatttaacgacggcgataaagttccattctctggagtgccaggaagctataacgcaggcatcttaacgatgcaccgactcgacgtacgagaacctgaaggggcatgggttcccgtaaacacttgccagcaatccaatacttgtaaatatcttgatgcttcattggaagagtaa

SEQ ID NO: 315848 - DNA, 162 bp, Proteus mirabilis
atgagcccagatagtgatttttttgatcatcttggaaccttaaacaatggttcaatcctacaagatacttataggtcttataaaaactcggaaaaaaacaattctttttcattgaatggagcattgaggtctggattcgatctcagttcattcaataactaa

SEQ ID NO: 315849 - DNA, 456 bp, Proteus mirabilis
atgccgatatgggttgatgctgatgcctgtcctaaagttattaaagagatactttatcgggcagcagatagagaaaaagtggtgatcacttttgtggcaaatcagcgattaagtatacccgcatcgccttatttgcgcacattgcaggtttctgcaggttttgatgtggctgataatgaaattgtacaacgtgcaaaccaagatgatttggtgatcactgccgatattcctttagcggctgaagtgatcgaaaaaggggctattgcgctaaatcctcgaggtgaacgttatacagagtcaacaatccgcgaacgattaaatattcgtgattttatggatacgatgagagcaagtggcattcaaacaggaggaccagcaagtttatcacaacgcgaccggcaactttttgctaatgagttggataaatggttactacagcaaaaacgtaaaaaataa

SEQ ID NO: 315850 - DNA, 483 bp, Proteus mirabilis
atgagttcagggcacgcgattgttttattcactataacccgattagtcgatacagttggtgaaaaatctcttgtattactagacgaaccagaagttcatttacaccctcctttactgtctgcttttttacgtgctttaagtgatttactggatgcacgaaatggagtggcaataattgcgacacactcacctgtcgttttacaagaaattccaaaatcttgcgtatggaaagtattacgctccagagaagtccttagtgtaactcgtccagatatagaaacgtttggtgaaaatttaggagtacttacaagggaagtattctcgcttgaggtaactagttctggttatcatgacttattacgagattcagttgcatcgggaaaatcatacaaagatatattattgaaatatagtgatcaaattggattagaaggcagagcagttttgaaagcaatggtgttaagtagggaggcgagtaaataa

SEQ ID NO: 315851 - DNA, 891 bp, Proteus mirabilis
atgaaaaaaataccacctccggttaaatctttcaatgaaatgcttgtgaaatgtgctgatggtatgagtcagagaaatgttcgtgaaaattttctttctcatattcaggcatttttgcaaatagaacaacaatatcagagtttatgttcgacaggtgccttattcacatatcctaaaactgagcctcttactgatacaacaccagttataggtaacttgactaaagttaaattggaaaatctctatgaaaataatttacgcaataaagataaacccgctcgagatttttatgattatttgatggtttcttctggggaaaaatgcccattttgtggtgatataggccaaactaaaaatcttgatcattttcttcccaaggcacatttccctgaattttctgttatgcctcttaatctaattccatcatgtcgagattgtaacatgggtgaaaaaggtgataattttgcggtaactgaagctgagcaaatgattcatccatatgttgataaagatattttttttcataatcaatgggtatacgcaaactatgttgatgaggacactggtgccatagaatattatgttaattgtcccgtctcatggcgacaagaagataaagacagggcatataatcattttgttaatttgaatattgcccacagatatagtatagaggcaggaaaacatctcagtgaagtaattgatcaaaaaaatggattcaaagaaatgttccataatatgatgccacatacgtcatcacaaatgagaagacaaggatttatagatgctgttcttcagccagtaattaattcacatgaattcaataatcattggaaaagagttatgtatcaatgcattaaagagtctaatgaatttttcagtgatatttga

SEQ ID NO: 315852 - DNA, 177 bp, Proteus mirabilis
atgagtcattttaacattggtgttgtagtcggaagcttaagaaaagattcctataataaacaaacagcaaaagcattaacctcgctatttcctcaagaatttacttttcagttccttgatatcggtactcttcctctctacaaccaagatgatgatgccaaggcattatcttcgtga

SEQ ID NO: 315853 - DNA, 1932 bp, Proteus mirabilis
atgaaaaggtttttgacaacactcgccattttgcttgtagtgattttggcaggcttaacgacattagttttgctcattaaccctaatgattttcgtggttatcttgttgaacgcgttgaaaaacaaagtggctataaattaaccttacaagatgatatgcgttggcatgtctggccaaaactcagcattattagtggtaaaatgtcattaacagctcccggtgctgagcaaccattgatcactgctgataatatgcgtcttgatgtggaattatggccattactttcccaccagttggaagtaaaagaagtgatgctaaaaggcgcagtggttagacaaacgcctgagagtaaagcaatacctaaaataaccccgccttctgttgccaatgaagacagtactcgtccgattattgagccaaaaacaaatcgttggcaattaaatattgctaaggtgaggatctccgatagtttgattatttggcaaaccaaagggggagagcaacttaatttacgcgatatcaatttattattaaaaacggacgacaaaaaacaaattaaccttgagatgagcaccaaaattaatcgtgatcgtcgcgagttaatgttaaatgttgttgctaatgctgatatgagtggctacccatatcaaatcagtggcaatatcgctcaattagattatgcattatcgggaataggacttccggctcaagggatctccggaaatttaacctcagatttcaatattaaaaatgatagtgtaaatgttattgccttaaataatttaaatatgacggcaaatgagagtcagctacaaggtagcatcacggctgaattggctaaaaagaaccgctatcaagtggaattaactggggacactttaaatttaaataccctattacctgagttagcacagcctaattcatctgaaacagcatcgttaaccttggcaaataccccgtcgagatcattctcattctttagccatgctcaggctgcaccatcacccaatgcaactattatggctcgtccggttattacctccgcgacaattgaaaacaaagcgtatgatttaacccactggggtgatattgaatttagcttaaacttagcgctcaataagttattgtataaagaattagaaataaacaatgttaaattaaccgcattaaataaccccaaatcattaaatattgataggttagaagggcagatcctaaacggaaatttctcactgcctacggtgatttctactagcattgtgccagcgcatattagtatgaatgtcacaatgaataatatccctttgcaacctttattacgcgtctttgatcagccagaaaatttcagcggtttaatttctgcaaaagggcatctagaaggtgccggatataatcgcaacgcgtttcttaatagctggcagggcacactggatacctcattaagcgaatttaaaatgctaggattaaatattccacaagtgatccagcaatctattgcacaaacaaccgatcaagtggtttaccctgaagatattgagaactataccaaagcagatagtgtgattgcccagtttaaactagcacctaaaggccgagtgacgttaaatcagttagatgctcaagcaagtgcttatcagatcagcgggcaaggtcaattagatctacaacgtcataatctagatgtgatgctgatggttaatatcaaaaaaggttggggcaaagagaatgaatttattcgccaactggccaaaatagatattccattaagattgtatggtaattggaatgctatccaatatgagtttaacgttgaaaaattactacgtgatcaattacagcaaaaagcaaaacaggccatagataattggttaaataagcaagatgatagccccgaagttaaagcgcttaatcaattattgaaaaaaatataa

SEQ ID NO: 315854 - DNA, 582 bp, Proteus mirabilis
atgcgattatgcgaccgtgatattattcagtggcttgatgaaggtaaattagtcattgaaccccgcccgcctgtcgagcgaattaacggcgcaacagcggatgttcgcttgggtaaccagtttcgtgttttccaaggacatactgcggcttacattgacctcagtggccccaaaaatgaagttaatgaggcccttgagcgggtgatgagtgatgaaattgtattaccagaaggcgaagcgttttatcttcatcccggagagcttgccttggcggttacattagagtctgtcacattaccggataatgtagtagggtggttagatggacgctcatctttagctcgattgggattaatggtacacgtcacggctcaccgaattgatccgggctggcatggacacatcgtattagaattttttaattcaggtaaactgccattagcattaagaccgggtatggtgattggcgcattaagttttgaacctatgtcaggctctgcggataggccttacaatcgtcgccaagatgcgaaatataaaaatcaacaaggtgcggtaggaagtcggattagcgaagattaa

SEQ ID NO: 315855 - DNA, 642 bp, Proteus mirabilis; identical to SEQ ID NO: 294255

SEQ ID NO: 315856 - DNA, 1113 bp, Proteus mirabilis; identical to SEQ ID NO: 314329

SEQ ID NO: 315857 - DNA, 2028 bp, Proteus mirabilis
atgtctcacgtcgcgaataaattattggtaacctgcgcgttaccttatgctaacggttcaattcatctcggtcatatccttgaacacattcaggctgatatctgggtccgttaccaacgaatgcgcggcaaagaagttcatttcatctgcgctgatgatgctcacggcacgcctattatgctgaaagctcaacaattgggtattaccccagaagccatgattgaagagatgagcaaagagcatcaacaggattttgccggttttaatatcagctacgataattatcactccacgcacagtgaagaaaatcgtcaattatcgacgaaaatttatctagccctgaaaaaaaatggtcatattaaaagtaaaacgatttctcaactttatgatgaagaaaaaggcatgttcttgcctgatcgttttgttaaagggacttgccctaagtgtaaagcgcccgatcaatatggtgataactgtgaagtatgtgggtcaacttatagcccgacagaattaattaatccacgctctgtggtatcgggttcaacgccggtaatgcgtgaaaccgaacactatttctttgatctcccagcctttagcaatatgttgcaagagtggatccgctccggtgcattgcaagagcaagtagccaataagatgcaagagtggtttgacagcggtctgcaacagtgggatatcacccgtgacgccccttatttcggttttgaaatccctgatgcgccgggtaaatatttctatgtttggttagacgcccctattggttatatgggctcattcttaaacctatgtgaaaaacgtggtgatttaagctttgatgagttctggaacaaagagagcaaaactgacttataccattttatcggtaaagatatcgtttatttccacagcttattctggccggcagtgttagaaggtagtgaataccgtaaaccaaccaacctatttgtgcatggctatgtcaccgtcaatggtgcgaagatgtcaaaatctcgcggtacctttattacggcacgtgcctatcttgatcactttgatgctgattgcctacgctattactatgcggcaaaactttcatcacgtattgatgatattgacctaaacttagaagactttgtacagcgtgtaaacagcgatatcgtcaacaaggtggttaacctcgcgtcccgtactgcgggttttatcagtaaacgctttgatggcaaattagcggcaagccttgatgatgcgaagttatatcaacatttcgtcgatatgcaagaaagcatcgcacaatgttttgaaaaccgtgaatttggtaaagctattcgtgaaattatggcattagcagacgaagctaaccgctatattgatgaaaaagcgccttgggtggttgctaaacaagaaggtaaagaggctgagttgcaagctatttgtactatgggaattaacttattccgtgtactgatgacttatttaaaaccaattctaccttctttaacagaacgttcagaagccttcttacaaactgaattaacttggaatgctctgtcgcaaccgctgttaaaccatgaaattactaaatttaaagcattgtttaatcgtattgaaatggataaagccaatgcaatggtagaagcttcaaaaagtaccattgcgccagtcaaaaaaatcactggcccattagcagacgcgcctattcaagaaaccattaaatttgatgattttgccaaaattgatatgcgcattgctgaaattaaacaggctgatttcgttgacggctcagataagttgctaaaattaatactggacttagggggagaaacacgccaagtattctccggcattcgttctgcataccctgatccgaaagtattagaaggtcgcttaactgttatggttgcaaacctagcacctcgcaaaatgcgttttggaatttcagaaggtatggtgatggccgcaggccctggtggtgaagatattttcttacttagcccagatagtggggctaaaccgggtcaccaagtgaaataa

SEQ ID NO: 315858 - DNA, 468 bp, Proteus mirabilis
atgaactctaagcgggtgcagatcacaatctggcactatatacgatcattttttatactttatctttgtctttttgccggtaatcttatttcagccttattacctttcgcggtgccaggcagtattgttggactacttattctatttggtttacttgccttccagcttattccattacgttgggtaaaacccggtggtaatattttactgaaaaatatgtcattactctttattcctatcggggtgggtgtaatgaactattataatttattaagccaacaactctttcctattgttctggcctgtgttgtcagtacctttgcggtaatggcgctagtcgcttactgctcacattacgtgcatcgtgaacgtcctattatcggtgctaaacccgataaagtagaggatgtagaattagcagaacaacaagacgacgacagagcgttaagtgagaagaaaaaatgttaa

SEQ ID NO: 315859 - DNA, 702 bp, Proteus mirabilis
atgttaatattaatgaatatttggtggtcattaccgctaacacttattattttctacttagcacgtaaactggcggctcgatttaaatggcctattttaaatccgttattgattgctattgttgttattattcctattttattagtgacacacaccgcttatgaggattattttgccggaagtcgtatccttaacgacttgttgcaaccagctgttgttgctttagctattcctttatatcaacaattacaccaaatacgcgcacaatggaaatcgttaattagtatctgctttattggtagtatcgccgccatggctagtggtacagcgattgcgttatgggctggcgctactcctgaaattgccgcctccattttgcctaaatcggtaacaacccctatcgcaatggctgttgcggattccataggtggtattcctgcaatcagtgctgcatgtgttattgcagtaggtattttaggtgccatttttggtcatacgctatttaaaatattacgtattccaactcacgcttctcgtggtttagcgatgggaacagtctctcacgcagtgggtactgcaagagcagctgaaatcgattatattgaaggggcatatagttcattagcattaatgacttgcggtattattacttcacttactgcaccctttatttttccttttattttgcacctttttagctaa

SEQ ID NO: 315860 - DNA, 885 bp, Proteus mirabilis
atgcatactcgttttcaggcaatttggtcagatttatcccctcaattacaacaagcacttacgccttatcttgagcaggatgaatttccggcaatgttcactgcagaacaagttaatgcgttaaaaacacagttacaatgtaatgatgatgagttagccctcgcattactgcctgttgcagccgcttgtgctgtgacacctatctctcattttaatgtgggtgccattgctcgtggtgaaagcggccacttctattttggggcaaatatggagtttgctggcgccccattacaacaaacggtacacgcagagcaaagtgcggttacacatgcttggttacgcggtgagtctcgtttagttgccatcacagttaactataccccttgtggtcattgtcgtcagtttatgaacgaactaaatagcggcactcatattgcaatccatctcccaggccgaaaagtggcgaccttaggtgactacttacctgatagctttggccctaaagatctcaatatcactaccctactgatggataaagttaatcacggttatcaaatagataacactagccaactggcacaacaggcactacaagcaataaatcgtagtcatgccccttacagccattctcacagtggtattgctgtacagatgaaaagcggcaagatctttcaaggtagttatgctgaaaatgccgcattcaatcctagtatgccaccattacaagcggcacttattgcattaaatatggcgggtgaaaatgttatggatattgagtctgcaatattaattgaaaaagcagacagcctattaactcagtgggatgccacccaagcaacattaacagctttaggttgccgccaaatacagcgtgtcactttgtaa

SEQ ID NO: 315861 - DNA, 1698 bp, Proteus mirabilis
atggaactggaacacgaaagtaaacgtcctctctatatcccgtatgcaggcccaatcctgcttgaatttcccctgttaaataaaggtagtgcttttagcgaagaagagcgtagcacctttaaccttcatggtttactgcctgaggcagtagaaaccattgaagagcaggtggaacgtgcttaccgtcaatatcttgattttaaaaatgataacgataaacacatctatttaagaaatatccaagataccaatgaaacgctattttatcgtctgttggaatctcaccttactgaaatgatgcccatcatttatacccccacagtaggtgaagcttgtgagcacttctctgatatttaccgtcgtgcgcgtggactttttatctcttaccctaaccgcgccaatattgatgatatgctacaaaacgccaccaaacaaaacgtaaaagtgattgtggtcacagatggtgagcgtatccttggtttaggtgaccaaggtatcggtggtatgggtattcctattggtaaactctctttatataccgcttgtggtggaataagccccgcttataccttacccgttgtactggatgttggcaccaataacccacaacgtttaaatgacccactttatatgggctggcgccacccacgtattaccggagatgaatataacgaatttgtcgatgaatttattcaagccgttaaacgtcgttggccaaatgtactgctgcaatttgaagattttgctcaaaaaaatgccatgccgttattaaatcgttatcgtgatgaattatgttgctttaatgatgatattcaaggtactgccgctgtgacattaggtagtctaattgcggcaagccgtgctgcggggcgtcaattaaaagatcaaactgtcgctttcttaggtgcaggctcagccggctgtggtattgcagagcaaattattgcacaaatgaagtctgaaggactaagcgacgaacaagctcgtgcacgtatctttatggttgaccgttttggtttgttaacggataaactgccaaacttactcgatttccaaagtaagcttattcaaaaaagcgaaacgctggccgattggcaaacagaaacggatgcaatttcactgttagaagtggttaaaaatgctaagccaaccattctgattggcgtttctggtcaagcaggacttttcactgaagagattattcgtgaaatgcataagcattgtgaacgtcctaccgtgatgcctctttctaacccaacgtctcgtgttgaagcccgtcctgaagatattattaattggactgatggacaagctcttgttgctacaggaagtccatttgccccagtcacctataaagagaaagtgtatcctattgcacaatgcaataactcatacatcttcccaggtattggccttggcgttattgcaagtggtgcaaagcgtgttactgatgccatgttaatggttgcaagccgtgcgttagccgattgctcgcctatggcaaaagaaggcgatggcccactattacctttattagccgatattcaacaagtttcacgttatattgctaaacaagttgccaaagaagcacaggtgcaaggtgttgcaacggtcacgtctgattctgctttagaagaagcgattgaacgtaactattgggagcctgaataccgtatttacaagagaacgtcattctaa

SEQ ID NO: 315862 - DNA, 726 bp, Proteus mirabilis
atgctaaagcgcctcatttatctctttttgaccctttttatcttagttgcggtggcattaattgcttgtgatcgctggataggtgtaaaaactagcccctatatattcgaagatatagataaactacccaccaaaaaagtaggcatggtattaggtactgctaaatattacaccacaggctatcttaaccaattttatcaatatcgtattcaaggtgctgttaatgcctataacagcggcaaagtgcaatatctgttactcagtggagataatgcacagcatagctataatgaacccaatacgatgcgtaaagatttaattaaagcaggcataccggcatcgcgtatcgttatggattttgctggatttagaactttagattcggtagtacgcacaaaagaagtgtttggaacagatggctttactattatcactcagcgtttccattgcgaacgagccgtatttattgcccttgaaaaaggcattgatgctcagtgttttgctgttgcttcgccgaagagtatgtttaaggtgcgtgtacgtgaagttttagccagagcaggtgcggttgtcgatctctatatattaaaacgtgaaccgcgttttctaggtccaccagaagcaatacctgctgtacaaaatattcctgatgatattaagggctatccggcggtttcaccacaagaggtagaagcgttgccattaaacaatggcaaaaacagttaa

SEQ ID NO: 315863 - DNA, 1170 bp, Proteus mirabilis
atgaatacctcaacccatccaagccattcagcacaagcctttcatatcgcttttagtggtttccttgctttagttgttgctatggggataggacgttttacttttacgcctcaagtaccgctaatgattgcggacacacaactgacattaaccagtgccagtattgttgctgcatttaattatctaggatatttagctggttcatatgatgcgatgaaagcaactaaaggtgtgggctatcggctttgggggggattatggggagcggtgatcattacactgcttagtgcggtacttaatgatgctttaactcatagtattgcccgtttttttattggttgggcaagcggttggacattagtgctcgttgcttcgtgggcaaatgaagtattagcccgtttaaatcgcccggcattaagtgtggcagtctatgcaggaacaggggcggggatctttattagtggccttcttgcggtattcattctcaagtggcagatgagtgcgacaacaggttggttgatttacggtgtgttggcgtttatttgtgcaatttatgtgagctatcatttacccaaaccttggtcaattaatcgtgagcaagtcaaagtagagccacttatcttaacgccggcgatgaaaaaattgatttggggttatacctttgcgggctttggttatattttgcctgcaacctttttatctcaaatggcggcagaacgttttcccggtagcttagttgctcaatttgtctggcctatttttggtgcttccgcagctttatgtattgggatcgcaatactgacacgtaatgtccttaatacacaattacgattggcgataacactatggttgcaagcactggggatcatcattgccgaatggctacccacaattacaggtcttgctattggcgcatttttagtggggggagggttaatgtgtgcggtgcaattggcatttttacgtggtaaagagttggcacctgatcatgctcgttatatggcaggattattaacaacattttatgctattggacagctagttgggcctctggtttccttcctttcaacggcgttaacgggaagactagagccggcattatatgtcgcctttgtgatattgatcatcggcggtattttggtttgtatgaaagaaaacaataaagggtaa

SEQ ID NO: 315864 - DNA, 501 bp, Proteus mirabilis; identical to SEQ ID NO: 307758

SEQ ID NO: 315865 - DNA, 1104 bp, Proteus mirabilis
  misc_feature (990)..(1038): n is a, c, g, or t
atggataatctatctccatctatgacttttagcccaccagtaattagcccaagcccattaccaacaggtaacccttcacaattaggaaatggttctatggtagaatcaagtgtaggtattcccccaacatcaacaactcatctaccacaaccaccattaataggttatggcgcaccaacaataggtaatacatcaggatataggacacaatttccaaatacagatgctaatccaattaaaacaattaaagcaattaaaacataccttgacatgactgatcatgcaaccgatgatcataataatttgataggtggatacatttcagcctttatttctatttctagaccttctacatctacatcatctgaaaatactgtagtcagcctttctaaacctttttttgatcgtatgtctaaagcaatagatgttgattctgatgaagatggaagtatgttagtggataaaagtaaaaaggatatcgctcgtactatgtcttcttatttagaaaatctagaagcagactttttagaaacaatgaacgatgaaaatactagtgaggatgaaaatactagtgagataagactaacacagatggcattattacatcagatacaagattttaaaaatattgttgacgaaagtatagaaaaaggtacctcttttactattgttgcaaatcaagatctagaaacagcagaaccattaactgaaatccaaatgattactaagcgattatcgcaaccagtaacacgagttgatattgctaatgcatatgttttattatcaggaaaaatagataatgaagttggagctatagcgaatcaacaacaaagaactactgaaacgttaactttacaggataataaaattactaaagtagaaagtgatgtaaaaaaaaatgaaggtaatatagctgttaatagagaaggtattactaaagtagaaagtattgtagaaaaaaataaagaagatatacaaacaaataaagannnnnnnnnnnnnnnnnnnnnnnnnnnnnnnnnnnnnnnnnnnnnnnnntacaaacaaatagagaaaatattaatcaagttaaacaaactgctgacgaaaataaaaaatatgtaa

SEQ ID NO: 315866 - DNA, 2973 bp, Proteus mirabilis
atgtcggggaggcgtttagcgttaggaaaaatcgcccttggacagaaagtgttctatcaagatgaaggctttaccgtctatcgcacgacaaacaatcttttccttgttgaatcggcggaaggtgattatcaacttttcgaagccaatccacataaaatcaatacactgcgcttaatgaaaagcgctgatcgtcataataacgctttacactaccgctatgctaatgacggtgaattggtacaaattcatgatgatgcgtatctgaccgatatccggttacattatgatgaaatcacccaacgcttacagtcggtgacccgccaccaaggacaagaagaaaaaacgctggtcacttatacttatgatgcacaacagcgtttagtgcaagtcactaatgcggataagcgagtgactcgtcgttttggctgggatgatgaatcgggtttaatggccatgcaccaatatgccacaggggtcagtagtcattatcgttggcaacgttttgatgcctttaccattgaagacaatgaacctgagtggcgagtggttgagcactggcttaaagacggtaaacgctgtttagagcataccgaactgacgtatgatttagctcaacgaaccctcaccaccgtggaaacggggggcgaaaccaccttccgtcgctggaatgaacaacagcaaattatcgaatacaccaatgcattgaatgaaacgtggtggtttgaatgggataccagccgcttattaacgaaagcaatagccccagatggcagtgaatgggggtatacctatgatgagcgcggtaatttaacccaatcgaccgatcccgaacaacaatcgacttgctatgattgggacaaagattttgcgtttcccacggcacaaaccttgccaaatggggcggcttggcattgggagtacaatgagcacggcgatattcgtcgtgtgattgacccgcttggccatatcacgcgcttggcgtgggatgaccaaggcttgtgtctggggcaagtggatgctaagggtaatgaaacccactatcgctataatgcccgcggtcagttaatcgagcaacgggactgttcgggttatcccaccaccttgacctacgatgattggggacaacttcgctcgttgaccaatgcacagaatgaaaccacgatttacacctttagtgaagcggggttgttgttaacagagcgcttaccggatgggacagaaaaccgttatgactatgatgccaccgggcaattagtgggaataacggatgccggagagcgccatattctgttgcgccgtaaccgtcgtggacaagtaatagcccgacgcgatccggcagggcattggttgcattttcactatgatactttcgggcgcatgcaggcactggagaatgaacaaggcgagcagtaccgctttgagtatgatgccttgcatcgtttaaccgatgaacatgatcttatcggacaacaaaagcactatcagtacgatgtgatggggaatgtcacccagataaaaactaccccggggccttgcgttgatacgccgatacccttatccccgcaggtgaccacctttggttacgataaagtgggacggttactgtttcgagaaaacgccgattatcgcacggaatacctttatcaacctttgagtgtgacgttacgccgagtccccatggcgatatggcatgaagccgaacgcaccggcaccaccgcccgcgtagagtatcaagacgccctgacctttacctacgataaagtggggcagttggttcgagaagccagtgcccgcggtgattatcaacatcactatgatgtgctgggtaatatcactcgcactgagttgccccatcaacgggcatttgaatacctgtattacggctctgggcatttacaacaaacgcaatggcgagataatgcgcaactgacggtattggcggaatatcaacgagaccgtttacaccgagaaacgttacgcaccagtggcgccttagacaatgaaacgggctatgactgtcggggacgtattacgcaccaagtggcgcgccaaatgaatgcctcacagtttgtgaccccggtgattgaccgtcgttatcgttgggataaacgcaatcaacttatcgagcgcagtgtcagttatggtcaaacgggcgaggtttttaccgccggacattggtactaccacaattatcagtacgacccgctggggcaattgacggcgcatttagggtcggtgcaaaccgaacactttctgtatgatgcagcagccaatttactgactcgtccgcacaccgaagcaccgcataaccaagtacaaggcagtgataagtatgattatcgctacgacggttttggtcgcatggtctcccgctatgaaaaaggcagtagctcggggcaacgttatcactatgacagtgaccaccgcattatcgcggtggatatcgaccaaggtcccttagggtatcagcgagcggaataccgctacgatatcttagggcgccggattgaaaaacggctatggaaagccagtgcgattgccaatacggtgacctatcatcaacatgagccggatgaagtgtacacctttggctgggtagggatgcgactggtgtctgagcacagtagcgcagcgccccataccacggtttatcatgcttacaatgaccaaagttatacccctcttgcccgcattgaatgcacggataacccgcttaatccgcaacgggcgatttattatacgcacagcagtttaagtggcttaccggaagcgttgaccaacagtgagggtgaaatcgtttggcaagggcaatacagtgcttggggacatttacagcgtcaaacccgccccacaagcacatttaatcgtgaacagaacctgcgttttcaagggcagtatttcgacaaagacaaatttgtcgggaacaaatttgaacagcgcttgcgctggcccgtagggcgagtatcaggatga

SEQ ID NO: 315867 - DNA, 579 bp, Proteus mirabilis; identical to SEQ ID NO: 307550

SEQ ID NO: 315868 - DNA, 282 bp, Proteus mirabilis
  misc_feature (269)..(278): n is a, c, g, or t
atgaccttattagaaacgacagttaaagaatgtctaaacaatgtagtgaagcaatatgcgtcacaaacggccttaattgaaaaccaaagtaaaaaaacactgtcttggcaacaattacaacaagaagtcgagagtgttgcgcgtggctttttatccatggggttaacaaaaggcgatcgtttaggtatctggtctgctaatagtaaagaatggataatttgttttcttgcagctgctcaaattggtattccggttgtttgtattaactnnnnnnnnnnttaa

SEQ ID NO: 315869 - DNA, 729 bp, Proteus mirabilis
atggctataggtggggtttatatcacccaaacccttatatcaatgattatcatgcaatctgtaccaaccttactaagaagtgaaggattttctctctctttaattggattgacttcactttttatgcttccttggacacttaaatttttatggtctccatttattgaacgcctgagattaccttttggaaaaaaatttcgccgttcacgtaacttgattcttattggtcaatcattggttgctcttttagtttttttacttattctaataaaccctaacgataatataagcaaactgaataatctttggatttttggaatatttatcctatgtgcattcttaacatcgactattgacattgcatgtgatggcatggcggtagaacagattaaggcaagtaatagagggtggggaaatattgcccaagttggcggaggagaaataggagcattattaggcactagtggttttttattaatttccagttattttagcttaaatactgcatttgctatatcagctctaaccatcatattacttacaattccaacactctactttaaagaatcagatagactaaccacatctgaaacttaccatatacccaaattatcatatgcatttaatcgaaaagaggtaagaattggtattttattagtagttttattagaaggaggtaacagaatcacagatatgattaccggacctctattaatagaggtccggtaa

SEQ ID NO: 315870 - DNA, 1989 bp, Proteus mirabilis; identical to SEQ ID NO: 293500

SEQ ID NO: 315871 - DNA, 300 bp, Proteus mirabilis; identical to SEQ ID NO: 293501

SEQ ID NO: 315872 - DNA, 663 bp, Proteus mirabilis; identical to SEQ ID NO: 190890

SEQ ID NO: 315873 - DNA, 2598 bp, Proteus mirabilis
atgtcaaccatcgattatccagagaaaaaagcgtcccgctcgataaggcaacaggctactatgcagtcgcatatcttaacccgttattacaaattttatcgtcataatggggcttcattcagtgcggctatcgtgaatgagcttttctgggtattaatgtggctctttttgcgtatggaatcccctttttggcagaaaatagcacaaaaacaacaacaactatttcctcatattaatccgcgtcgccctaaattatgcgatccgatccgatacttattacaaagtatttggcttatttgccattacttgatgctcaccttggtgaaaaaaccgattcaatttattgtctatattagacagtattatcaaaatctctttgctcgcttatctcctgttgcgcgagatatgatccatcataagaaaacaaacacgccactatggcaatacgctctattatcgctcgttgctgtttttgccatttttattatcttattaagtattactcaaccttttgatttaaaactacaatttgtttttgttctcgtgatttggctgatagccttagctatccgcgatatccctggccgactgtcttctattaccattattattttatcgctgactattgcttgccgatatatttggtggcgctatcaatacacactctactgggtggataatctgagccttttctttgggatcttactattactggctgaaacctatgcatggattgtgttatttcttagttttatgcaatgtatttggccactccatcgacaacctatttcaatgcctcaagatacaacacaatggcctactgtcgatatttttattcccacatataacgaagcgctacaagttgtaaaaccaacactttatgcctgtttaaacattgattggcctaaagataaattaactatctatttattagatgatggctctcgccctgagtttgcggcttttgctaaagaaattggtattcggtatatcactcgtgaaaaacatgattttgccaaagccggtaatatcaaccatgcattgagcaaagcctgcggagaatatgtggctatttttgactgtgaccatattccgacacgctcattcttacaatttactatgggctggtttctaaaagatgaaaaaatggcattggtacaaacaccacaccactttttctctcctgatccctttgaacgtaatttaggcaatttccgcgaaacaccgaatgaaggcacgcttttttatggattagtgcaagatggtaatgatacttggaatgcagcttttttctgcggctcctgtgctgtattacgtcgttgtgctttagatgaaattggcgggctggcagttgaaactgtgaccgaagacgcacatacctcattacgcttacatcgtcatggttggacttctgcttatattcgtatccctcttgccgcaggattagcaacaggatcactttcagcacatattggccaacgcatacgttgggcaaaaggaatgatacaaatatttcgtttagataacccgctctttggcaaagggctgacactgccacagcgcttttgttacctcaatgccatgttgcactttttatcaggcataccaaggatgatcttcttattagcaccactaacgttccttatctttcatgcctatattatttacgctcccgccatcgctatcgctttgtatgtcgtgccttatttattacacatttggttagccgcgaccaaattacaaggtccttatcgccactcattttggggagagatttatgaaacgattttagcttggtacaccactcgccccgtattaagcaccctattctcaccttataaaggtaaatttaatgtcacagagaaaggggcaattatgaagaaaagttttgtcgattggcaaattaatcgcccctatattctgtttcttaatcttaatttgttaggaattctatttgctttctggcgtatcgcaacaggcgatcccgatgaaaggttagccgtactcatgtgcttagtttgggtatgctataacttagtattactaggtgttgccattgctgtttctgtagaagcaaagcaagagcgccagtttccacgggtacgtctaagagtacccgcaatgctattactccaagacggttcgctttattcttgtcagctcaatgacttctctgataatggctgtgccattgtattaccagataattttacagttcccttatcttgtcaccaagagatcaccgttattctcaaacaaaatcaacgtgaatatgcttttgaagcacgtattttacggattgataatcgcattattggcttacaactgcttaatatggatacacaaaaatccattgattttaccgcctgtacttttgaacgagccgacacttgggctaattggcaacacgctctccctgccgataatccactgaatagtttaagaaatatcatttatatcagtatgcggggctataacaccttacttaaacgtgccccgtatcttgtttacctcttatttcgtttattagggcagtgtttattgtggctattatcgctacttccacgacgtgtcaatgtttcacaaatatttcattaa

SEQ ID NO: 315874 - DNA, 1014 bp, Proteus mirabilis; identical to SEQ ID NO: 313378

SEQ ID NO: 315875 - DNA, 477 bp, Proteus mirabilis
atgtacttttcaggtgacggtgcccgtcgtgatgaggacggtgattattggataacaggccgtgttgatgatgttttaaatatctctggtcaccgtttaggtactgctgaaattgaatccgcacttgtcgcccatcctaaaattgcagaagcggctgttgttggtattccccataatataaaaggacaagctatttatgcttatgtcacgctaaatcatggtgaagagcctacggcagagctttatacagaagtgcgcaattgggtacgtaaagagataggcccaatagcaacacctgatatccttcattggacagatgccttacctaaaacacgctctgggaaaattatgcgtcgtatcttgcgtaaaattgcctctggcgacacaactaaccttggagatacctcaacactcgccgatccaggcgttgtagaaaaactgttagaagaaaaacagtctctatcactgaccatttaa

SEQ ID NO: 315876 - DNA, 1218 bp, Proteus mirabilis
atgataaatcaacgtattaatcgggcaacttacgatcaggtaatgttgccaatttattcaccagcagattttattcctgttaaagggcaaggtagccgtgtttgggatcaacagggaaaatcctatattgattttgctggtggtattgctgttctagcgcttgggcatgcgcatccactattgaataaagcactgcaagagcaaagtgagaagctttggcatgtaagtaatgtgtttactaatgagccggcattatgtttagctcagaaattaatccaacatacttttgctgagcgtgttttttttgccaattctggggcagaagcgaatgaagccgcacttaaattagcacgacattacgctattacccgtcataatccttataaaacgaagataattgccttccaccacgcctttcatggtagaacattttttacagtctctgtagggggacaacctaaatatgcggatggttttggtcctaaacctgcggatattatacatgtcccttttaactctcttgatgctgtaaaagccgtgattgactctcatacttgtgccgtaatactggagcctatccaaggtgagggcggagtgacaccggcgacagcggagtttatgcatggcttacgtacactatgtgataagcatcaagcgctattaattcttgatgaagtacaaacgggtatggggcgaaccggcaaactatttgcttatatgcactatgatatacagcccgatattattaccagtgccaaagcattaggtagtggttttcctctcagtgcgatgttaaccaccgaggatatcgcttcggtaatgggggtaggaacacatggtacgacttatggggggaacccattagcctgtgcagtaggcaatgctgcttttgatttaatcaacactcaggcggtattagaaggtgtcagtgagcgtcatcgttggatagtggatgaattgcaggcaataaaccaaacttatgctgtattttcccaaattcgtggacaaggcttattaattggcgcgcagttagcaccactgtatgcaggtaaagcaaaagagttacttgcactggcctctaagcatggcttaatgatgttaaatgccggggctgatgtaatacgctttacaccagcgttgattattaccctcgaagagttacaagagggcatgaatgcgttacgaaaagcgcttgatgagtttgtaaaagcagagtga

SEQ ID NO: 315877 - DNA, 549 bp, Proteus mirabilis
atgagcaaatatgatgcaatacagcgatttaatctctgttttcaacaacttgaaacagaaatcaatgctcttaccgattttcttcgtcagttaaagcaacttccttctgcggtttttgaattacctgaggtaagtaaagaagatgaacatgatgagataacaaatgttacagtgtcacctagttatgatcttgatgctttagaactctctttaaaattaatgaccaatctctttatctatgataatgccccacatgtcagtagcaagcgtgcgatacgtttaccgggggtactctgttttagtgtcagcaatcctgtatttaagaatgtaaaaacacaagtagagagcattaactcattaaaaaaacagctttcagatattgtgacgaaagagtctggtatttcgaaagaagaacgttttgattttgtccataatcagctaaaaggcttaattacacttaatgcttatcgcaccctcaccctactttctgatcctgatacagtacgttttggctgggccaataaaaacattataaaacttaactcgtaa

SEQ ID NO: 315878 - DNA, 297 bp, Proteus mirabilis
atgttaagtttgggggcaacccctaaaattgcttcaatgactattattcgagatagtattaaatcgtcgttaattccgaccgttgacgcagccaagacagtggggattgtaagcttacctggaatgatgtctggattaatttttgccggtgttgatccactacaagcggttaaataccaaattatggtcacctttatgttgatggcaaccgccagtatttcaacaattattgcttgctatttaacctataagaaattctttaatcaacgccatcaattaatgacgtttaatcaataa

SEQ ID NO: 315879 - DNA, 972 bp, Proteus mirabilis
atgggcccagaatatgatctggattggcgaaatcctaattatcattatcctattgatatcagtttacaaaaagcggtgacaaatcaattacaaaaacacgaccagttagggatctatttgcaagatcagatccaatggaaaaactggatcttattagggggattacgccaagcttgggcgcaagttcgtacctatgatcacatcaaaaacagcaaagaccaacaagacgaccagaagctaaccggtcgagtgggtctactctatgcctttgataatggtatttcaccttatattagttatagcacctcttttgaacctaatttacagacacgaagagctccgggtagtgcaccatttgagccaagtgaaggacgtcaattagaagcaggaataaaatacctcaccccaaatgaacagacattagcaacactctccatttaccaattacaacaacgtaatgtgactaactataacgccgaaaaagcctattttgagccagtaggtgaaattagaagccgtggtattgaagcgcaaattaatagccaattaactgaaaatatatcatttattagtagctatgcttataccgatactgaagtgagaaaaaccatcaccgcaggtacacaaggaaaagaattaccacgggttcctaaacatatggcatcattttgggggcagtatgatgaaacatcagggctatttaatggtgctaaagcgggctttggtgtgagatatatcggtgtatctcaaggcgatactaaaaatacgattagtgtacctgcagtcactttgtatgatgccatggtaggttattctttaggcgaattatcctcctctttaaaaggggctgaagttcaactaaatatgaataatattgccaacaaacactatgttgcctcttgtgcgggtgaaactgcctgtttttatggcattggcagaaccatgacagcaacgataaattaccgctggtga

SEQ ID NO: 315880 - DNA, 1173 bp, Proteus mirabilis
atggatatatttattagcgcattagcttatattgattacacgacaatacttgttgtcgtcggcgcttgcttatttggtttatttgttggagcaattccgggattaacatcaaccatggcaattgctttaatggtgccttttactttctttcttgatccaattcctgcattagcactgatgatctccgtaggtgcatcctcgatatttgccggcgatattccaggggcattattaaatattcccggaacccccgcctctgcagcttatactaacgatgcccatacattggttaaagaaggtaaaactaatcgtgtattagggatgtcattaacaagctccgttattggtggggtgatcggcacaattattttagcgtcaaccgctccgttgttagccgagtttgcacttaaatttagctcttacgaatatatgtggcttactttaattggattaagctgcgccactattgtttctggcgctcaaattagaaaaagtttgctagcactgtttttcggtattgctttagccactattggctacgatgaatttacaggacaagcccgttttacctttggtgaagtctctttaatgcaaggtgttagttttattcccgccatgatagggctatttgctatctctggtgcgattaaatattacgtcgatcgctggaaagaaaagcaaattaaattagcagttaatacagataatagctcatataatatttttaaaggggtgggaaaggttgtttgccaacgtaaagggggcattttccgtagtggtattattggtacattgataggtgctttacccggtgctggtgccgatatcgctgcgtggatctcttatgcagtatctaaaaaattatcaaaaaaaccgcaaaagtatgggcaaggctcagaagaaggtattgttgatgcatcagcaagtaataatgctagtttagcaggaagttggataccttcattggtttttggtattcccggtgattctgcggcagctattatcattggtgtattgtatatgaaagatatgcaacctggaccaactctctttttatttaatccagataaactgtacgccgtttttatcattttctttattgcgaatttaatcttattacctatagcttttattgtgctattaccaatacgatgtcatccattgtggttatga

SEQ ID NO: 315881 - DNA, 738 bp, Proteus mirabilis; identical to SEQ ID NO: 306266

SEQ ID NO: 315882 - DNA, 708 bp, Proteus mirabilis
atggtgtttacgtcgcaagttggtgcgacaatcgctttagatcgtacacgtattatttttaatggtgctgataaatcagtaagtctgagtataagtaatcaaaacaaagaattaccttatttagctcaaggttggctagagaacgagcaaggagaaaaaatagaaacacctcttattgtattacctcctattcagcgtattgaacctgggaataagagccaagtgaaagtgcaatcattacctgatattgcacaactacctcaagatagagagagtgttttttattttaatttacgtgagatccctccacgtagtgataaacccaacgtattacaaattgcactacaaacgcggataaaattgttctatcgaccaaaatctatttatgccacccaaactgatttaagtaatccatggcaggaaaaaattaccttaacaaagcagggggagagttatgttgtgcataatcccacaccctattatatcactattgttgatggtctaacggatctgaaagggaaaagcttagaaggatttacccctatcatggtagcgcctcgagggcaggaaaaactcaatttaacggtttctacgctgggggcttctccggtattaagttacatcaatgattacggtggtcgtccaagattgaaatttagctgcgatagtcgtgaatgtaaggtgatagaaacagaccaaggaaattaa

SEQ ID NO: 315883 - DNA, 576 bp, Proteus mirabilis; identical to SEQ ID NO: 294793

SEQ ID NO: 315884 - DNA, 561 bp, Proteus mirabilis; identical to SEQ ID NO: 298949

SEQ ID NO: 315885 - DNA, 678 bp, Proteus mirabilis
atgaaaaagatatttgcttttattatttttttattcccacttattgcttattctaatggtgtttcattaggtgctacgcgtattatttataattctaatattaaacaaactaatcttgttgtgactaattcagataaagagaatagttttctaattcaatcatgggtatctgataatcaaggtaataaaaataatgattttattgttacccctcctttatatattcttgacgctaataaagagaatgctttaagaattatgtatacaggtgaacctttacctgcagatcgcgaaagtttattttggatgaatgtcaaagctattccttctttagatgaaaagcttgccaatgaaaatacactacaaattgccatccagagtcggataaagcttttctaccgtcctagtggattgtccgcttatactgaaaaatatgccaatgaagtgactttttcctataaaaatggggagttaattgcccataatccaacaccttatcatattactatggtcaatttagccgcagccgacagtcaacttccttcaagtattatgattaacccattttcacaattaacattaggaaaagttaatcagaatgctaataccatttcattccaaaccattaatgattatggcgcacagactcctgttttaaaaaaagaaatcgttcattaa

SEQ ID NO: 315886 - DNA, 519 bp, Proteus mirabilis; identical to SEQ ID NO: 307021

SEQ ID NO: 315887 - DNA, 1074 bp, Proteus mirabilis
atgacacgctctttttctttcttcacattgctggtttctcttctttgtatcccgagccaaatggcatgggctattgcagatccattagtggtaacccctccacctatgaattttgatggtgccgccgatggtactcccgcaggaacgcccatcacgtcaacttggataggtgaaacctctgtccataatggtttcaaatgtgagaagaaatttttgcaaaaatgttgggttgaaaccctctatgctaatgctactggttcaaaaattagcgggatctactattacgaaggtagtaatcgttatcctgtttattcactccccggagttaaaggtatcggctatgcttttggtttaaaagataacaatgatagtgttgcttacgtacctattgatgttgataacggttcgggtgcaacggtgatttatcctgcagtaggctctaccgttaaccataatgtggatcgcgtttcactgaaaggcaaggtcgtctttgtggtgacagataaacatcttgagactggcgtttataacattccatatacagttatcgccaatacatggtctgaatatggtggaggccataaaggcaataatacctctatcgtagcaattaaccccgtcactattactattaaagctcgaggctgtaccgtaaataccaaaaatctcacctatgaattaggtgatatctcaatgcgagatatggcagccattggttcaacatcaaaaagtcaggctaaacccatctctgttacatgcgatagtaatgtgcatttatatgccagcatgaccgatcagtctacctattctaataatacagatatcctcacactgacatcagattctgatgcttctggtattggtattcaatttttctttaatgataatccaactcccgtggtgtatggccctgatatcagtgcgataggacaacctaaccaacgtttactccatataacaacttctaacaacgaaaactacatattaaacctgtcaactcgctatatcacgactgggacactaaaaccgggtaaagcaaacggattagccagtctcactttttcttatcaataa

SEQ ID NO: 315888 - DNA, 318 bp, Proteus mirabilis; identical to SEQ ID NO: 307023

SEQ ID NO: 315889 - DNA, 1044 bp, Proteus mirabilis
atgaaaaagtggtcctctgtacttgctgccagtgtaatggcattaagtattggtacagcatcggctgatgatggtaagacaatctatttctataactggacggaatatgtaccgccaggattgctggaacagtttacaaaagagactgggattaaggtgatttactccacctatgaatctaacgaaagcatgtataccaaattaaaaacctataaagatggtgcttatgatttggtggttccttcaacttattttatttctaaaatgagtcatgaggggatgctacagaagattgataaatcgaagctcagtaattttgataatcttgacccaagtttattacataaatcattcgatcctcaaaatgactactcaatcccttatatttggggagcgactgcgatagggattaatagtgatgaagttgatgtaagtagcattacttcatgggctgatttatggaaaccggaatataaagatagtttactgttaacggatgatgcacgtgaagtattccaaatggctttattaaaattaggctattcaggtaataccacagatccaaaacagattgaagaagcctataaagagttacaaaagctgatgcctaatgtactggcttttaattcggataatcctgctaatccttatatgcaaggagaagtgaatctagggatgatctggaatggctctgcatttattgcgcgagaagccggtgctcctattgagttggtatggccaaaagagggcggtatcttctggatggacagcttagctattcctgcaaatgcaaaaaatgttgaaggtgcgcataagcttatcgacttcttattacgccctgaagttgctgcaaaagtggctgaaaatatcggctatccaacacctaatttagcggcacaaaaattattgccaaaagctatcacaaaagatagctcactttaccctagtgaagagattatcagtaaaggcgaatggcaaaatgatgtgggtgaagcgacggttttatacgaaagctattaccaaaaactgaaagcgggtcgttaa

SEQ ID NO: 315890 - DNA, 780 bp, Proteus mirabilis; identical to SEQ ID NO: 296843

SEQ ID NO: 315891 - DNA, 861 bp, Proteus mirabilis
atgaagaaaacacgtaaactatttcaaaacatcgttattactggtgttgtgggttggttaatggtgttcgtcttcttaccgaatatcatgatcatcgccaccagttttttaacccgtgatgatgcgaatttagtcgagatggtttttacactcgataactattatcgcttatttgatccaatgtatgcagaagtattactgcactctattaatatggcattggtagcgaccttagcttgtttaatattaggttatccttttgctttttttctggcaaaaatgcctaagaaaatacaaccattactgctgtttttattaatagttcccttttggactaactcacttattcgtatttatgggttaaagatttttcttagtacgaaaggctattttaatgagtttctattgtggatagggcttatcgataaaccgctaaggattatctataccccagaggcggtagtattagggttggtttatattttattaccttttatggttctgccactctattccagcattgaaaaactggataaaccctgtttggaagcagctcgagatctcggtgcgaataaattacagacctttattcgtattattatcccattaactatgccggggatcatcgcaggttgtttattggtaatgttacctgccatgggcttattctttgtggcggacttaatggggggcgcgaaaaacctacttattggtaacgtaataaagagccaattcttaaatattcgcgactggccatttggggcagctaccagtatctgtttaacactggtgatgggattaatgctatttgtgtattaccgagccgtaaaactactgcataagaaggtagaaatagaatga

SEQ ID NO: 315892 - DNA, 1116 bp, Proteus mirabilis
atgactgagaaaacatctctgacaccactagtcgaattaaaatccttaagtaaaggtttcgacggaaaacaaatcatttcccgcctcgatctgactatcaaccatggcgagtttttaaccatactcggcccttcaggctgtggtaagacgacggtattacgtttaattgcgggcttagaagacgcggatgatggacaaattatcctagatggacaggatattacccatattccagcagaacagcgttttgtaaataccgttttccaaagttatgccctgtttccccatatgaccgtatttgaaaatgtggcttttggtctacgtatgcagaaaacacctgctgcagagatcaatagtcgcgttatggaagcgttacgtatggtgcaactggaggactttgcccaacgtcgtcctgctcacctttctggtggtcaacagcaacgggttgcgattgcacgggcggtggtcaataagccgaaggtattgttgttagacgaatcattgtctgctctggattacaaattacgtaagcagatgcaaaatgagctaaaagccttacaacgaaaactggggatcacctttattttcgtcacccacgatcaggaagaagcactgactatgtcagataggatcgtggtaatgaaagaagggcgtattgagcaagatggcacgcctcgagaaatctatgaagagccaactaacttattcgttgcgcaatttataggtgaaatcaatatctttgatgcacgtgtcctacatcgtattgatgagacacgtattagagcggatgttgaagggcacgaatgcgatatttacacgcaattacctgttactcaaaatcagcagctgaaagtgttactcagaccagaagatctgcgcgttgaagagatacacgatcttgaaaaccttccgggacttatcggttatgttcgtgaacgtaactataaaggcatgacgctagattctgttgttgaaatggaaaatggcaagatggtgatggtgagtgaattctttaatgaagatgatccggatgttgatcactcgttagaccaaaagatagcggtaacttgggttgagagctgggaggtcgtgctggctgatgaagaaaacacgtaa

SEQ ID NO: 315893 - DNA, 1035 bp, Proteus mirabilis
atgcacgaaaatacaccaaccgataaaacactagaaaacaagcaaacacagggcactcaagggaattacccacttaatcgcttctctgttgcacctatgctcgattggactgatcgccattgccgttatttctttcgccagcttaccaaaaatactttgctgtatactgaaatggtcacaacaggtgccattattcatggcaaaggtgattatttaaaatatagcaacgaagagcacccgatctcattacagcttggcggcagtgatccacaagcgttagcgcaatgtgcaaaattggcacaagagcgtggctatgatgaaattaatttaaatgtaggttgcccttctgatcgggtacaaaatggacgctttggtgcttgtttaatgggtgaagcacaactcgttgcagattgcgtgaaagctatgcgtgatgtggtcgatattcctgtgacggtaaaaacacgtattggcatcgacaaccaagatagttatcaatttctatgtgattttattgataccgtcagccgtgataataactgcgatacctttattattcatgctcgcaaagcttggttatcgggattaagccccaaagaaaaccgcgaagtgcctcctttagattatcctcgtgtttatcaattaaaacgtgatttctcgcatctcactatggcaattaatgggggaattaagtcactagaagaggcgcaggagcacttaaaatatatggatggtgttatggtaggtcgcgaagcttatcaaaatccatcaatattggctcatgtggatcacgtgctttttgataatcagttacctgttgctaatgccgtcgctgccgtaaaagccatgtatccttatattgaaaaagagctctcacaaggcacttatttaggtcatatcacccgccatatgttgggaattttccaaggtattcctggggcgagacaatggcgtcgtcatttaagtgaaaatgcccacaaacaaggtgctgatttaaccgtgctagagaatgcgcttaagtttgtgaccgaaaaatag

SEQ ID NO: 315894 - DNA, 984 bp, Proteus mirabilis
atggctaaacgcattcagtttgcagctcatggtaatgccgatgtactcgagctaacttcatttacccccgcccctctaggcgataacgaagtacaggttgccaataaagccattggcattaattatattgatacttatgtgcgtagcggattatatccagtagagcatttcccaagtggcttaggaactgaagctgccggtgttgtgattaaaacaggcgctcatgttacttcacttaaagaaggggatagagttgtatatgcacaatctccattaggcgcctacagcgatacgcataatgtaccagaaaataaagtagcccgcctgcctgataatatctcttttgaacaagccgccgcctcttttttgaaaggattaacggtttattatctattcaatgaaacatacaaattacgtgcaggggaaacctttttattccatgcagcggctggaggcgtcgggctaattgccagccaatgggcgaaagcgattggcgctaaaatgattggtaccgcaggcagtgatgagaaagtggctaaagctaaagccgcaggtgcatggaaagtgattaactatcaaactgaatctattgttgaacgtgtccttgcgctcaccaataaccaaaaagtacccgttgtgtatgattctgttggcaaagcaacttggttggattcgttgcactgtttgcaacgccgaggcttaatggtcagttttggtaacgcttctggtgcggtaacaggggttgatttaggtattcttaataaattgggttcactttatgttactcgtccttctatttccggctacattacgacgcgcgaagagttagatgcagcaagtgaagcactatttacgttaattggtcgtggtaaaattgatgtcagtgtgccagataatcagaaatttgcattagctgatgctaaagccgcacaccgttatcttgaaagtcgtcaatctcaaggttcaagtctattgatcccatag

SEQ ID NO: 315895 - DNA, 1380 bp, Proteus mirabilis
atgtctgagataaaagatcgccaaatggaagggttgaaacttcccccccattcgctagaagccgaacaatcggtgttaggcggtctaatgatagataacgagcgttgggataatgtctccgagcgtgtcactgccgatgatttttatagccgacctcatcgcactatttttgcgcaaatgcagcgtttacttgagcagggtaaacctattgatctgataaccttatcagaagcactagaacaaaacgcagaattagaaagcgttggaggctttgcttatttagcagaactatccaaaaatacgccaagtgcagccaatattaacgcttatgccgacattgttcgtgagcgtgctgtcgttcgcgatatgatcaaagtcgccaatgaaattgctgatgctggatttgatccccaaggacgcaccagcgaagatctgctcgattttgctgaatctcgcgtctttcagattgccgaaacccgcgccaataaagatgaagggccaaaagcaattgatgctattttagaagaaaccgttgaaaaaatagagcaactctaccaaaaacctcatgatggtgtgacgggggtatccagtggctatcaagatctggataaaaaaaccgccggactgcaaaaatcagatttaattattgtcgcagcacgtccttctatgggtaaaaccaccttcgcgatgaacttatgcgaaaatgcggcaatgacggaagaaaaacctgtacttatctttagcttagagatgccaggtaaccaaatcatgatgcgtatgctcgcttcattgtctcgagtggatcaaacccgtattcgtactgggcaacttgacgatgaagattgggcgcgtatttcaagtaccatgggtattttgcttgaaaaacgtaatatgtatattgatgattcctctggtttaacccccaccgaggtgcgctctcgtgcccgaagaatttatcgtgaacatggcggtttaagcctaatcatgattgactacttgcagttaatgagagtaccttcattatctgagaaccgaactttagaaattgctgaaatttcacgctctttgaaagcattagctaaagaattacaggttcctgttgtcgctctgtcacagttaaaccgtagtttggaacaacgtgctgataagcgcccagttaactctgacttacgtgaatcgggctctattgagcaagatgccgacttgattatgtttatctatcgtgacgaagtttatcacgaaaatagcgacctaaaaggggtggcagaaattatcattggtaaacagcgtaatggccctatcggtacggtaagactaacctttaatggtcaatggtctcgctttgataactacgcaggccctgcttacgacgacgaataa

SEQ ID NO: 315896 - DNA, 1092 bp, Proteus mirabilis
atgaaagcggcaaccgcagtaatagatcgccgcgctctgcgtcacaattttcagcatgtaagagactatgcaccacatagccacctgatagctgtcgtgaaagcaaacgcttatggtcatgggttattagaaacagcatatactttaatggatgatgctgattgttttggcgtagcacgtatcggtgaagccttaacattacgtagtggggggattgtgaaacccatcctactacttgaaggcttctttgatgctgttgatttacccattttggtggttaaccatattgagactgttgttcatagtgaagagcaactcgaagcgttagaaaatgccgatttagaagaacccgtaaaagtctggatgaagctcgatactggaatgcatcgtttaggcgtccgtcctgaagaagctgaggctttttatcaacgactttgtgcttgtaaaaatgtccaacaacccgtcaatttggtcagtcattttagtcgcgcggatgagcctgatattcctgaagtcacacaaaatcaaattcagctatttcaagcctttatccaagataaagcgggtgataaatctatcgctgcttctgcgggaattttattttggccacaagtccattatcaatgggttcgccctgggatcatcacatacggtatctcaccaacgggtgataacagaacaggtaaagactttggtttaaccccggcaatgacactaaaaacgagccttattgcggttcgtaaacataaagcaggtgaacccgttggttatggtggtacatgggtaagtgaaaaagatacttatctgggtgttattgctatcggttatggtgatggttacccacgtagtgcaccttctggtactcctgtttggatcaacggtcgaaaagtgccgattgttggacgcgtttctatggatatgatcagcgtcgatttgggatctgagctaattgatcgtgtcggtgatgaagctattttatggggagatgtgctacccgtagaagaaattgccaaatatagtggtattagcgcgtacgaattaattaccaaattaacttcgcgcgtcattatggaatacctagacgaacaatag

SEQ ID NO: 315897 - DNA, 1194 bp, Proteus mirabilis
gtgtttcaacaggttgaagcgtttgcgggagatccgattctctcattaatggatgtctataataaagatccacgtcaagataaaattaacctaagtattggtctttattatgatgaagaaggcaaaacccccattctaggcactgtgtctgtggcacgtcagcagcttaatgcgatgacacctaccgcaacactgtatttgccaatggaaggactcgccccttatcgccacgaagtacagactctcctttttggtgctgataacccgcttattgcagacaaaaagattgctaccatacaaacattaggtggctccggagcgctaaaagtcggcgcagattttctacatcgctattttccaagctctgaagtttggatcagtgatcccacttgggacaatcatgcgtctatttttgcgggctccggttttaaagtaaattattatccttattttgatcccgaaaccaaaggggtcaaattcgatgcattaatagattgctttaaaaaacttcctgaaaaaagcatcgtactgatgcacccatgttgccataatccaacaggatccgatctcaccaaagcacaatgggatcaggtcattgagatcctcaaagcgcgccaagcaatccctttccttgatattgcttatcagggatttgctgaaagtttagatgatgatgcttatgcggttcgcgctatggcaaaagcagggttacctgtattagtcagtaactcattctctaaaatcttcgggatttatggggaacgggcgggtggcttatcgattgtatgtgataacgcgaaagagtgtgagcatgtattagggcaattaaaagcgggcgcacgtcgtatctattcaagtcctgctaactatggcgcacaactggttaatcaagttttatcagatcatgtattaaccgcacaatggcaaaaagaagtggctcatatgcgtgaccgcatcaaagagatgcgtgtgactttagttaatgccttaaaagaagcattacctgagaaaaactttgatcacttattaacacaacgcggtatgttcagttataccggcttttcaccagagcaagtagatagattacgtgaagagtttggtatttacctgattggtacaggtcgtgtttgtatggcgggtgtcaataacaataatgtgcagcgcattgcacaagcctttgcagccgtcagttaa

SEQ ID NO: 315898 - DNA, 1350 bp, Proteus mirabilis
atgagccagaacaataattctcatttatggtcgcagtttattcgtcaattacgtgaaggtgttaagccagcagtaggttgcactgagccgatttcattggcattagctgcggcaaaagcaaccgcattattagctgagcctgttgttggtattgaagcgtgggtttcgcctaatttaatgaaaaacggaatgggcgtaacagtaccaggaacgggaatggcgggattacccatcgcggctgcattaggggcgacaggaggtaatccagatgctggccttgaagtattacttacagcatcaccacaagctatcgctcaggctaagacattggttgctgaaggaaaagtgacggttggcgtgaaaacgccatgtagtgatgtactctactccgaagcaaaagtatatggtcagtcaggttatgccattgtcagtattgctaaagagcatacccatgttgtgcgctgtgagtgtaatggcaaagttgtttttgaggatgataaaacgagtttgactcatgccggggatagcgtagaagaaaagccttttgcgacggtttgtgctgaagatatttatcgctttgcactcaatgtacctatagatcaagtcgcctttatgcttgatgcggcttatctaaatggtgctttatcagaagaagggctaaaaaatagttatggattggcgatagggcggacgctggtttcacagcaagagaatggcttattaggtaaggatttactgagtgaaatcatgataagaacgtctgccgcttcagatgcacgtatggggggcgctgtattacctgctatgagtaactcaggctccggtaatcaaggcattgctgcgacattgccggtaatggtagttgctgaatttattcaagcagatgacgaaactttattacgggcattagttttatcgcacttaatggcgatttatgttcatagccatttcccacctctgtctgcattgtgtgcggcaaccactgcatcaatgggggcggctgcgggtatggcatggctactgactaaagacttcaccactgtaagtatgtcaatcaacagtatgattggtgatattagtggcattatctgtgatggcgcgtcgaatagctgtgcaatgaaagtatcaagtagtgcagcgagtgcgtataaagccgttttaatggcgatgcaaaatcaaagtgtagcgggcactgacgggattgtcagtgatgatgttgatagttcaattgcgaatctctgcgcattagccagtcgtgcaatgcaacatacagatattcaaattattgagatcatggaagaaaaagcacgccgtaatgccggggaaaagcagcaagctgtcaatgcataa

SEQ ID NO: 315899 - DNA, 1332 bp, Proteus mirabilis
atggaaacggcttcctcaaaaacagagacaacaagctatcccgcaactagtgctggagctcgccgagcaggtatgacagaagaacaatggcgtgcagcaattaaatttgacggcaatgatgtgggctgggttatcatgagtatcggtatggctatcggtgcagggattgtttttttacctgtacaggttggcttaatgggattgtgggttttcttactttcctccgtgattggttaccccgcaatgtaccttttccaacgcctatttattaatacgttggctgaatctcctgagtgtaaagactacccaagcgttatcaccggttatctcggtaaaaactggggtattttattaggtgcactctattttgtgatgttagtgatttggatgtttgtctattccacagctatcacgaatgacagtgcttcttatctacaaacttttggtgtgactgacggtttattatcagaaaatccgttctatggtctgattttaatctgtgcgttagtggctatttcttctcgtggtgaacaattactgtttaagctatcaagctttatggtaatgacaaaactactggttgttgcggcattaggtctttcaatgattggtatgtggcatctgtataatgttggcgcattaccacctgccggacgtttaattaaagaagccattatcacactaccttttacattaacttctattttgtttatccaaacattaagcccaatggttatctcttatcgtagtcgtaaccaaaatcgtgaagtagcgcgtcataaagcattacgtgcaatgaatatcgctttcggtgtgttgttctgtacggtgtttttctatgcggtctccttcacattagcaatgggacatgatgaagcagtaaaagcttatgagcaaaatatctctgcattagcgattgcggcaaaattcttccctggtggttgggtaaccgtagtgagtgtgatgctgaatattttcgcagtaatgaccgcattctttggtgtctatctcggtttccgtgaagcaacacaagggattgtgatgaatattctgcaacgcatgatgcccgttgaaaaaatcaatgaaaaatgggtacaaaacggcattatgatctttgctgtgctgttagcttggggcgccattattctcaatgcaccagtactgagctttacctcaatttgtagtcctatctttggtatggtcggttgtcttatccctgcatacctagtgtacaaagtaccgatgttacataaatacaaaggcgcatcactttatctgattatctttacgggtttgctactttgtgtttctccgttcttggcattctcatag

SEQ ID NO: 315900 - DNA, 2835 bp, Proteus mirabilis
atggataaaatcgaagtacggggcgctcgcacccataacctaaaaaatatcaatttggtcattccccgcgataaacttattgttattacgggactttctggctcaggtaaatcctctttagcctttgatacgctttatgcggaaggccaacggcgttacgttgaatcgctttcagcttatgctcgtcagtttctttccttaatggaaaagcctgatgttgatcatattgaagggttatcgcccgctatttcgattgagcagaaatcgacatcacataacccacgctcaacggtcggtaccattaccgagatccacgattacctacgtctattatttgcacgtgtgggtgaaccgcgctgtcctgatcacgatatccctttagcggctcaaacggtaagccaaatggtggataatgttttagcgcaacctgaaggtaaacgcttaatgttattggcgccaatcgtaaaagagcgcaaaggtgagcatgtaaaattactcaataatcttgctgcacaaggctatattcgtgctcgtatcgatggtgaagtgtgtgatttatcagatccccctaccttggagttacagaaaaagcacaccattgaagtggtcattgatcgctttaaagttcgtgacgatctggctcaacgtttagcagaatcttttgaaaccgcattagagctttctggcggtactgctgttatctctgatatggacgatagcagtgctgaagatattgttttttctgcaaactttgcctgtcctatttgtggttatagcatgagtgaactagagccacggttattctcttttaataaccccgcaggtgcgtgtcctacttgtgatggtttaggggttcaacaatttttcgatcctgatttggtgatccagaatcgagaaatttctctggccggtggtgcgattaaagggtgggatcggcgcaatttttactatttccaaatgttgcgctcattaggcgagcactatcattttgatgttgaagccccctttgactcattacccgacaagatccagaaagtgattttatccggttcaggtaaagaaaatattgaatttaaatacaccaatgatcgaggggatgttgtggttcgccatcatccttttgaaggggtattaaataatatggagcgtcgctatcgtgaaacagaatcgagtgcggtgcgtgaagagttagctaaatatattagcaatcgtccttgcgcctcttgtggtggtactcgcttacgtcgcgaagctcgccatgtgtatgttgaaaataccacgttacctgaaattgcggattacagtattggtcatgcgatgagctttttccaaaatctaaaactcagtggtcagcgagcgaagattgccgaaaaagtattaaaagagattggtgacagattaaaattcttggtcaatgtgggattaaattacctcactctttctcgttcagcggagacattatcaggtggcgaagcgcagcgtattcgcctagcaagccaaattggtgctggattagttggggtaatgtatgtacttgatgagccctcaattggtttgcatcaacgcgataacgatcgcctactggaaacgttgatccacttgcgtgatttaggtaacacggtgatcgtagttgagcatgatgaagacgctatccgtgccgctgatcatattattgatattgggccgggtgctggcgttcatggtggtgagatagtcgctcagggtacactggaagatattgttaataatcccaactcattaaccggtaaattcttaagtggcgaacgccgtattgctatccctgaaaagcgtgttcctgttgatcgcgaaaaaatgctcactattttaggggcgaaaggtaataacctaaaaaacgttaatttaaaaatacctgttggtttatttacttgtattactggtgtatctggctcgggtaaatcaaccttaattaatgatacgttattccccattgctcaacgtcaattaaatggcgccactaatagcgtgccagcaccttatttagatgttgagggattagagcactttgataaagtgattgatattaaccaaagtcctatcggtcgtacgccacgttccaaccctgcgacttataccggagtatttaccccgatccgtgaactttttgctggtgtaccagaatcacgaactcgcggttatacgccggggcgctttagttttaatgtgaagggggggcgttgcgaagcttgccaaggcgatggtgtattaaaagttgaaatgcactttttacctgatgtgtatgtgccttgtgatcagtgtaaagggcaacgttataatcgtgaaacccttgagattaaatataaagggaaaaatattcacgaagcgctagatatgacaatcgaagaagcaagagagttttttgatgcggtgcctgcattagcgcgtaagctacaaacattgattgatgtgggactctcttatattcgtttaggacaatctgccactacgttatcgggtggtgaagcacaacgggttaaattagccaaagagttgtcaaaacggggtacaggccaaaccctctatattttggatgaaccgaccacgggtttgcactttgccgatattgagttacttcttgatgtgctccatcagttgcgtgatcagggtaatacaattgtggtgattgagcataacctcgatgtgatcaaaaccgctgactggatcgttgatttagggcctgaagggggcagtggaggtggtcagatcttgatatccggtacgccagagcaagttgctgactttgaaggctcccacacggcaaggtttttgaaaccaattttagagcgcggttattaa

SEQ ID NO: 315901 - DNA, 525 bp, Proteus mirabilis; identical to SEQ ID NO: 294229

SEQ ID NO: 315902 - DNA, 531 bp, Proteus mirabilis
atgaatgaagagaaattgctcgctcaggcagaaaagatctgccagaaacgaggtgttcgcctgacttcacaacgtctggcagtattgcgtctgatcatgcaacaacctaccgcaatcagcgcttatgatttattagatttattacgccaagtagagcctcaagctaaaccacctaccgtatatcgtggattggaatttctacttgaacaaggttttattcacaaaatagaatccaccaatagctatgtgctttgtcatcattttgatgatgctgagcatacttcggtgatgttaatttgtgatcgttgcttatcagtcacagaaaaaagtagccataaaattgaaggggcgatcaccacactcgctaaagatgatggctttcatttacgccatagtgtgattgaaattcatgggctgtgcgctcagtgccatgaagcccaagcctgtacacatccggaaggttgtcaccatgatcatagtatggatgataatcttaagcagaaaaaaaccggtgactataagcctcgttaa

SEQ ID NO: 315903 - DNA, 612 bp, Proteus mirabilis
atgaaagcattaactgcaaggcagcagcaggtttacgatttggttcgtgatcacatttcgcaaacgggtatgccaccaacacgggcggaaatcgcttcccaacttggttttcgctcacctaatgcggcagaagagcatttaaaagcacttgctcgcaaaggcgtgatagaaattgtctctggtgcatctagaggtatccgtttgctacttgaagaagagcctgaaggcttaccattaattggacgagttgcagccggtgaaccacttttagcgcaagagcatatcgaaagccattatcaagttgatcctatgctttttaaaccgagcgcagattttttactgcgtgttaatggtatgtcgatgaaagatatcggtattatggatggcgatctacttgctgtgcataaaacacaagatgtccataatggccaagtgattgtcgcacgtattgaagatgaagtaaccgtaaaacgatttaagaaagtcggtagtaagatagaactgcacgcagaaaatccagagttttcacctattatcgttgatttacgtgagcagagctttactgtggaaggattagcagtaggggttatccgtaacggcgaatggctgtaa

SEQ ID NO: 315904 - DNA, 372 bp, Proteus mirabilis; identical to SEQ ID NO: 294226

SEQ ID NO: 315905 - DNA, 2484 bp, Proteus mirabilis
atgtcagcttggcgtaaactatattataacacattgaatttaccactgaaattgttggtaaaaagtaaacgagttccgactgatcctatcactgagttaggcttagatacgtcgcgatctttcctttatgttctgccttatcactctaaagcagacttactgacattacgtcagcaatgtttatctcttggcttgccagatcctctgcaacccatagaaattaacggaaccaaactgccagcctacgtctttattgacgatggtcctagagtattccgttactactctcccgatccgcgtaaagattcagtgaaaacattccatgcttatcttgatgctcatcgtaacaatccgcatcttgatattgaaatgttacctgcttcagtgatgttcggtcgctcaccgggtcgagaaggtcataatggtgtcccccatttgcgcttattaaatgggatccaaaaatttattgccatcctctggctaggtcgagatagttttgtccgtttctcgccgaccgtatccatgcgccaaatggctaatgaacatggaaccgataccagcattgctcgaaaacttgcgcgtgtggcgcgtattcacttttcacgtcagcgtttagcagcagttggcccaaaactgcctgcacgccaagatctcttcaataaactattggcatccaaagccattgaaaaagccattgaagatgaagcaaaagcgaaaaaaattacgcttgataaagcacgtaaaaatgccactgatatcatggaagagatcgccgctaatttctcttatgaagcggtacgaatgactgatcgtgtattaagctggacatggaataagctctatcaaggtatcaacgtttttaatgcagaacgtgtgcgccaacttgcgcaagatggacatgaaattgtctacgtaccttgccaccgtagtcatatggactacttattgctttcctatgtactttatcatcaaggattagttcccccacatattgctgcgggtattaaccttaatttctggccagcaggaccgattttccgtcatttaggggccttctttattcgtcgaacctttaaaggaaataaactttattcaaccatcttccgggaatatttaggtgagttattctctcgaggctactctattgaatattttgttgaaggtggacgctcccgtacaggtcgactgttagatcctaaaacagggactctttcaatgaccgtgcaagccatgttacgtggtgaaacacgccctatttccatcgttcccatttatattggctatgagcatgtcatggaagtagccacttatgccaaagagttgcgtggtgcgacaaaagagaaagaaggttttatgcagatgatcagaggattacgtaaactacgtaaccttggtcaaggctatgtcaattttggtgaacctatttcgctatcacaataccttaatcaggcagtgcctgactggcgcgacgatattgatcccattgagccacaacgtccaagctggttaaatcctgcagttagtgcgttagcggataatattatggtcaatattaataatgccgcttcgattaatgcgattaaccttgtctctacggcgttgctagcgtcccgtcagcgagcattaactaaagaacaattattagagcaaatagattgttatctacagttactgcgtaatgtgccttactcatcagatatggttgtccccgataaaagctcagaaacattattagcacacgccttgcaaacagataaattccaagttgagcaggatagtcttggcgatattattatattgcctcgtgaaagtgccgtattgatgacttattatcgcaataacaccattcacttaatggttacaccatcattaattgcgagcattgtcttgcatcacgagcgtatacaccgtgatgacttaatgaaacaggtagaattaattttccctcttatcaaagctgagttgtttattcgctatgaaaaagaggagttacctgatgtggttaatacactgattagtgaactttgtcgccagcgtctaatttgctgtgctgatgatggcatattacggatcaatccagcacgtattcgcccattacagcttttagcagcaagtgttagagaaacgctacagcgttatggtattacgctctctctactcaattttgctcctgaaattagccgtgcactattagaaagagaaagccgcattttggcgcaacgactttctgtattgcatggtattaacgcacctgagttctttgataaagcggttttctccactttagtttctacactgcgtgaagaaggttatcttaaagataatgaagatatcctcaaagcagatgcctctgcactttaccaagttattgcgaaattaatgtcaccagaaattcgtttaaccattgagagtgtaggcgttactgaagataacaattcagcacaagcgattgaggaaaaccctgagtccagcatggataagtag

SEQ ID NO: 315906 - DNA, 855 bp, Proteus mirabilis
atgacgcacaataaatggcaggcgtatagccgtttaatgcgtatagataagcctattggagcgctattattactttggccaacgtattgggcattatggatcgccgctaaaggctttcctgactggcatatcctaattgtatttactctaggtgtgttttccatgcgtgccgctgggtgtgtaataaatgactttgctgacagaaaaattgatggcaacgttgaacgaactaaaaatagaccattacctagtggtgctgtaacggagaaagagagcaagattatctttattgtcttggtgctgttttcgtttggattagtgcttacgttaaataccatgaccatttggttatctattgccgcacttgcactcgcatggttttatccttttgtaaaacgttttagtaatttgcctcaattaattttaggtatggcctttggttggtctatccctatgggatttgctgcagtttctgaaacactacctttagtatgttggttactctttttggtcaatattatctggtctgttgtgtatgacactcaatatgccatggtcgatcgcaatgatgatttaaaaataggggtgaaatcgacagccattctgtttggtcgttacgataaaatcattattggtattttacagttagtgatgttggcattattagtggcgattggcgttttgctgaatatgaaagggatctattattggtcattgttactcgtgacagccctgtttatttatcaacagaaattaattgctgaacgggaaagagccccttgttttcaagcgtttatgaataataattatgtcggttttgttttatttgcaggtattttatttaattatttctaa

SEQ ID NO: 315907 - DNA, 510 bp, Proteus mirabilis; identical to SEQ ID NO: 294223

SEQ ID NO: 315908 - DNA, 1647 bp, Proteus mirabilis
atgaaaaatgtaaacccaactcataccttagcttggaaggcattagaagaccattttgccgtgatgaaagatacagaaatgaaaacactgttctctcaagatccatcacgctttaacaccttttcaagaacgttttcagaccaaattctagtcgatttttcaaaaaaccgtatcacccaagaaacattagataaattacaggctctggctaaagagtgtgatgttgctggtgcgataaagagtatgtttagcggtgaaaaaatcaactgtacggaagatcgtgcggtactccacaccgcattacgcaaccgtagcaatacacccgttatggtcgatggcaaagatgtgatgccagaagtcaatgccgtattgcataaaatgaaagtatttagtgagcgtgtgattagtggtgaatggaaaggttacacaggtaaagcgattactgatgtggtcaatatcggtattggtggctctgatttaggcccgtatatggtgacagaagcactgcgcccttataaaaaccacttgaccatgcattttgtttctaatgttgatggtacacatattgcagaaaccttgaaaaaatgcgatccagaaacaacgctattcttgattgcttcaaaaacgtttaccacacaagaaaccatgactaatgcacactctgcaagagattggttcttatctgcggctaaagagagtgcttttgttgcgaaacactttgttgcgttatcaactaatagtgctgaagtagaaaaatttggtattgataccgcaaatatgtttgagttttgggattgggttggtggccgctactcattatggtcagcaattggtttatccattgtattatctattggttatgacaactttgagcagttactgtccggtgctcatgctatggataatcactttagaaccactgaagccgaaaataatattccgatgatattggcgcttattggcatttggtataacaatttttttggtaccgaaactgaagcgattctgccatacgatcaatatatgcaccgttttgctgcttacttccaacaaggcaatatggaatccaatggtaaatatatcgaccgtgatggaaacaaagtcagttaccaaaccggacctattatttggggagagccgggaactaatggccagcatgcgttttatcaattaattcatcaaggaaccaaactgatcccttgtgattttattgcaccagcgatcagccataatccattatctgatcatcatgcaaaactaatgtcgaacttctttgcacaaaccgaagcattggcatttggtaaaactcgtgagcaagtcgatgcagagtttgcctcagcaggaaaagatcccgcaaccatggggtatgtggcaccatttaaagtgtttgaagggaatcgtcccaccaactccattcttttaaaagagatcactccctattcattaggcgcgttaattgcgatgtatgaacataaaatctttgtacaaggtgtaattttcaatatcttcacctttgaccaatggggcgttgagttgggcaaacaattagctaatcgcatattgccagagttaaaaggtaaggaaagtgttaacagtcatgatagttcaacaaataatttaattaatcgttacaaagcatggcgttaa

SEQ ID NO: 315909 - DNA, 645 bp, Proteus mirabilis
atgtcaaaaattaaaaataatgtttctatcactgaaatgagccggcgtggcttcattcagtctgcagctgttctttctggcgctgctgctgtagctggaacggtatcattacctttctctgctaatgctcaaacaccccagggtattcgtcctgatgagacgtctgaaaccatcaaatacagtgcatgcttagtgaactgtggtagtcgttgcccattaaaagttcatgttaaagatggcgtgatccgccgtatttccaatgaaaccatgtttgatgactcaacctttggtcttcatcagatccgtccttgcttacgtggacgttccgttcgttggaaaacttataatccagaccgtttaaaataccccatgaaacgtgtcggtaaacgtggtgaaggtaaattcgagcgtatctcttgggatgaagcgacttcgattatcgctgataagctaaaatatactatcgatacctatggtaatgaggctatttattaccaatatggtactggatctaccggagcgaatttacatggtagaacagcctgtaaacgtctattaagtacagtcggtggcttcttaagtgactacggtacttactcactcttattcacaattaaccggcatcgtcccttatgtgtatggtga

SEQ ID NO: 315910 - DNA, 255 bp, Proteus mirabilis
atgggtaaaaaaataattaaagaatgtaattataaaaataaaacgacactattcaaaaacatgaacttatgtaatgtgaatgtgactgatggtattatatctattattccttatgatcacttacgattggatcattggattggtaaaagtatgcctaacaatgcaattattacattaaaaaccaattgtagtgacgaggttttaggtgcttcaataaaaaaagcttttacacgttgtattaactgtaaagtttaa

SEQ ID NO: 315911 - DNA, 2496 bp, Proteus mirabilis
atgtcagaacaaaaagttggcggtattgtttaccaagtatcaatggatataaagcctttattacaaggtgaaaaggaagtaagcaaatccctagaggagatgaataactcaacaaaaaaaaccacagaagcgcttaataagctagatagaacggccgctaatgttggttcctctttaaaaatgccagagataaacaagctatccagaaaaatgtctgagttagctggcagtattggcgctcagtcagcaaaaacagagaaagcgactcaggtgaacaatagatttgctggcgtcttaagtaccgtatcaggaacatttggcgctggctatgttagcaatgttggtagcgcaacaagtcaacttgttcagcacacaaaagccgcgatcctagccactcaagcagaattagaacacgctaaatcagcgcaaaaagaagcagaagcacttcaagccgcggcatctcagcaagtattaaatgcaaaagcagcaaaagaggaagctcaaagcaagttagcctcagttagtgctgaaaaaagcactattactgaaatagagcgctctacagatgcaaaaatgaaggatctggaggcacttcgtcagcgtcaaattttgatggttaaagatgcagaagaaaactaccagatgacggctagcgaaaagaatttaatggcggtaactaaagcaaaaaatgcactttacgccaccgaaaacaaaataaagacacagttgtcagttactggtaaagaaatagccgcaatagaggctcgtattgcagcagcaaaagaggcagaagcgcttgcaactaaacgattaaacgcagcaatagcgctagagcagaaaggtaaagcaaccttaaagtcagcaaatgaggcagttgccgcagcgtcagcaaaagtaacgctagccacacaggcacaaagtgttgccatgaatggattgaaaagcgcaatggcattattgggtggtcctactggattgtttatgttagccgcagcaggggtgtatgcgctttatcaatcaatgagcaacaattcatctattgatgattataagtcaaaaattgacgaagctatcaataaactagatgagcttaacgctaaacaagctgctgctgctgctgccgcatcaaaagcaaggtcagttattaatgaaaacacgaaagaaattgactctttagaaaagaaaataacatatatacgttcaataattcaaagtatcaaggatggtagcggtagagtttgggaggatgtgcaagatgtagatgaagcaaaacaaaaacttagcgagttagagggtaagttagtagatctaacacaagaaaacaagcactattcccgaacactggaattattaaacaagacagaaaaagaaaggacaggtaaaaccgacgaacaaatagaagctaatgctttatatctaaaatccgttggcggagttcgtgaagctaacgaattattgttgagaacattagagctaggctctccggttattgctgatatagaaacccagatagacaatcttgctaaatcacttgaggatgcaaaagtacctccagaggaagcagaaattgctatttcgaacctcagaacagcattagaagcgaagttatcaaataactttgaagtgatgctacaagaccttgaaaataatgttactgcattaaaaatagagatgaaggatggcaaagatgcggcgatagagtatcgtgcaagcgtcatggccgccaaaatgggcatgactgatgagggacaggtaaagcgttatatacaattaattaaagaagaaaccgaggctagggaaaagttaacaaatcaaaacaagaaatcaaaatcaggaaataacgaagctaaacgcattgacgatgccattaaaaaacaacaacaacagactgaggcgttaagaaaagaatttgaattattgagttctggcgcagctaacgtaaatagagagatggctatttttaacgctgttcaaagcctgggtactaacgcgattaaggagcaaaaggaggctattgctaaagaagccgccgaagtttttgacctcaaacaaaaagtcgatgactttattaagtcacaagaaatcacaccggagttaaaacttgcaagagcatttagacaagaatctgaagagcttaaacgcatgtttgataatgatttcattgatgaagaaacgtttaaggccttaggcaataaagcaatgaaggcatttgatgctggaatggctgaaataaaaataaacgcggttattgacccaataactgaagctaaagggcaatatgatccgatacaagcactggctaacgaacacgctaagaaacttgagatgatccgccaatttgaaacagaaaaaggggctatcactcagcgtggcttagagttaatgaatgccgctaatactcaatatgagcaagaccggttaaatgctcaatgggagatatggcgcaatcagagccaagccaatcaattcttagctgagatgggttggacgcattag

SEQ ID NO: 315912 - DNA, 1452 bp, Proteus mirabilis
atgtcaaaacctcataacccagaaattcaaaaaattattaatgagttaaaacaacaatatcaaaatgctgttgatgccttacgtaatgctattattatgtatgctcaagatggaaaattacctgatataaaacaaagggctgaaggtctatttgcttatccgcaattaaccgtacattggtatggtgatgttaaaaaagaagataaaacaagagcttatgggcgtttatcaaaatcaggtacttattctactactatcaccaatccaactttatttgaaaattatttaactgagcaactgcaacttattgcggatgcttatcatgtctcttttgaagtgacggcctcaaaacaagagataccatatccttttgtcattgatggcactggcattggttttgatcggtcaatgagcgcctctttagcaaaatattttccgactaccgatctctctaaaattggtgatgatattaccgatggtttaatttatgacagcgagcttttacctctttcacattttgatgcactacggacggatttttctttggctcgtttaaagcattataccggaactttacctgaagatgtgcaaccttatattttattcaccaattataaccgctatgtggatgagttcgttcgttgggcctgtgcacaagttgctgataaaaatagtccatattgtgtactttcttgtgcaggttttcagcaaataaccgccgatacggttgatccggaaaaattaatttctgatctgacatggaaaaaatatcaaatgcccgcctatcatttaatcgcaaaagaagggccgggaataacattagtgaatattggtgttgggccgtcaaacgccaaaacaatttgtgatcatctggcggttctacgccctcatgtttggttaatgattggtcattgtggaggcttaagagaaagccaattattaggtgattacgttttagctcatgcttatttacgagatgatcatattttagatgctgtattaccgccagatattcctattcctaatattgctgaagttcagcgtgcactttatgatgcgactaaagccattagcggtaagcctggacatgaaatcaaacagcgattaagaacaggaacggttgtgacaacagatgatcgcaattgggaattacgtttttcagcgacatcaaggcgatttagtttaagtcgagccgttgcggtggatatggaaagtgccactattgccgctcaaggttatcgttttcgcgttccttatggcactttgttatgtgtatctgataaaccgttacatggtgaaataaaattaccgggtcaagctaatcacttttatgaaggtgcggtatcagagcatttgcaaataggtattcatgcaattgagttattaaaagacgaagaggataaattacattctcgtaaattaagaacctttaatgagccgccatttagataa

SEQ ID NO: 315913 - DNA, 414 bp, Proteus mirabilis
atgaccttatcatggggtggattaattgttactgcattccatttttatggaagcttagatgccaatatgtctggtatccaattagcatttaactatggtttgatgggcttttttgtcggtgcaattgccacaaccccaattgtgagtactagagcatttcctccttcaattcgtttttctggcctctcttttgcttataatatggcctatgccgtatttggtggcttaacgccaatgttaacgggcgcttggttggaaaaaacggcaatggcaggagcttattatgttgcagctgtttctgcattagccattgttatcgcattcttacctttagcttataaaggctggatcgcggtaaacaccagctcacgggaaaaagagatagcgttgcaagttgataaagtcgctagttaa

SEQ ID NO: 315914 - DNA, 243 bp, Proteus mirabilis; identical to SEQ ID NO: 297991

SEQ ID NO: 315915 - DNA, 333 bp, Proteus mirabilis; identical to SEQ ID NO: 289919

SEQ ID NO: 315916 - DNA, 345 bp, Proteus mirabilis
atgcttgtctcttgtcctcattcaggaaatatgtatgtgacattaaaaccctataatgagctagtcaatgcgagtaaaactgggatgacaatgtctccaagtatccctttgaaaaataaagaagttgcaccttatatcacggtatctgatgcaactaaaacaataactaatgcagtatgtaataacaattcctccgaagctttagagttttatgcaggacaaccttcaggcaaatataatgggggatctgtttataagtcattatcattcaacctttgtgccaatggaaatatacctacgaatacttataaaggaagtattgatgtatcgttcctgattgaatga

SEQ ID NO: 315917 - DNA, 207 bp, Proteus mirabilis; identical to SEQ ID NO: 296986

SEQ ID NO: 315918 - DNA, 2502 bp, Proteus mirabilis; identical to SEQ ID NO: 279643

SEQ ID NO: 315919 - DNA, 363 bp, Proteus mirabilis; identical to SEQ ID NO: 297052

SEQ ID NO: 315920 - DNA, 396 bp, Proteus mirabilis
  misc_feature (375)..(384): n is a, c, g, or t
atggctggtattagtgcactaggaataggctcaaagctgccgcttggcgagacattaatgcaattagaagcagcagaaaataagcgccttgaacctttagacaaacagatgaaaagctacgatgcacaaattactgcatatggaaaaattcgtagccaattagataaattacagaaagcatctgaagaattaaaaaaattcgataaaatcgtcgccaccaaagttgatgatgagtttgatgcctttaaagtaaccactgatggtaaagcaagcattggtaattatacggtctcggtaacagagcttgcccatgctcaaacactgaaatcaaaagccgtcagtgatatcaaagatcctattggtgaaacattaggnnnnnnnnnnctcggactttag

SEQ ID NO: 315921 - DNA, 150 bp, Proteus mirabilis
atgctattgaagattttaaacgctactatcagtgatgatactggttataatgatgttaattatacctttgccaacttatttggtcgattttcttataggtttaaatattactatcgcacttcttatttttatgagttcattttatattaa

SEQ ID NO: 315922 - DNA, 390 bp, Proteus mirabilis; identical to SEQ ID NO: 302855

SEQ ID NO: 315923 - DNA, 348 bp, Proteus mirabilis
atgtgtgatttaccacaagcattcaatcaggtttataggacagcaaggaaggagcataagtgttgtgaatgccataggaagataccaaaaggcgcgaaatacctatattcatctggaatatgggatggcgaacccgattcatacaaacagtgctctatatgtggagaggttgctaatgccgcaactgtgatatctgaacctgatgaagcaccagcattcacggagcttaaaaattggtttaacaatcaaatgagttcaacttttaaaggtagtgaattcattagcaagatgtctcatgacttagatattgagttcgaaaaaatagcatatgttctggcgcacagttaa

SEQ ID NO: 315924 - DNA, 162 bp, Proteus mirabilis
atgagcacaccaaataaactgcaaaattttatttattacctaacgaaagacgctgcccgtgattcgtttaaagaatggctagaagaaaatgaaattagcgataacgaatacgaagaaataaaaaaatggtttaaacaattcgacattaagccatacgtttaa

SEQ ID NO: 315925 - DNA, 198 bp, Proteus mirabilis
atggctgcgagtcttgttgaaacagatgtaagttcaattagtaaagttgaccaatattttcataaacctgtgaaaacccaaagctatgagttatctgaagccttagaagcattaaaagctgatacatctaatgccgcggctacatcaatcaaagtcattaaagatctagcaatgagtattattggtaatatgcgttaa

SEQ ID NO: 315926 - DNA, 426 bp, Proteus mirabilis
atgaaactatttttcacattgcgaaaactgtcaaaaataaaaataattggcaatgcctttaagattttttataaagcctattgtttagcatatggcgccgctattccgctgaacgtttatattgataaaagcaataaatttccacatggaatacatggcatctttctctctaaagatgcaaagataggtatgaataatacaatatttcatcaggtgacgattggcagtaatcagattgatgggcaccctagaaatggtgcgccagagataggagataactgcattattggcgctggtgcaaaaattataggtagagtaaaaatcggtgacaatgtaaatattgctacaaattgtagcgtgtcaatcgacctgaaaaataactctaccgcctatcaaaaaatgactgttaaaattaaagaggtgtag

SEQ ID NO: 315927 - DNA, 366 bp, Proteus mirabilis
  misc_feature (330)..(339): n is a, c, g, or t
atgttcaaatctcctttacgatatccagggggaaaatcaaaattaaccccctatgtactcgatataataaaattaaacaaccttgagggaggagcttatgtcgaaccctttgctggaggttgtgctattgcatggtatctattattgaacaatcatgtcgataaaatttatattaatgatttagataaatcgatttattcattctggcatagtgttttatatcgcacagatgaactttgtcagttaattgattcaactttaattacaattgacgaatggcataagcaacgaaaaatatatagggaaggagctagtgatcttcttaagctnnnnnnnnnnagcttggtttttcaactttatttctga

SEQ ID NO: 315928 - DNA, 3288 bp, Proteus mirabilis
atggctggcgcattggggagactaaatatcgatttgacgctgaatacggcaaatttcacaaatgcgatcaaccgtagccagcgccaaacagaacaatttgggcaacgtattcgcgtcagtcttcaagctatcaccgtgcaacaagagcgaatggtatcgcaaactgcaaaatcctcggcactctttacccgttttgcgagcgtcgcagcaagtgcattatcggtacggcaagtgattaattatgccgatggttggacggaattacagaaccgcttaaaactggtgacggaaagttctatcgagttaaataaagccacacaagccgtctatgatattgcccaaaaaacctatcaatcattggatgccacagcacaggtttatcagcgttttgcggataatgccgatcgtctaggattaagtcagcagaaagtcgctgaacttacggaaaccgtctctaaagcggtttctctttcaggagccagtgctgcctctgctgcaatggggttaactcagtttggccaagcattagcagcaggtcagttacgtgggcaagatttaaattctgttatcgagcaaatccctggtttagcacaggccatcgcagaaggcatggggatctccatgggggatttaaaaaagaaagcccaagacggtgaaatggcgattgataaaatcattcaggcattggagaaagtcaaaaattctgttgatcagaagtttgcttccagtgtgacaaccgttagtcaaggttttactaatttacaatcagcaatgacgaggtttgttggtgaagccaatcaaggtacaggtgcgactcagcttttaacgtcgggcttagagggactttctaatcacttatcgacggtggctaaaatcgcagaaggacttgcagttacagctttagtcgccaagctttctcaatggacaaaagccacttacttaaaaaatcaagccacattgaatgaagccaaagccacattacagagtgcagaggcaaacagtgtggcagcaaccagtgccgtgaggaaggcatgggcggataaagaggcggcattatcggcattgaattctgcaaaaatgagttatcaagtggcgaaaggaaccgcggcagaaggttatgccttagagaaagtgattgcgacaaaatcgttagcgacggaagcctctttaagatacaaacaagcactgatagcagaaacggcgacacagcgggcattaacgacggcacgccgtcaagccacggtcgcaggaagagcgttgagtgggacattggcattagttggtggccctgttggactggcgttaacggcaataacggctgttggaatgggcgtctatgaatatagcgaacatatcaaacaagctaaaagagaatcgatcgaatttgccaatgctctagatacatcaacagaagccttaaaagcaatgaataatcaagtattgctgacgaatataggcaaattatctgaaggtattgatgctcagattgaaaaatttgaaggatcgttagaaaaagctaaaaaattggcagcagactcgaagtccggttggagcttaaatgcctcgagttacttgagttttacgggtgaccatgaaggttataaagagataatcgcgcaaaatcaaagagaagcaaaaatcggacttgatgcagcgatgggggaggtggcttcacagttgacgatattagagcgtcagcgagccagtatgcgacaaatgctggcattggttgaagaaaaacatggtaagcaaagtgatgaatatcagcgttatgcatcgaaagtaaaggaggctgagagtgtcattaaccaatttagggtgacattaaaaaacttgggttatgattttgatgcgttaattaataagacagatgaagcggcaaatagtcaagctaatatgagcgaggtcatcgcaaaaaaaatagaggattctattgctgaatctcggcgtactatcatgaaagctaaggcttctcctgctgagctggctaagttggatgcggaagatgtgctgaaaagacggggaattaaacctgaagaaaaaggttatgaagacgctttgaccgaagaaattaaagcacaaaatgcgttattggctcaaagaaataagccaaagaaatccaccattgattatgccaagcaatacaccaaaatcttaacggaattagaggaaaaacaagcctcactgattgcggatggacaaagtattcagctgtatggtactacctcttcctttaatgaatacacatccgccttagccgatatcaaacagaataaagataagtttgatgccatcttaaaaatcgatcccaaagcgattgagacgatcaaagaaaaagcgaaagccattgatgatctggcgcgtgccaactcggttgcgcaatttgcttatgatcgcggtaaagaaattgagcagatgcaatttgaaacttccttaataggaaaatcgcgcgcagagcaagaaaaactcaatgcccttcgtcagattgatgtgctgtatcagcaagccagtgtggatttaggcgaaaaagagctggtgaatttacaacgcaatgttgaactcactaaacagcagattgaggaagagctgaggaagcgagaggccatgaaaggcgatccgatggcgggattaaaacaaggcttatcggatttcagtgagtcggccatggatgtgatggagaacgtcagaaacgtcaccaccaatgcccttaataatatgtctgatgcattagccgattttgctttaacgggcaaaggaagctttaaagattttgccaatgcggtgatttccgatatcactcgaatggtaatgaaaatgctgattttcaaagccattgaagcaggcgggcaggcaatgggctttgatatgggatggatgagcaaagggcatgcttacggtggctatacggggcatggaggaaaattcgaacctaaagggattgtgcatggtggtgagtttgtttttaccaaagaagcgacggctaaattgggtgtcggcaatctctatcgcttaatgcatgcggcgcaaggttatgcttcaggtggctttgtgggggcggtcgcagggcgaataccggttacaccgcaaccgacgttagcccgtgcgagtggtgtacaaatgacggtcgttaatcatattacggtgacgggaaatggtgacgctgtacttgcgcaggcaatgaaggaagccgcacaacaagggacagaagccggcgcacagaaagctcacgcgatgatgttacaagactttcaaagtaatggtgcagcacgcagaacattaggagtttaa

SEQ ID NO: 315929 - DNA, 444 bp, Proteus mirabilis
atgatcagtgtgttgcctcgtattagtaatactaaccaagagattgagatgattatcaatcttgaagatggcgccgagaaaaaaagtgatgatgaagatagagaagaagggattgaaaaattacctgttattaatcgcacaaatatcagcaccgtggcccgagtttctgaaggcggtagtttattaattggtggatatacacgagaagataacataaaagcagaaaacaaaattccttttttaagtgctatacctttagttggccgagcatttagctatcagtcagataataataaaaaaatggggcgtatttttatgttacaaccgcgtttattagataaaactgatacgcacggattggactctttaactgaacacccatttttaccgatggataaaaaaacatctcaagcgctaaaacaaattcaggcatttatgaggtga

SEQ ID NO: 315930 - DNA, 303 bp, Proteus mirabilis
atgggacgtcaagcaggatttggcccaaaaaatataattatgtatcgttacggtacctgccatgaccataacccaaacgcttcattaccaaaaatgttttcttatcaagtaactacagaatctaatgaaacatgggctgaaggactatcaatgtttcataatcctaatgcaaaatatcctgtacccgaggagctttttccttcaattgctcatcattattttgataatggacagattattagtaagttaccaaattttcatccttatgcatctataacaataaatatgaaaattacaagttag

SEQ ID NO: 315931 - DNA, 186 bp, Proteus mirabilis
atgaatgaattaaaagaggaaataattaatcttctaaaatacaacaaattgacaaagtctgaattatattacttatgtagtcctgattactctaaaagtcaggttagctgtgtgattggtcacttggaagcaggtggagttattaagaaaaatacttgcgaatattgggagataatcaatgaatag

SEQ ID NO: 315932 - DNA, 264 bp, Proteus mirabilis
atgcgcgtattacagcaaggggatcgcttaactgtgggtaatgaactcaaaatggtggtggcggatgtggtcagtgatcatcaaggacgtgccattattcttatttcgccgatgttaagaacatcacctaccgtcaatgaaatgctcgaggttgagcgtccttttggggtttttcggctcgttgataatgaacagggtaaatttcagcatcgtcgcttggggtatacctatatcacgttatcttttgaggaggtgttgtactaa

SEQ ID NO: 315933 - DNA, 660 bp, Proteus mirabilis
atgttgatctatgttttacctgaatatcaatctttatacagtgcatttaatactgagctaccgatgctaacattaaccttaattagatgttctcaatggttttctcaatatagtttaattatcctgctgtttatattaataatttcttatagctattacactattaaacaccatagtgctaaatttcgcgacattgaacaacgatgttggcttaatcttccttacttgggggtcttattaagatatcaccagctacatattatttttcagataatgacgattacacaacaagctggattaccactgttacaggggttaaaaattattacagagcaattaacgcattcactgtatcaacgagcactcactgatatgatagcgcatattactcaaggcaaatcacttagctcatttatgcgacataatcctctattcccgccaatctgttatcaattgatctcttcagcagaaaattctggacaactactgtttttttgccagcaacttacccactggttttatcatcaattagaagaacgtcttgatagtgtaaaaacatggcttgagcctattttaatggcactgatcgcattgattactggcacgcttattattgcgatgtatcttccggtgttacaactaggtgataccatacattga

SEQ ID NO: 315934 - DNA, 261 bp, Proteus mirabilis; identical to SEQ ID NO: 310339

SEQ ID NO: 315935 - DNA, 246 bp, Proteus mirabilis
atgaaatggcatcagaaaatgcttgtcaggatatttagtagcaacattcttacatttctatttcaattcattgcttggggttcgttatcggttttaatcatggttaataggttaggcgagtttaatcttcatgcttatctaggttcattaccaatagtggttattcaggcgttagtgatgacatgtctatgcaggttagtgtttaagttttgtatgaaaaatattgatatcaaaggaggcatctaa

SEQ ID NO: 315936 - DNA, 126 bp, Proteus mirabilis; identical to SEQ ID NO: 315166

SEQ ID NO: 315937 - DNA, 720 bp, Proteus mirabilis
gtgaggaaggttattttagctattgttatcttcagttttaattgctcagcatttgcttatggtgaactatcaaaaaaagatatctcttggcttgaggagcagaaagtaatcaaagatattggttgcgaggattatgtagatatttcttcctcaagcaagaaaagtggagatgtttctgtaaatgaatcagtctttaaaaaagaaagaatattcaataaaagtaaagtagtgtgctatttaactgaaaaagaaggtaagtttagtgtttcagtcatagaagaagctgttattgatggaaaaaaagtgagcgtttcccacactgatggatctggttatgttggtggtgattattataatgggtgggcttacaagtgtaaaaaggatgcaatgacagatgaagttgcttgtggtatgcatcgtgatgattttactatagaaaagaacaatgatggttacagaatacaagtagggtataaacacttccctaattctttatcttatataagaattaacaaagaacatcctataaagtcggaagatagtggtatgtattcaagagaattgtctaacgaaattatcagcaagatctcagacgaagatgaagttaccattagatatacaaaatggcccaatgatcgacctatagataaaaagattaatatggatggatttaatgtagctaaggaagttgtaggtaatcttttagttaattacaaataa

SEQ ID NO: 315938 - DNA, 921 bp, Proteus mirabilis
atgagcatcccaaaagagcaatataattttaacaaattacaaaaacgcttacgccgtaacgttgggcaagctatcgctgattttaatatgattgaagatggcgataaaatcatggtgtgcctttctggcgggaaagatagctatactctcctatctatcttaatgaatttgcaaaaaagcgcgccaatacaattttccttaattgccgttaatttagatcaaaaacagccgggcttccctgagcatattttacctgaatatcttgagcaactgggcgtagagtataaaattgttgaagagaatacttacggtattgtaaaagagatcattccagaaggtaaaaccacctgttcactttgctctcgcttacgtcgtggtattttataccgtacagccaccgaagttggggcaacaaaaattgctttaggtcaccatcgtgatgatattttagaaacgctgtttctgaacatgttttatggtggaaagctaaagggcatgccacctaaattaatgagtgatgacggaaaacatatcgttattcgtccattggcttatgcccgagaaaaagacattgaacgttttgctcaagcaaaaaatttccctattattccgtgtaatctttgtggctctcaacctaacttacaacgccaagtgatcaaagagatgctaagagattgggataaacgttaccctgggcgcattgaaaccatgtttagggcaacccaaaatattgttccgtcgcatctatgtgatacccaattatttgactttgctaatatcaaacaaggtgatgagattattaacggcggtgatctagcatttgataaggatgatattccaacaagccctattctttccgatgatgaagatgagcgtcctgactttagccaagctagattggatgttgttgaggtaaaataa

SEQ ID NO: 315939 - DNA, 561 bp, Proteus mirabilis
atgaaaaataagatttgcccagtatgtggtgaggggcaccttcattcagaatctgaacttgtagagtttaagtataaaaacaccaagaagatgctggctaccaagtactccgtatgtgatgagtgtgattccgagatcgctagtgaagatgatgcaaaatttaacaaaagatcagtaactgcttttcataaaacagttgatgggctattaactggtgatgaattaaaaaaaatccgcaaaattttaggtattacacagcaacaagcatctattatatttggtggagggcctaactcttttacaaaatacgaaaacgatgatgttattcagtcagctgcaatggatagcctaattagattgtctattgatagtgtagactcatttgatattttatgtcgaaaaaaaggcattaaaatagagtcagtggtatctctaaaaccacttaatataaaatccaacttattagagaaaataccaacaacaactgattctagtggctggttcgtactttattcatctagtgaaagcaaccaatacaacgaaaaagctgagtatcattaa

SEQ ID NO: 315940 - DNA, 408 bp, Proteus mirabilis
atggtaaatagaaagattttaagtcagtatacaaacgaccctccaatcgatggtgaccaaaggaagatatctggtgggccgctatacgcagaggagcagattatatccgcagtccaagcaatacccagaactagaaagtgtaaaaatgatatagcaaaccttctttttgattgtgatgatctacttaatctagttaaggaggctgtatctcttggtcgatacaaggactctgaatggtgtactgataagcctaacggaaatctttttgcatgtgattcatatgtatacaagaaaagcagatggtcagaataccagtttaaaaacgttattgatgagtattttgtgaagttctgcataggaaagagtggctcgatcttgctaacgatttcctgtcatttgtcgagttga

SEQ ID NO: 315941 - DNA, 381 bp, Proteus mirabilis
  misc_feature (328)..(337): n is a, c, g, or t
atgatctatgctgatttacatgttcacacaaaccatagtgatggtgtttgtgaaataaaagatgtccttgaaaatgcatttagaaacggcattaagactattgcgatcaccgatcacgatactaccaatcattatgacgaaatttaccgagaaggggagcgtcttggattaaatatcgtcaaaggtgttgaaatgagttgttatgactttgacgtttataaaaaagtccatgtagtgggactttggcttaacgaaaaaacgcccaacgttgacaagctgtgtgataacactctcaactgtcgtgatcagtttcaccgagaattaatannnnnnnnnnttaatattatctctcaatcaacaaggctacgatatttgttatga

SEQ ID NO: 315942 - DNA, 1536 bp, Proteus mirabilis
  misc_feature (1519)..(1528): n is a, c, g, or t
atgtcattttcaacaggtataaatagcttaagcggcataaaaataaataacgtaaaattatttatttttatacttgcgctactattttcagttgactcaaagtctgaggaggagttttattataacccctatttcttatcagataacccggagtctgtcgctgatctatcttcttttgagaaaggattagaagtacctgaaggtaattatctggttgatatttacttaaatgacatattcttaaaaacccaatatatcaattttattgagaataaagggcagctatcaccatgtatcacaaaagcagagctaaaaagttggaatgttaatttaaatctcataacggatgaacaaaataaagataaaaataatgttgaacagaaaaatgagctcgatgaacattgtcagtcacttacttcattaattgctcaagccacagcaaattttgatgttggttcacaaaagctcaatctcactatacctcaagtatatttagtcaatcagtctcgaggctttattccaccagatttatgggatgatggtattgtggctggatttattacctatattttaaatgggagtaaaactcgcaacgatggtagcccagatactcattttactcatctcaatttacaaagtgggatcaatcttgggccatggcgtcttcgtgataactctatttattcttatgattctattaataaatcaagttggaaacatctgaatacttatatagaacgtggtattaataaattatattctcgtcttattattggtgatagctacacacaaagtgaagttttcgacagcatcaactttagaggctttcaactgtcatctgatgaagttatgttaccggatagccaaagaggttttgctccgattattcgaggtgtcgcccggactaatgccgaggttactatacagcaaaatggttatgtgatttaccgtaactcttttccaccgggtccttttgttattgatgatctctattcaacaagtaacagtggcgatttagaggtaaccattaccgagtctgatggttcaacacaaacctttactgtgccatattcatcagtccctttattacaaagggaaggacataccaaatattcagtgactgtaggtagttaccgttcgggtaatgatgagcaggagcggccttattttctacaaggatcagtgatccacggcttacctgcgggttggaccatttatggaggaacccagttatccaaaaattaccaagcggcaagtattggggtaggtaaaaatattgggcgttttggggctttatcatttgatattaccgaagcgagatcaatactacccgatgactctacacaccgtgggcaatcgatacgtattctttataataaatctatcaatgaattaggcacaagggtgcaacttgccggttataaatatgcgacgagtggtttttatactttagcagagactacttataaaaaaatgagaggaaattatatacaaacggaggatggtgttgttgaagttnnnnnnnnnngaagttag

SEQ ID NO: 315943 - DNA, 378 bp, Proteus mirabilis; identical to SEQ ID NO: 301697

SEQ ID NO: 315944 - DNA, 330 bp, Proteus mirabilis
atgaagggcgatattagttttattgatttaactttttggcaaagaagtgaaaatatattctttgaagtggtacaaaacattatcgttcaaatacaaaaaaatgattttctaacccatgaacaagccaaaaaatggttaaactctattagaaaaataagtatttctatttttgatgaatatgctttatcagcattaggaacacaaaaatcagttagtgggtgtattaaagcaagaaatggtttaattaaagatctttatagtaataaaagaataaagaagtttactgaagactttaaaattactaaggaaaatggagaacactttatataa

SEQ ID NO: 315945 - DNA, 159 bp, Proteus mirabilis; identical to SEQ ID NO: 300408

SEQ ID NO: 315946 - DNA, 216 bp, Proteus mirabilis
atggcaatatctaatatttattccaaaagacaaaaaaaactaaggggagaaattagtgatgtatattcctacgataaaatacctaaagaactacgtattcaaataatgcatatcataaaaaatacaattgatagatgtgcaacttactatgaaatgcagaaccattactacaaatgggatcatccagacattatatataaaaaaacaagtaggtaa

SEQ ID NO: 315947 - DNA, 231 bp, Proteus mirabilis
atgacatcgaccgcattatttgccgctggtgtaggtgtggccgccgcgggattggcaaccatgttaactaaaacaccgccagcgccaagcatagaggggcgaaactcagaaagtaaccagtatttcagttcgttagcaaatagagtggggcaaggttatccggttcctatctgttatggcgagatggttgtgggttcaaatgtaatatcacaaggtttggagactgtttaa

SEQ ID NO: 315948 - DNA, 1416 bp, Proteus mirabilis
atgagtaatcttcctactacagtaaatacaaccgcagtaacaactggtgttgataacttcacaacatcattaactacctacctcaccgatttgaatcttccggcaaatggcgttttagtcggcaatgatcagagatacactgtaatcgataactttccaaaggttattggcggtattgacagtataaggcgtgcagattctttatatctatcaaagtttattgcagcgtgcggcgctggcctttttgatgcagcactcaattttttatggaatgaaacagtagtaaatttaagatggaaagtttcccttaacgatatagactatttttatgacagtattgtcactgacacaaaaagaagagataaacttaaaactgtagatgatttagttaatatagaggagtgggaacttgttaagggttgccacttaacaggattactttcggatataggttttaaacatcttgattatataagagacatgaggaactgggctagcgcagcacatcctaaccaaagtcagctaacaggattcatgctcatctcttggcttgaaacctgcatcaatgaagtgattgcgaaagaaccagaaccctctgcattacaaataaagagagtactatctaacatcagaggcgctatcttagatggcaatgacttagcccatataaaatctgcgatggaaagcttgcctcaagatgttgttgattcttttctaagaactatatttgggatgtatactaatgataatgcagctgtacagattaagaataatataaaaggaattgcaaaaaaatgttgggatctttcgtcagaaactacgaagtatagttgtggtataagatatcaatcttttgcagctaacggtgagagagctaggaaagatgcagctaatgagtttttaactactgtatctggtcttccatatcttccatctgattctttggctgttgaaatatcaatcagagtgacgaatctataccaagcccattttggatggaataatttccataatgaaccagctcatgcatcttctttggctgcatatatctcttctgctggaaatgttcctgattcagttcgattcgaatatgttaagactatagttttatgttatttgggtaacagctatggagtgtctaatatggccgtttcttactatgaagaaatgattggtaagttcggcgaggctgagttaaaagagttcgttaaaataatttatgataaagacgtaatatctaggcttgcaactcaaacatgtgcttctcgatataaacatatagcatcacattttgttagcagaactaccaatcaaataaccttgcaagctctaaatgcgatcatagcatcgactgacccccagttaccgaacctatcgaaagcaacggcctacgataagcttattcgctcatactaa

SEQ ID NO: 315949 - DNA, 1236 bp, Proteus mirabilis
atgagtcatttaaactatttagagaaactcttggatggggttgatgttgagtggacgacgctagggaatgaacatgcggttgaaatagcaaatagtggtcgaaagcccgtaaaagcagcgctgcgtgtagcaggagaaacgccgtattatggcgcaaacaacattcaagattatgttgacggctacacacatgctggtgagttcgtgcttattgctgaagatggttcagcaagtgttgagaactactctattcaatatgcaacaggaaggttctgggcaaacaaccatgttcatgttgtgagaggcaaagaaggtctcaatacacgctacctatatcactatctttgtattgttaactttgttccgtttttatctggtggtggtcgtgccaagctgaccaaaggaaagctggttgatataccgctccccatcccctgcccagataaccccgaaaagtcgctggcaatccaatctgaaatcgtgcgaattttggataaattcactgccctgacagccgagctgacagccgagctgacagccgagcttaacatgcggaaaaaacaatacaactactaccgcgaccagttgttgagttttgaagagggtgattttgaatggatgactctaggcgatgtcacaaaaaaatggtactcaggtggaacacctactgctggaaagcctgaattctacgaagggggcaatattccttggttgagaactcaggaagtaaaattttctgacgtatctgagactgaggtatttataacgcctgctgcattggaaaattcatcagccaaatggattccagaaaattgcgtgattattgccatttctggagcaactgccggaagaacagcaattaataagattcctctaactacaaatcagcactgtggatgtttggaaatcgacgataaaaaagccctataccgatacgtatttcattgggttagcttcaattacgaaaacataaaagctctaggacaaggtgcaagaggcgatcttaattcaacaatcatcaagaactttaggttacctgttccttacgcaaacgatcctgagaaatcattggctgagcaggcgcgaattgtagctatattggataaattcgacacgttaacaacttcgctgcaagaaggtctgccccgcgaaatagaactccgccaaaagcaatacgagtattatcgtgacctattgttgaatttcccaaaatctcattcaaatgaggtcgcttaa

SEQ ID NO: 315950 - DNA, 1701 bp, Proteus mirabilis
atgacggcgcagctaaatagctctggtgcactctccgatcacgcggcgcactggcacagtattgactgggcaagatgccaccgcgagatcagaaggcttcaggcacgtatcgtgaaggcaacacaggaaggcagacatggcagagtaaaagcactgcaatggctgcttacccactcgttcagcggcaaagctctcgccgtaaaacgagtgacagagaatcgcggcaaacgaacttctggcgtggatggaattacgtggtctacgccgaagatcaagctcaaagcagtattatcactcaagcgaaggggctatcgtcctcagcctctgaggcggatttacatcccaaaagctaacgggaagcagcgggcactgggcattccctgcatgatcgacagggcgcagcaggcactgcatttgctcgctttggaaccgatagccgaaacaaccgcagatccgaactcatatgggttcaggtctgcccgatcaacggctgatgcaattgaacagtgtttcaaggctctttcacacaccgattgtgcgaaatggatccttgaagctgacatccgtagctgctttgacgaaatatcgcacgactggctggtcgccaatatcccgatggacaaggcgatcttacgaatgtggctgaaagctggctacttccaccataatgtcctttatccaacagcggcgggcacaccccaaggggggatcatatcgccaacgttgatgaatatgactctcgatggattagaacacctgctgcgacttaaatatcgcaggagtactcgcaatccgtcgaaggtcaatatcgttcgatatgcggacgacttcatcataaccggtgtgacacgtgaaatgctggcagaagaagttatccctatggtcgggcagtttctggcggaacggggtctctcgatgtcgccagaaaagaccaggatcacgcatatcagcgatggattcgacttcctcggcatgaacgtacgcaaatatgggggcaaactgttaatcaagccagctcctgtaagtgtccaacgtttcctgcgcaaagtaaggggagtgattaaaggtaatgcaatggtgcggcacgacacactgataaagaaactcaacccgatgttacgtggatgggcaaattattatcggcatgttgtggcgaaacaaacgttaagtaaggtcagttgcgcgatatggcatagcttgtggcgctgggtaaaacgtcggcatccccacaagggaactgggtggatcaggaggaagtacttccgaatcattggatcccggcactgggtctttgccacggaaactggcaggatactccaaactggagttcccgagcttctggagctttacaacattgacagtacaccgatccggcggcataggaaaatccgttctgatgccaatccatttgatcctaaatgggaaatctacttcgaagagcgattgacccttgcaatgcagaggtcaatcaaggggcgaacccgtctgattcgaatatggttggctcaggaacggcattgccctatatgccgacagatgatcggagaatctactgggtggcgtctcttccacgtgaaacgaacgattgacggtgggctagataccaacagtaatctgataatgttacatccggactgctaccagacagcccgcgcacgccgattcaaagtggtgaaaccggctccttcagtggggctttga

SEQ ID NO: 315951 - DNA, 747 bp, Proteus mirabilis
ttgtccccgcgatactttgcgggtgcagcaattcttcgagcgacttcatgtcgcacatatacctatatcccaactattaccttattggatagtcttcaaaaagaaggcttctatccgttctttgcttgccagactcgtgtgcgagatgacagccgtcgtgatcatactaagcatctgttacggctgagacgccatgaccaaattacgggcagcctagtgcctgaaatcatcttactcaatagtcatgatggctcatcgagttatcagatgttaccggggatgttccgattcgtttgtcagaatggcttaatttgcggacaaacctttggtgaggtgcgtgtaccgcataaaggtgatgtggtggaaaaagtgattgaaggggcttatgaagtgttagggctatttgaacgcatggatgagcaacgtgatgccatgcaatccctattattaccgccaccagcccaacacatctttgctcaatctgctctcacatatcgttatggtgaagcgcatcaacctgtgaccgaagcgcaagtattacagccacgccgtgtagaagataagaaggacgatctttggacggtgtaccaacgtttgcaagaaaatttaattaaagggggattatcaggcagaaatgcgaaaggtaaacgcgctcgcacgcgttcagtgaatgggattgatggtgatgtgaagcttaaccgagccttgtgggtgatggctgaaaatatgcttcaactagcctcgtaa

SEQ ID NO: 315952 - DNA, 390 bp, Proteus mirabilis; identical to SEQ ID NO: 300864

SEQ ID NO: 315953 - DNA, 1494 bp, Proteus mirabilis
atgtcacaaaaaaatgaagaactatgtttaaacatcgagaacttaccgaattattttcaacgtatgattgagcaagttcatataaaaacgggggcggcggctgaaattattttgcctaccctactgagtgtgatgtccatgtcgtgtcaggatcgctttgatattgaaccgataaatgggcgaaaatatccgctgtcactttatcatctcgttatggcgaggtcggggtgtcgaaaatctactgtttataaactgctcacaaaagcaatttcagaatttgagcaacagctagaacaggatttttatattgaaagagacgcttatgagcgaagtctggtgctatggaatgtaaaatttagcgcattgaataaaggttataaaaaagcgttgaatcagggaataaatgcggataaagcgctttttgatttagagaagtgcctcagccaaaaaccggtagagccagttaagaagcggctaataatcaatgattcaacaagtgaaggattggctaaggagttgggggatggatatccagtattgtcgctgatgtcagatgaggcgggtgagttgtttgaaagcagtttattacgaaaaacaccattactcaattcgctttggtgtgctgagggaaaatcggtgagtcgagcatccagagataactatgtcatcaaagattgccgttttagtttgttactcatggtgcagccagcgttatttgacagctttatgggtaaaaaaggaaagaaagcaaagagttcaggttttttagctcgcagcttattagtggatctagatcaaattcagcaattatgtgagataaaaaatgtttcacattcaactgaattaagtttagcagatttatcggctacgttgataaaccatttacaaaaaggaataaaacgtcgtgagaatgatgaagaacgccattgtattactttagcacatgatgcccaaggggcgtggaatggctattatcaagctgttaaaaagatgatggagcccggcggggaattacatgcttatgatgattacgcatcgcgctttatggagcatgcttcacgaattgctggggtgatgcaaatgtttatgacacccgattccactgttgttacgttggaaacgctggagtcggcagtctatattactcagtggcatcttaatcattttatcaaaaaaatagataattttaaggaagtcagtgatgctgaaaaactcctgttatggttggaggagcatcttgtcagtaataaatcttatgattttaggcgaaatgacatcattaaaaatggtccctattcactgagacgctctgaccgtttgcggcctgcattagaaaaactacagcaggaagctaaagttcaattattcgaaaaaaatgggattaactatgtcaagtttacgggggcaagaatggcacctgaagagctagccgaacgattgaatattccgttgagtagcagaggagtattcatactcaataactcaccaagataa

SEQ ID NO: 315954 - DNA, 351 bp, Proteus mirabilis
  misc_feature (335)..(344): n is a, c, g, or t
atgtcaacaccagcattagctactccaccaggcgctaacttaaaaataaacggtgatattactccccctacttgcaccgttaatgctggtgataatgatattattattgattatggtgtaatatccccctcttttattcctgctgaggaaaattacgcactaggagctaagagtgccaatatcaaaatatcctgtgatgcaagcaattatttaacacttaaggtatcagatacttataaaacaagttcaacagattcagcgaaaattagcgtttttggattagttaatgcaaaaaatacagaacaagagattggtggatatataattgatgtcannnnnnnnnntatataa

SEQ ID NO: 315955 - DNA, 273 bp, Proteus mirabilis; identical to SEQ ID NO: 310021

SEQ ID NO: 315956 - DNA, 378 bp, Proteus mirabilis
atgcatatatttataaaaaagacagatttaacctattttcaattggctcctgttccagatgatattgaaaattattattcattggatttccctgaacatcttgatgttaatgagtatattttttttcttgatagagatggaaatattgcttttaaggaagataactttagatatattgaaattgctaatattgagaagcaagaaagaatgtatgaggttattaataaaaccagaatttggttaggtcaattacagttaaacattataaaagaaagcgataaaaagcgtttagagcaatggttggagtatgctcaaagattggatgaggttgatttgtcaaaagcgccaacagttaattggccacaaaaaccagaataa

SEQ ID NO: 315957 - DNA, 339 bp, Proteus mirabilis
atgatggaaaaatgctttgccgttacatctatattttcagaattaacattatcaattgctgttaaatttataatatcaccagataataaatttgaattacttatatttatatttttattagcaataacagataaagagttacttgattttaaatttaatgagatatttaaattattagcatttaatagtatatttttagctaatatagtactttcaaaatcagatattcttctatactttttaatttctttttctaaaaatggaaatttacgttctaacgctatactatctttaaaatctaaaactaaattattatatttatttacatcatctcgataa

SEQ ID NO: 315958 - DNA, 294 bp, Proteus mirabilis
atgtctgatagaggtctggataaaggcggcggaatgcaagatatatttgaatatgcggcggctgacctagggttatcgagaatggattttgccgagctgaaagctggcctcgcgggcttgggcttccccgggggtgagcggcactatcaggctttacctgaacatttgaaagagcatgaaattggccttttaatgcgccaatacatcgagaccggcaatactgatctcatcgaacaggccgcgaaaaagctctttaattatcacccaaaatggtcgctatggctgatgcattag

SEQ ID NO: 315959 - DNA, 456 bp, Proteus mirabilis; identical to SEQ ID NO: 313479

SEQ ID NO: 315960 - DNA, 264 bp, Proteus mirabilis
atgtcattttcaacaggtataaatagcttaagcggcataaaaataaataacgtaaaattatttatttttatacttgcgctactattttcagttgactcaaagtctgaggaggagttttattataacccctatttcttatcagataacccggagtctgtcgctgatctatcttcttttgagaaaggattagaagtacctgaaggtaattatctggcagctatcaccatgtatcacaaaagcagagctaaaaagttggaatgttaa

SEQ ID NO: 315961 - DNA, 306 bp, Proteus mirabilis; identical to SEQ ID NO: 57884

SEQ ID NO: 315962 - DNA, 693 bp, Proteus mirabilis
atgcaatacccttttgcaggtagccgtatgatgcgtgatttattgaatcgtcaaggacatcatataggacgacgtcatacacgtactttaatgaagaaaatgggcattaatgcgttatatcgtaaaccaaatctaagtcaggccaatcaagctcaccgtaaatatccatatctgctcaaaggattggctattcagcgcagtaatcaagtgtggtctacggatataacgtatatccctatggcaaaaggctttgtttatttatgtgctgtgattgattggcatagccgcaaggtacttgcgcatagagtatcgattagtatggaggttacattttgcatagaaacattaaatgaagctattgaaaaatatggccgacctgaagtctttaatacagaccaaggcagtcagtttaccagtgatgcatttattgatgtattgaaatcaaatggcattcaaatcagtatggatggtaaaggtcgatgggttgataatgtgatggttgaacgattatggcggagcgttaaatatgaagaggtgtatctcaaagcctacagcaatgttttggatgcgaagaagcaattaaacgcatattttgaattttataatttgaaacgacctcattcgagtctggacaaaatgactccagatgagttttactatgaccagctaccacaacaaaataaggtagcttaa

SEQ ID NO: 315963 - DNA, 684 bp, Proteus mirabilis; identical to SEQ ID NO: 296787

SEQ ID NO: 315964 - DNA, 405 bp, Proteus mirabilis
atggtcatattttgttcccctgaacatcctttagctaaggcgaaaacagtgacattagccgatcttcaatccgcgccgtggatcctacgtgaaaacggttctgggacgcgagatgtactcaatcatctgctgtttgcttcattacccggatatcgaatcgaaatggaattaggtaattcagaagcgataaaacatgctgtaatgtatgaaatggggattagttgtttatctcgccgagtgatccaagatcaaatagagagtggctctttaaaagagataaaggtcgaaggtctaaaattacaacgtactttatatttggtctatcatcgccaaaaacatgtctctgatgccctcaaaaaattactttcatattgtaatgctgaacatttaatcgacaacgcttga

SEQ ID NO: 315965 - DNA, 303 bp, Proteus mirabilis
  misc_feature (268)..(277): n is a, c, g, or t
atgaaaacttttatctgtgtatttgagcctacgaccgaggctcgtacaaacaactgtgcggtaccgctggccatagcgttaaacaccactaatgcaaaactggcaacagcgactgcagtagtaaaattatctgaagcatatccagaagctatggataactttaacactgatgatccgttaattagcgaacaccttgacggctctgtttgccctactttagatatattcgatgagaaatttgctgttgaaaatgagtttgatggaactnnnnnnnnnngatggaactcaatggaaacctattga

SEQ ID NO: 315966 - DNA, 2718 bp, Proteus mirabilis
atgaattatatctctgttattctttctgatactgatatcaccattaaatatctttcagaaaaaagccattattcatttaataccacaaatagccattatcttgattggctaaatatggctaaagctattaatcataaattcaaatctgctcaaggtggtttgatatattcgacaagtaataaattggatagcgatattattaaaaccattgataataaagtaataaatttatcaaatttctttactgaaatatttaataaaccttttatttatatcaataaagcgcagcttgaacatcatcatgatttagaagaaaaaatggttacagttgccaataactttgcttggtcaattgaatattcaggcttagaaacaggaaaagatgaatattgccaagagtctctcttaactacggccaatggttatattgggttaagaggaactttgcccgaaatgactataagtgatgagcactaccccgctacctatattgctggcctatataatcaggcaagttcacaaatagaaaaccatcaggtgattaatgaagattttgttaatgcacctaatgggcaatttatttctcttaaaattggtaagggagaatatcttcatccaaagcaactgataacacaccatttaacacgtcatttagatttaaaaacgggtgtattcactagccaatggcatgtagaaacccctgaaggacagcaacttgatattcattgtacaaaatttgccaatatggctgatatgtcacattacgccattttatatacctttaaaccattaaatttctcaggtgagataacggttataactcgcctagaaggaaatacttataattacggtgtacaacgctaccgtagccttaatccccatcattatcatgtgttacaaactggagcgaataagcaacacgcatttatattagctcaaacagatcagtcaaaaatagggatcggattatcgtcaacaatcaggggtgatttctttgcaaatgaagatattgtttgtcatgtttcagatacgcttgttgaacaaaccatcaccttcaacgctcaacaaaataccacctatcaacttgaaaaatgtgttgctgtaacaacctctacggcttacccagactcatggcaagatgtggttaattgggaacaacaacctttacacagccaattgataaatagccaaaaagcgtggaaaacgttatgggatagtgccgatatctcgatttctggtgatctgatgacccaaaaattactacgcttacataccttccatttactgtcatccgcatcaccatttagtaatcagcaacatcaattagatgtttcagtcacagccagagggttacacggggaagcctatcgaggccatattttctgggatgagatctttattctgccattttatatcatgcacttccctgaaaccgcacgccaactattactatatcgttaccacaggctacctgctgcacgtcttgcggcacgagcagaaggatttcaaggtgctatgttcccttggcaatcagggcatgatggtagtgagcaaacccagacactgcatttaaaccccttatcagggcaatgggatgccgaccatagttgtcgtcaacgtcatgtctcattagcgattgcctataatgtgtggctatattggctaaatactcatgatcaccaatttatggaacagtatggacttgaactactcaatgacattaccttgttctggttagaccaatgtcagtgggatgaaggcgatcaacgttttcatattgatggagttatggggccggatgaatttcatgagaaatacgcagactcacttgaaggtggcttaaaagataacgcatacactaatttaatggtggtttggttgtttaatcaaatagagatgttcataaacaatgatcgtttttctaaaaaattacaacagctaaaccgccaatctagcgttttcaataaaatacaagaagttaaaaatcgtattgctatcaatattgatgatcatgaaattattgaacagttctcaggttattttcaattaaaagatctggattgggaaagctatcgaaaaaaatacggcaatatctatcgtatggatagaattttgcgtaaagaaaataaatctgccgatgattacaaagtagctaaacaagcagataccctgatgttatttaataacctagataagcaaaccgtacattccctaattacctctcttggttattcagtttctaagcactttgctgaaaaaaatctacattactatttagaaagaacctctcatggttccacactgtcacgcattgtccatgcttatctcgcagaacaaatacagttacatgatttgtcatggcaactttatcaagatgctctttattcagattataatgatattcaaggtggaacaactgccgaaggtattcatactggtgtcatggcggcaacattaaataccaccattatggcttatgccggtgttgatattcgtcaggatatgctgaccatcaccccttcactccctcaacaatggcaaaagctaagctttaaattattgcatcgctctactttatatcaaattaatctcactcataaagaaattagtattttaagtgataagcccagtactattttaattaaccatcaaacgcataagctaaccgccaatacgttattagtattaaatttaaatggagacacgcaaaatgactaa

SEQ ID NO: 315967 - DNA, 540 bp, Proteus mirabilis
atgagcaatccatttacagtatcacaacaccctgaacagctagagaccacccctttaatagatgaaagccatcactatgatgaccctttaccgccaaaagatctgatttttttacaaagtataaatgaacacacatgtaaaattaaatcagcacaagtaaatagtagattatcaaacatatttccaatgtttttagtaatattgatgttaatgttttatacattgtttattttttatgagaatcatagtgctaaaagatttacttttgaagaaaatgttcaaaatatagagtcagaatatggaaactctcaaaacttaactactttttataaagagttagtggaggaatatagaccttattttggtaaaaaacaaataggatggctagaatatttattctattattataatgatgacatatataaacgtgatgactttaaaatagcaaccttgattggttggctaattttttttccctggctcattatatatcttaagctcccttgctttctttgtgccaatgacctatttggtggctga

SEQ ID NO: 315968 - DNA, 927 bp, Proteus mirabilis
atgacccgtttacgcactgtatcaaaacactcagagcaattagaaaccacaccattaattgcggaaagccatcactacgatgatcctttagcacctcaaaaactggtatttttagaggctgttaatcaacagagttgtgtgattaattcaccacagcgcaatagccaactcactaatacaatacctttttttatcatattattagtgatggctttttatacgttatataattttactaataatcatcttgattctaaaacatcaatcgaaatgatggctaagcatgtagaagaaaaatatgcaaaaccaaataaaaaggatccacatgcattaaaaatgatagattcatataaacgtttttttggtgaagaaaaaattagctggtgggagtatataaaagcgtataactccggtgaattttttattgatagccaatatgataaatacctcgtcattggctggttaatttttttccccggttttttatggctatttggctacctctctttctttacgcctcctgtgtaccttattgctgataggcaaagaggaatactgtatagctatggcatggggaaagtgcgtttaacccgctataaagaggcgcaatttggttatgcgggcaatatgttggcaattaaactatatggcattaatgaaaaaacaggccaattaaaaacgatcctctatcgccccaatgtgtcccactactccagtttcctaaccagtaccgacagtgaaaaccaccgttttatcactttccttaatgcctatatgcaacaaggccgagatgctgtttcatcggttgattaccaagcccgtaagctctttttatcttttggtaaaaaccctcttcctgctgattttgagcaacaggtcgaacagattttagcaaagcttgatcaggagaaaaaacaccatgcgtag

SEQ ID NO: 315969 - DNA, 696 bp, Proteus mirabilis
ttggccggcgatcgtgcttatgctgatgataaagcgattgttgcagggttagcgcgtttagatagaaaaccagtgatgattatcggtcaacaaaaagggcgagacactaaagagaaagtaaaaagaaactttggtatgccatcaccagaaggttatcggaaagcattacgcctgatgaaaatggctgaacgcttccatttaccagtgattatttttattgactccgcgggtgcttatccgggggttggcgctgaagagcgggggcaatcagaagccatagcacgaaatattcttgaaatgtcccgattaaaaacaccgataatttgtacaataacaggggaaggtttttctggtggtgcattagcaataggtgtgggggatcgagtaaatatgttgcaatatagtacttatgctgccatatcgcccgaaggctgcgcctctatcttatggaaaaatgctgataaagcacctattgccgcccaaaccatgggaatgacggcacctaaattacaggcattgggtattatagactcaattattcctgaaccattgggaggcgcacatcgccactaccagcaagcggctgaatttgtaaaaaaacagcttctcgcagatttaacagaattgaatcgttattctaaagaagaactgcttgagaaacgttatcagaaattaatgtcctatggttattgttaa

SEQ ID NO: 315970 - DNA, 162 bp, Proteus mirabilis; identical to SEQ ID NO: 313312

SEQ ID NO: 315971 - DNA, 771 bp, Proteus mirabilis
gtggtcacagaccaccaaggaaccccgcgagagatattcagtgaaggcgggcaagccagttgggcaggacggctgaatacatggggccaaatgcagttttggcgttaccgagagggtaaggcggagaatgaccctaattataccgaatgtccttttcgctttgcggggcaatatgaagatgaagaaagtggcttgtattataatcgcttccgctattatgatagggaaacaggacagtatctttctccagacccgatagggctattgggtgggctgaatccctatgggtatgtgcattgtccgacggggtgggttgacccgttaggacttgcaggtgactgctgtaatgaattaaaaattgtatatggagagctagactatctaaacagacctacaggtgtatgggccagaatagataaaagctttattaatacaggcactcatgctaacccaaatatacaacctcccggatttattacaggtcaaggttctaatcgagctagaggtcatttatttggacgtcaattaggtgggtcaggtgatgatgttagaaacttagtcacacttcaacaaaggcctgcgaacacaccatttatgagtggaatcgaaggccgaataagaaaggctgctgaacaaggtcaaattattgaaatgagttctgttccttattataaaggtgtatctagaattcccgccggtattacaatcaaagctgaaggaaccggcggattttatgaatatgttaccgtacttaaccctccaggaatgtaa

SEQ ID NO: 315972 - DNA, 351 bp, Proteus mirabilis; identical to SEQ ID NO: 308227

SEQ ID NO: 315973 - DNA, 1950 bp, Proteus mirabilis
atgggcaccggtggcccaattggaggccaacttctcaccaatgccgcaggcgggttactctctaacgccaataacagtggccacgccgaaggcaccacgcaatcggcggtcagtgacggtacattaattgtccgtgatagcgacaaacaaaaacaagatattgatacccttagccgagatactgagcacgccaatgatggcagtattaacccgatattcgataaagaaaaagaacaaaaccgcttaaaacaatcccagttgattggtgaaatcggcaatcaggcgatggatatcatccgcactgaaggggatattgctggtctgaaagcgcagaaagaccccgatgcattagcagtcgcgaaaaaacagctggaattagaggggaaaacactcaccgatgacgccattaagcaacaagcctacaacaacgccatggcacaatatggcacgggcagcgacttccaaaaagccgcccaagcggttacagggttgctgcaagggctggcaggtgataatttagcaggcgcactggcaaatgcatcttctccgtacttagcgaccaagattaaagagctgacaactgacccaactactggtgaggttaacaaagcaaccaatgccatggcgcacgcagtattgggtgctgtagtcgctgagctaaataaccaatctgccgctgctggtggtttaggtgctggtggcggtgagttgtccgctaaagtgattatggataccctcttcccgggcaagaaggtttcagacttaaccgaaagtgagaagcaacaagtcagcgcactgagccaattggcttcaggattagctggcggactgactaccggtgatgtggccggtgcgattactggctcgcaagcagcgaagaatacggttgagaataactttttaagtccagatgatcgagatataagagacaaggcactcgaagatcaaaaggcaggtaaaaatctcaaagaagcgtctcaaaatattatctatctaacagataaagataattataccgacaaattactctatcaatatggtcaaggtactttagataaagcgggggaaaccgcattgactgaataccttaacgcatatgctacacagttacagttaagaggaatgagtgagtcagatgcactcaaggctgtagaacagatattgaaatatccaagcagtgcgacacctgatttatcagcagaatataataaggcattaggtcaactcagcactgaagaaagacatgcatggcaagcgatgattggcacagatgcattattggctggtccgggacgagcaagccaattaatgcggttagcgttgatttcaggcggttcttatcaaacgggaatagggattggtcaaattgcagatgggaagatcgcagaaggtagtgtcaacattggtcttggtggattggctgtatcaggtggctacttaggaaataaagttacaacaggtaagccaaatggtgggactactatatcgaaagagataacttatgcagatggtattcatttcgctctggagcagaaaaatcatttaaccacttttgatggaataactagcaagggtgtatatggaacgcataatctgaatgaatttactcaagcagcatctgaaaatggaataaagattattagtcagacgcctagtaacgttaagggaattagtgaagttgtgtatcaagtacctaaaaaaaatagagaagggaacattattcctggagaatttaaagataaaccttatgttaaaacagtatatgacccgaaagtttttcctgatcaaaaaatgttagatttaggtcagcaagctgcttccaatggttataaagatgctatatcccaaggtcgacgcgagtatcaatcaaccgctggaggggtaaaattccaagtatatttggatcaacaaacaggtagagttacgaacttttttccggtggccgaatga

SEQ ID NO: 315974 - DNA, 321 bp, Proteus mirabilis; identical to SEQ ID NO: 308599

SEQ ID NO: 315975 - DNA, 351 bp, Proteus mirabilis
atgacgcatctaagggtaagacgtattgctgaatcactgaataatccccctgtttgccaattaaccgataagcaattggtactctatcgtgagcttagactcgcttctggcgtaaaagcttcaacgataaatagggatatgtcagcactcagcgatatgtttacagcccttaaaaaaacggatttctttttaagtaaacatcctgttcagggaatatcacggttaaaacaacaaacaactgaaatgtcatacctaacaactacggaaattcagcaattattagcattattggaaggtgacaacctaaaagttgccgttctctgtttaagcactggcgcccgttggggttaa

SEQ ID NO: 315976 - DNA, 375 bp, Proteus mirabilis
  misc_feature (255)..(264): n is a, c, g, or t
atgtctattgcaaaacgcaccaaagacaaacgtattgcgttaggtttaacacaatctgagcttgctaccttggctggtacaacgcaacaatcaattgaacaacttgagagtggcaaaaccaaacgccctcgttttttacctgaattagcaaaagcgttaaattgtgaattatcgtggttgctcgaaggggataataaacaaacacacgcttctgaaattcctccccaagatgaatggcattcagtcagtgaatgnnnnnnnnnnacgatacccctctcaatgctgatgaagtcgagatccgttattttaaaagtattgaacttgccgctggtgatggctgctgtactaacgaagatcataatggttataaattga

SEQ ID NO: 315977 - DNA, 441 bp, Proteus mirabilis
  misc_feature (393)..(402): n is a, c, g, or t
atgagaacccgtttccctgaattagacgtaagttgtgtgatgggatttggtgctgatgcatggtctaaactattccctaatcaagctaaaccgcgagaattaaatacctttaagcaaatcaacggcgatgtgtataccgcagtatcgacacctggcgatctgttttttcacatacgggcattaaaggtatctgcttgttatgaattagcctcaattattagccaaaaattaaactctattgccacctcagaagatgaagtacatggtttccgctattttgatggtcgctcaattattggctttgtggatggaacagaaaatcctgagtttgaagatgagcgtgtcgcttatgcggttattggtgatgaagatccactgtttaccggtggaagnnnnnnnnnnggtaacagctgccgctattgctgcttcttggtttggtag

SEQ ID NO: 315978 - DNA, 444 bp, Proteus mirabilis
  misc_feature (8)..(17): n is a, c, g, or t
gtggaagnnnnnnnnnnggtaacagctgccgctattgctgcttcttggtttggtagttttagtcatgatatggcggcttgggaaaaccaatctctcatcgagcaagaaaaagtgatcggtaggcataaattcaatgatgttgaactaactgatgaagaaaaagatccaggctcacacaatgtcgtcaccaatattcaagatgaaaacggtgatgatttaaaaatcgtacgagcaaatatgccgttttcaaatccctccaaaaatgaatatggtacctattttattggttatgctcgctatttctcaacaacaaaccgtatgttagaaaatatgtttgcaggaacacctgaaggacataccgataaactactgaaattcagtactcccgtcacgggcacattattctttgtcccatctccggcgtttttagatgatatagaataa

SEQ ID NO: 315979 - DNA, 210 bp, Proteus mirabilis
atgcgtgtgttaaatacattctttactgaaaaacaaaatgacggcttagttggtcgctcgagtatgcgattaggtaaattgataaaagatgattatgcgcaagatcatattgatatggttaaccaagttgcagggttagtgggttataatgaagatatcgttgctatttatactcagcacgctaaatacttagcgagtaagcaactttaa

SEQ ID NO: 315980 - DNA, 558 bp, Proteus mirabilis
atggttttatctggctcaaccttctccgttatttgtgtcatcttgttctttcttctcacagtcagattgacactgaagtggataacaacgggattcatatcattaatattaatttctccgataatatatcaaaatattatgtggagaatgacttacatttcatcaggaaatgatggtagtacttcttataaacttgagttgttgaaaacgttgtttgatagccctattgtatttaattttgggcatggaatggtaggatactatgataatgctccaaactactttcaatccctctttgatatgactttgtttggaagtaatttattagtttttggtttttggttaggtagccttctaagtataagctggttaataatattttttagctatttccgtttttcatttaggctagtattattatgtctattaccatgccttaaactgacttttcttttccctatattttggctatatctagcatttttagtaggatacttaggaagtaagaatgaaaaatatcaaactagatattcaacgatacaaaaatttaatcggtga

SEQ ID NO: 315981 - DNA, 423 bp, Proteus mirabilis; identical to SEQ ID NO: 308936

SEQ ID NO: 315982 - DNA, 192 bp, Proteus mirabilis
atgaaatataataaagaacttcgtcctattattggaaataatgttatattggctacaggatctgttatcttaggttcaattatgattaatgatggagcaatagtcgcagcaaattctgttgtcttaaaagatgttgggaagaaagaattagtagcaggtgctcctgcttcatgcctgaaaaaactagattag

SEQ ID NO: 315983 - DNA, 150 bp, Proteus mirabilis
atgcattgcccttactgtaaatcagataatacaacaaaagaagttatgtacggacaaaaaactggtgattgggtgtgtcatgattgtaagcgcacatttgacagagatgattttaaattaatggaagaacaagaaaaaaataaaaaataa

SEQ ID NO: 315984 - DNA, 447 bp, Proteus mirabilis; identical to SEQ ID NO: 314924

SEQ ID NO: 315985 - DNA, 588 bp, Proteus mirabilis
  misc_feature (551)..(560): n is a, c, g, or t
atgtttgggttaagtgcctttgatttggcgcgtatccaatttgcgtttaccgtttctttccatattatcttccccgcaattacgatagggctagccagcttcttagctgtcttggaaggcttatggctaaaaactcgcaataaggattatttagcgctattccatttttggtcaaaaatattcgctgttaactttgctatgggcgtcgtctctggtctcgttatggcatatcagttcggtactaattggagctttttctccgattttgccggctctatcaccggtcctttattgacttatgaagtgcttacagcattcttcttagaagctggatttctaggtgtgatgttatttggctggaacaaagtaggtgaaaaattacactttttcgccacttgcatggtggcattaggtacattgatgtcaacattttggattttagcctccaacagttggatgcaaacaccacaaggattcgaaatcgtcaacaatcaagtggttcccgttgattggctagcggttattttcaatccttccttcccttatcgtcnnnnnnnnnnctctcaatgtctatatggattatcttaa

SEQ ID NO: 315986 - DNA, 864 bp, Proteus mirabilis
atgaagttctatacgcccttaagatatccaggtggtaaaggaaaactatcgccttttatcaggttgttatttgagcaaaatgatttaattggagagcagtatgctgagttatacgctggtggagccggtgtagcgataaacttattaatgaacaatgtagtttctcacatccatttaaatgatttaaattattctgtgtatgcattttggaattctattgttacaaaaccagatgagctttgtcgattaatcaatgataccaaagtgactatggatgaatggcatcgccagaaatatataatgtcaaatccagagcaattttcaacgctagaaatcggtttttcgacgttttttctcaatagaactaatagatctgggattttactgggaggggtaattggaggaaaagaacagttaggtaattggaaattagatgcaagatttaataaaaaaaatttgttatctcgaatagatagaattgctaaaaaagctgataatatcagtgtttataatcttgatacaaaaatctttttgaaagatatttatggtagattacctgataaaacattcgcttatttagaccctccttattatgttaaagggaaaggtctctatcaaaaccactatacacatgatgatcatgttgaaatagctgagctaattaaaaaattagataataagtattggatggtttcttatgataatactcctgaaataaatttaatgtattctagtttgagaaaattggaatatggaattaattatagtgcccaagaacgttataagggacctgaaatcatatttttctctaaaaaaatgaaagtcccagatgttattaatcctatgaaattagagaatgtatag

SEQ ID NO: 315987 - DNA, 1737 bp, Proteus mirabilis
atgtctaatcagattacaaaaataaaggctgttaatattgagaagtttagaggccttaataatgtctctataaattttggtgaacgaatcactattatttgtggaaagaatggaacctctaaatcaactatattaggtatagttgcccagatgtttaattttgaaactgattataccaaactagatcctgttacaaatcaaccaatagatttgagaggatttaaaaatctcgcaggaaaaccttttatctcacaatttaaagaacactttaggttatcaaaaaaatttgatttaactggtactatgaaaacaggtgtgcatatttatgatggcgcggaaaaaaaagaattaaaaaatttagaactagggctatatcttagaacaaatcctaatacccaaaatccaagcattagagctactgtaagaaacaatacaacgacaaatggagcgagtgatagtagaaaaataacacatccagtggcttttttaagtttgaagaggttaaccccaattacggacaggataaagtatgaagtaacagatatacaagagtttatggaggaaaataaaggctcttttatgcatgacagtttgcatatcctaggacgtagggggggagagagtcagttaacccaaacaacaggaacaatcgattcgatggttgttagtggtgagaattatgatcacgaatctgtatcagttggagaagataatattggacaaatattacaggctgtttactcatttaaaaaactgaagcaagaatatgctgattatcatggagggataattttaatagatgaagttgatgctgggttatttcccgcagctcaaaggaggcttattgaaagattagtaaaattttcaaagcatcttgatttacaaattattatgacaacacattcacctacaataattgatacaattaattcatatagcactaataatgaaaaagaatataaggtttgctatttaaccaatacacatggtgatgtaactgtaaaaaataattattcatggaatgatatatcaagagaattaaacaatgagagctctgatttaaaagaaaaaattttgagtatgaacgtaaatgttttctttgaagataagcaaaattatgatttttatacaagtttaataacaaaaagaagtataaaaaaacatataacaccattaaaagatattaatttaggatgtggtaattataaattattgttagataaaaaaataccaggtatttatgatgagtcaataattgtatttgacggtgatgttacaaatatcaaaaaatataataacgttataaaattaccgaccaatttgccacctgatcagcttttatttgaatttttatacaatttgccgagagaggatagcttttgggataatgactacggttatcacaaagatttttttatagagaaagcagatgaggttttatatctaatcaatacaaatgatcatactatcgagctttctaaactgataaaaaatttcagacaaatacctgggaaaaaaccaagagatgtattcaaagactttgctaaagaggaagttttacagaaattagtaaacaagggcggtgttaaatataatccatataggttatgggttgataaaaataaattacaagctgagttgtttgaagaggagtttattgattgtttatcaagggttttaagtattaagtataatgtggaacaagctgaaattaaaaaggttatattaaaaaattag

SEQ ID NO: 315988 - DNA, 375 bp, Proteus mirabilis
atgattgatattctatttccttcatatcaagataaacgacttaatttacgtgagttagaacatgggcttgaacaacttaatcgattaacaacatcacaatatagattagatattcaacctagtgacaggataggatactcgactatttttatctataaggaaaacaaaacgcatcctttcagaaatcaacttactattgataattcgggttcaaaagcaacaggtgaaattttactgacgaataccacaacaatagattcgttatttggtgttggggagcagtggaatatctccttaaacagtaatacagatttattacattcacattattatagaggctatacagcgagtataaatattccctatggctgttga

SEQ ID NO: 315989 - DNA, 558 bp, Proteus mirabilis
ttggctaaatatcaaatagattccattcaagaatgggatgcgtttcattatgatggaaatgagtattcactttcacatcttgacgttcatgagattgaatttaaaggggaaaaatatagttataaatttgtggttacttacgggcttcactgttttgccaaagaagatactcaacataacataccagtcacttataaggatgggagagaggaaaaaccggtctgtatggagagatatgaggcgtcaaaacatataaaaggaatactagaaaatttacctaatattagtctatatcagactacaacggaaaaatatttcacattgaatatgttaaatagtgcctctgggaaaattgaaccctataaggtttgcatcgcattttacaaagaaaagcgattgcttagaatgcatattctttctgctttttttgcaagaagtggccctggagctattggagaagatattccaaataaatccatgagtatttttaagatagctaaggatacaaaagacaaacctagaaattcgaatataccgaaggaagcaaagaatcggtag

SEQ ID NO: 315990 - DNA, 468 bp, Proteus mirabilis
gtgcgaggtaatagattcaattcgcggaataaccaagttagatcctctccatggctttcttttactggattaactgaattcataacatacaatactaaatgtgcttcgctaacatatttttttgttattgctttatatttttcaatttctccagcactattgagttgctctttaaaaccgaataacccaggagtatcaattaactcaatatcgtcatctaaacggtatacctgcacttcattagatgactcctgttggctaatattcatacttttatctaaacgttctaaccaagctgatgcaatggatgttttaccttcagaaaaaccgccaattaaagctacttttaatattttttcctcagcggtttttagtgcggctgttaatttattaattaaatttacatctggctctaaaccaaaatcacgacctttttcaataaatttagctaatttttgtagcatttga

SEQ ID NO: 315991 - DNA, 294 bp, Proteus mirabilis
atgattttaaaggaaatgagagaagacttttactttgtgttacctgacaaaaaagatgcttatattgaagttaaggctgacaaggcgttgatagaaaaaatagaaagattaatgcaggattactgtttctttattgaggtagtggatcaaggtaaggtagtttttggatcaatattaaattatttatatgagtattatttcaatgattataactatgatattcccagaaaaattttaaactctttacatgaacaaatctataaaaaagcattactctatagaaagttatcataa

SEQ ID NO: 315992 - DNA, 330 bp, Proteus mirabilis
gtgaataaaatctcgccatccaaagacattacaatgcaatggataaaacagttaaaactcattactgaaaaaacacaccttgattatatagacattattgttgaccaatcgggattagagacccctattgtcccagcgttaatcaaaatggataatgagatcagatggttttcccttttcactaatatgcctgaagaaggctttttagaacaagcacctctgcttattcgtatagaatggaataagagtacacatttaattttattagaggagctatttgaattactttactcagagcctcgattattaatacaccccccttccatttaa

SEQ ID NO: 315993 - DNA, 327 bp, Proteus mirabilis
atgcaaagtaataactatgtagtaatgccaatgtactcctctgttttgggcacagaatataccttcgagtgcctattaactgaagatgagagtaattgggttgggaaggtaaccataaacaaagggccgtttccctctcgtctatttaaaacggtggatgtggtaatcccaaagaaagatacagcttcagcatatgaagcatcagtgatattggaaggtggtatctataatgctatttgtaacatattggaagataacgatgggaacgaagagtggactgttcagtatagacaacacacggacccagagtggcattattttttttag

SEQ ID NO: 315994 - DNA, 468 bp, Proteus mirabilis; identical to SEQ ID NO: 315471

SEQ ID NO: 315995 - DNA, 639 bp, Proteus mirabilis
atgcacaattacaagccgtggttagttttcaataagctagttatattactatttctatcaattggtattgtcatatcatcatttgctgcgattaatgttgatcgaactaggatagtttttgcagcaaatgatataaaccaatcactaacacttgcaaatgatagtgcgatacctatgttggtacaggtttggtccgatattggtgatattcactcttcaccagatacgaacagaacaccacttattatattaccacctatctttaaaatggctcctggtgagttgaggtcacttcgtttagtgcttagttctcgtgataatttacccaccgatagagaaagtgtattttggcttaacctttatcagataccaccagaaaacctcgcaacacaagatgtgtcacgaaaattaattttaccactacgtttgcgattaaaagtttttattcgccccgcaggattaaaagtaccgacagaaaaggatgaacagcgtctacattttagtgctacctcacatggtgtgatgataacaaaccccacaccgtggtatatgagtctagtgatcatgactagcattgataagcgtagacagcataatattatgctgtctacgcttatcaatgctagtcatgatcactag

SEQ ID NO: 315996 - DNA, 1344 bp, Proteus mirabilis; identical to SEQ ID NO: 302438

SEQ ID NO: 315997 - DNA, 759 bp, Proteus mirabilis
atgaaaaaggatgctacttgcgttgcaattcgttatctcgttacgctaatgctatttatttttcccatgactatatcatgggccagtgtgactattattggtagtcgtattatttatccatcaaccgctccttcagttgatgtgcaactaaaaaataacgatgcattcccttatattgtgcaaacttggtttgatgatggcgatattgatcttaaaccagaaaacgcgagtactattccttttatctccaccccaccagtgtttcgtattttaccgaaatcagggcagatagtacgcattgtttatggagctaataaatctttaccacaagatcgtgagtctttattttggtttaatgcgttacaagttcctccagccaatataggcggggaaaaacaaaataaagtcctggtgatgttacgcactcgtattaaactcttttaccgaccagaacagatcggctcaccagataatctagtcaaaaaactccatgtaactatgtttagtgatactaaaaaagggattggcatcaccgttgataaccctaatccatggtttgcatcaatgagtaacttaagcgttacattaaatggtacgacgcatcaacttgatattgaaatgatatcccctttttctcaccatactttttggttacctcgcaagcttaatctcaaatcactacgaggtactgttaccgtgacactcattaatgatcaaggtgcaaggataagtgagcattatcatgttaacgaaggttaa

SEQ ID NO: 315998 - DNA, 537 bp, Proteus mirabilis; identical to SEQ ID NO: 300363

SEQ ID NO: 315999 - DNA, 489 bp, Proteus mirabilis
atgattatatttatcaccggtgcttcagcaggttttggagaagctattgctcgtcactttattaaccatggacacaaagttattggtactgcgagacgtcttgataaactgcaagctcttcatcaagaactgggcgatctattctatcctttacaattagatgtcaccgataaaaaagcagtcagtgaaatttatcatcaattgccagaacaatggcgctcaattgatgtattagtcaataatgcaggactcgctttagggttaagtaccgctgataaagccaatcttgatgattgggatactatgatcgaaactaataataaaggtttagtgcatgtcactcgtgcattactaccctcaatggttgaacgcaatgtcgggcatattattaatatcagctcaacagcggcttcttggccttatatggggggaaatgtgtatggtgcaacgacttggttttattttagccgtgatggtcaatatttttaa

SEQ ID NO: 316000 - DNA, 264 bp, Proteus mirabilis
atgtttgcgacgatgaccattttagcgccagcaagaatgcgtggacaggttatgggcttatggttctgtgcgagtgcattaggtaacttagccgcaggtttaatgggtggaaatattcgtcctgataaacttgatgttatgcctgatttcttctctcacgtctctatagcattggttatttgtgctgttgttcttgcagcattaattattcctgtgcgtaaactgttacaaagtgcagatgataaagagaatgcgcaagcataa

SEQ ID NO: 316001 - DNA, 1272 bp, Proteus mirabilis
atgcaatctactcactcaaaatcaagccgaaccttttttggccatccataccctttaagctctctgttcttcacagaaatgtgggagagattttctttctacggtattcgcccattattaatcctatttatggctgcaaccgtttatgaaggtggtatggatattcctcgagagcaggcatctgctattgtgggaatttttgctggtggtgtttatttaacatcattgccaggaggttggctggctgataattggttgggacaacgtcttgcggtttggtatggctctatctttattgcattagggcacctttctatcgcactttcagcgttttggtctcagaacctattttttatcggcttattgcttatcgtattaggtacaggcctatttaaaacctgtgtcactgttatggtgggaaccctgtataaaaaagatgatacacgccgcgatggtggtttctccttgttttatatggggatcaatatgggctcgtttatcgcaccactgatcaccggtttcttagtccgtgattatggctggcattggggctttggtattggtggtattggtatgctagctgcactactgatcttccgcttttatgccgtaccgacaatgcgtcgctttgataaagaagttggcttagattcaagttgggatcgccctactgttgtgcgtcgtaatgtcggacaatgggtattagcacttgctgtgatattaattgccattgttggtttaattatttcaggcactattccatttaatccggttattgttgccaattttatggtttatgtgatctccggcagtgttatcgcctactttatctatttattcctatttgcaggattaagtagtagtgaccgttctcgcctgtttgtttgcttcctattattagtttcagcggccctgttctggtctgcattcgaacaaaaaccaacctcatttaacttatttgctaacgactatactgatctaaattttatgggctttgagatccctgcggtttggttccagtccgtcaatgcgctatttattattattcttgcccctgtatttagctggttatggccaatgctagcacgcaacaatatgaatttaagtagcatgagcaaatttgtgattggtattttattcgctgcaggtggttttaccgtcatgatgtacgcctctgaaagcgtgcttgcaacaggcagcggtgtttcaccattatggttaatttccagtattttattgctgaccctaggtgaattatgtttgcgacgatga

SEQ ID NO: 316002 - DNA, 240 bp, Proteus mirabilis
  misc_feature (26)..(35): n is a, c, g, or t
atgatagtactggatactatagaaannnnnnnnnntcagggctcagctaaaaatcttcatttagaattacaagatactgcaggtaataaattaagaaacggttcaaaaaaagtggttgaagttggtgagtattcgtttgccgcaatctttcctttacgagtaagagccatctctgtaaatggtagacctacacagggatcagtacaggcaataattaatgttacctatgtatttatgtaa

SEQ ID NO: 316003 - DNA, 1107 bp, Proteus mirabilis
atgagccaggacatcatactaaaacgagaaattaagactgaaagttggctcatacagggtgaaatcgcgctggcagatagccgtccagaaattatctgcgtgctgcaattccttcaagattatccgaatgcgagttctgctgagtgctccgagcatttatttggggacaaaatcggacgtcgtgtcgttgctgataggttactaaacatatgtcggttatatggacttgctgagtcaaatagaggccaatattcattgacagaattaggcgaaaacacacttaaaaaagaccacgttttagtgcctatggacgggtgttggaagctctgtattagtgaagacccattattgccgcataaactattgaacattgaagtgcacactgaaccaagtgcagcatcaacagggctgagaaaagatcgagatagtttaaaaaaacgtgctgataatttttcaagtatttctgaagcagtgaaggatgttgttggcttgcaagcacaacctattggaggtggtaatgaagttcgtatcgataagattgaggccacgggtgagcgattgcctaaagaaacgacttattacatcgagtggaatgtgactgatggcaatgtcgatgtgaagcgcggaaaggatcttatattttcacgtcgggttgaaccaatcagtcgtcagcaagttttgaaagtacttctgcatagtgagggcttgcttgaacaatgggatgagcaaactgaaatcttgtcagtggttttcgaaaatactactgaatctgagcgaatcaatatgaagcgctcggtaagcgtaaaaagaccatctgttcacaagttgggctcgtttgatgcgatgaagttacacaatatttctatatcagcattgactgaattggatgctaaaaagtgggctgaatggagattagagaaaaatatcaatatgtatgccactaatagcaagtaccaagtttggagagaaaaagcactcgaaccttttaaaagttggaatttcacactacctgatagggctgagttggcaaatcagttttggactgaagaagaccagcaaaatcagcatacctggcatgtcattgcagcccatgattggaacctataa

SEQ ID NO: 316004 - DNA, 849 bp, Proteus mirabilis
atggattttatatttaatcgaagtattgtttgtccaaatcaaaccgttagatttaatcctacaaatacttctccaacaaactggatcagatcagatagcgggattactgtaatttcgatacagggatatacagtctcaacaagtaatgatgtaacgggtatatttttaagagctgaatatatcggcgaagaaaatgtaaatgttattaatagaagaatcattgaaacgtacttcaaaaacccaaagtgggacttactaattcacatatcaaaagttcttagctgcccaataaatcttgtattatgtcctatcaaccacccatataataaaagcactcacaatgagcgtaaaatcttttactacgctcaattggatgaaaaaaaccttgaaccaaagatgataaacatagatgaactagaagaaatatttgcatgctttagaatgcgcagatttagaaatgtaaaacctttgaaatctgctagtagctgcttagagtgttacctagcgaacgattcattgagccacgaaaagtcaccttggccaggtgatatagatgggataatttttactaaaaatgctcccaaagcaataattgaatacaaaactcacaatttaaaaacaccaataagccaagagtatgttggaaaatatggcaaggaagactggagaagattcaatgtactttacaccttaatgcgcaaactaaatataccgattttttttatagtttgggggccaaatcacgacgaagttaaaatacagataataaaagaagagaacgctatagatagcgttatcatgacaaataagaatgatttctcaaatgcacttataagtatattaaactag

SEQ ID NO: 316005 - DNA, 1863 bp, Proteus mirabilis
atggataaattaaagatgcacagccccgatatgacgcagcaaaacatagagaaaattcaggcgttgtttccgaactgcgtgacggagtcaaaaggggcagacggagagataaagttagctattgactttgaccagcttaaacaggagctatcaagttctgtcgttgaagggcctcaagagcgttatatgttgaactggcctgggaagagagaggcgctactaatttcaaactcgccaattatcaagacactgcgtccaatagaaagtgagagtatcaatttttggagcgccaaagatatttttatagaaggtgataacctggacggactgaagcttattcaagagtcttatcttggaaaggtaaagctaatctatatagatcctccttataatactggtggtgacttcatatatagagatgactactcaattacgaaaagtgctttctctgagttatctagccaggtggatgtagaggggaacaagctaacagcgaacttggaatcaaatggaagattccattctgattggctaagtatgatgtatccaagacttaagcttgcacgtaatttactacgggatgatgggcagatctttatctctatttctgatgaagaagtacataatctaagaaaaatgtgtgatgaaatatttggcgcagaaaacttcgagggacacatacattggcgtagacggcataatcaaccaaacgacaagacaaaaatgattggtctagtcgcagagcatatcctcgcatactcaaaagacaaaatttacaacagaagtgttggagtaggaaaattagagttaacaggtagcttcacaaatcctgataatgatcctagaggtccttgggcatccaagccatggaaagttggtagtgatcaaagcggctcaaagtatactattcagacaccaacagggaagatgttagatgctgagtggatgggtgaaaaatccacttttgaatcacttctgaaagatgatcgaatttattttccaaataatggggatggatttccaaggaaaaaatactataaatctgaacgagaagcggaagggcaatgcgctactaactggtggtcacatgaacaattcggtcataaccaagaagggaacgctatactgtctgaattaatggatggaattaaaaatacttttagtaatcctaagcctacaaggctcattaatagcattatcaatgtttctaattgcaaagatggtgatgtcgtattggacttctttttaggttctggtacgacatatcaggctgctattgagtctggtttggatattagattcattggtattcagatagatgatccgttagatgaaaagaataaagaccatttgccagcattagatttttgtaaaaaaaatggattaaaaaaagttcttagcgagcttaccaaggaaagaatgagaagggttttaacaaatgtggctaatgcagatttaaacggatttagggtgtttaagattgatgaatcgaatatgtccgatgtttattactctccggatgccctttcacaaggtaatcttgatttactagtggacaacataaaaccagaccgaactgatgaggatttactttttcaggtattgatagattggggtattgaattaagcatgcctatcagaaaagaaacgattcaaggtaaatcggtattctttgtcgatgatgatgcactggtagcatgttttgatctgcgcataaatgaagctttgattaaagagttagccacaaaagagccacttcgcgtagtgttccgtgatgacggctttgagtctgatgcagtaaaaatcaatgctgagcagattttcaagcaagtgtcgccacatactgaagttaaagcgatataa

SEQ ID NO: 316006 - DNA, 459 bp, Proteus mirabilis
atgagtaaccaatcaataaaacaagttgtgaaagagatgtgtgaggcaacagctggtgggcgtgaagcgatggctggggcgttgggtttatctctgacttcattcaataacaaattgtacgagaaaaacggctgtcgttcgtttgatttaaacgagctattagcgatgcaagatatttctcagaccgttttatttgctgaatttgtcgctcgtgaatcaaaccgcttactcgtggacagaattagccctgctgatttagatcagacagagctattcacattacgtagcaatgttgacgaaatgcaggggcgtttagcgttattgatgaaggacagcttagctgacggcgttattgataacgaagaagagcagaaaataaaaatgatgttagatggattaatttcgcagatccgcacatttatgaatgcatttgtttcgttacatcaaaagagaaattaa

SEQ ID NO: 316007 - DNA, 231 bp, Proteus mirabilis
atgaatatgacgaaaaaaggcgacaagcatttgcgaaccttatttattcacggagcccgggctatcgtcagagtggctgcaaataataatgaggattacttaaatcaatgggttaatcggctaaaagagcggcgaggatttaacaaaacgaccgttgcagtcgccaataaaaatgccagaattatttggtcaattcttcacaatgaaactgagtacagaccagcagtgtaa

SEQ ID NO: 316008 - DNA, 444 bp, Proteus mirabilis
atgaatgttatctatctcagtattgatctggctaaaaatgtttttcagctttgtggattaaatcaggcgggtaaaccggtttataaaaaacgcactgatcgtaaaacgttactacagaccgtcgcgaatattccggcctgcctgattggtgtggaagcctccacgggtgcattttactggcagcgtgggttcgaaaaacagggacacaggataaaagtgatcagtccccagtatgtaaaaccctttgtccgcgggcaaaaaaatgacagtaatgatgcacaggctatcgcaattgctctgatgcagccaacaatgcagttcgtacccccaaaaagccctgaacagcaagatattcaggttctgcaccgtgcaagacagagtattgttaatcaccgcactgcgacagtctgtcaaatccggggactgctgcttgatcgggaataa

SEQ ID NO: 316009 - DNA, 405 bp, Proteus mirabilis
  misc_feature (384)..(393): n is a, c, g, or t
atgaaactcaatgcattattaaactatcaaatacatcaaccagaaacagcaacgataaacaatttacctattgttttgatccatgggctttttggtgatctcaataatctaggcgtactaggtcgcgatctacgtcaagaccacaccgtgatacaaattgatgtgcgcaaccatgggcattctcctcatagtgaaagtatgcactatcacgatatggcacaagatgtattagccctgcttgatagcttaaatatcgcaaaagcaatcgttataggtcactcaatgggagggaaaattgcaatggcaatgaccgctctcgcacctcttcgccttgaacgtatcgtagttattgatatgtctcctgttgcttataatgttcgtcgnnnnnnnnnntcgtcgtcatga

SEQ ID NO: 316010 - DNA, 1437 bp, Proteus mirabilis
atgggtaaaactcgttatgatggacatcatttaacaggtaaacccgtattcagtggtgaattctcctatggtctatctaatgcttggtcgttatatgggggaacacaatttaacagcgattatcaggcaacggcgattggtataggacgggatctattttcttttggggcattatcacttgatattactcagtcttttgcacgttttactgataaaaaaataaaagggcgttcttatcgtcttaattatgcaaaatcttttgatgcactacgcacggatattacttttgctgggtatcgatttgctgctagagattatcgcacattaactcagtttatggatcaacgtcgtactggttatgatattcgctctccaaaagagaactatcaaatttatataaacaagtattttgataattttaatatatcactaaattatcaatatagtacctattggcaagataaacctcaaacacaatatggtttatacgcaagtactaatatcagtattccaatgttatctcagcaaaatgcgaatatatctttatcagcaaccagaactgaacgagatagtggttatcaagatgatgctattaatctgtatttaacaataccattatataaaggccatagcatttcattttctgaatcatattctcgtattggtaaaagtaatcaatatagccatagagcaagttatagtggttatagtgatcgcgataattatagtctgaatgtgggctatagtcatggagaagaaattgatagccaatcaagtatcagtggttattattctcgcgacttttctcaagctaacttatctgctaacgcaagttatgtaccacaacaatatcgtagtgttggtgcatcaattaacagtggtattacagctacaactcaaggtattgcgttgcatcgttcagctaatggtgatactcgtttaatgattgaaacaccaggggttggtgatgtacctctagatagtggcgttatcaaaactaattactttggacttgcagttattcctaatgttaatagttatcgtaaatctacggtttctattaataccagtcagctacctgaaaatatagaaacgctagaatcaacaactgatattaccttgactaaaggggcgatagggtatcgcagtttatcagtaatgaaaggggaaaagttgtttgccattatatccctaaatgatggtaagaaaccgccttttggggcaagtgtacgtaatgcggataatcgtgagttgggtattgttggtgaagatggtgtgacatggctagtaggcatttcatcaaaagaaaaactatctgtttattgggcagggaaaaaacaatgtgagttgtcacttcctgaagatttagcatcgccaactagcatgttattgctaccttgctcttcacctactatatcaaaaattacagaaaattaa

SEQ ID NO: 316011 - DNA, 558 bp, Proteus mirabilis
atgaaaacaagccgttctgcctattatgcttggctcaaacgtcctgcaaaacagatcactgcagaacaacttagcctgtaccgcagagccaaagttatctttgaacagagtcgaaatagcttaggttatagaacgttacgtaaacggttatgcaaagagggctttagcgtgagtgcttatggtgttcaaaagctaatggctcagcttggcctagttatcactcagcgcgttgcttacaaagtcaccaaaaaatgcaaatacagtgatgtcgtagccgataatttgctcaatcaaaattttaatcctcacgcacctaacgaagtgtgggcgggtgatgtgacctatttaaaaacaggggaaggctggatgtatttagccatcgtgatggacttatactcacgccgtattgtgggttggcacatcgataaacgaatgacggcagatttagtcagtaaagccttgatgaaagcgtataacttacgctatcccgaaaaaggcttagtctttcatagtgatagaggctctcaatatacgagtaagcgatatgccacttgctaa

SEQ ID NO: 316012 - DNA, 288 bp, Proteus mirabilis
atgaaaaaacgaacaaacagattttatactactgagtttaagcaagaagcggtcgcattagtcatcgaacaaggttatagcgtctcaaaagtggcagctgctttagggatcaccaataaattactttataactggaaagcaaaattcgacgctgaacaatcaggtagcagcttgaatgctgatgagagagccgagctattaaggcttcgaaaagaaaataaagaacttaggatggagaaagagatcctaaaaaaagccagcgcccccctgctaaaggaaaccaagtag

SEQ ID NO: 316013 - DNA, 501 bp, Proteus mirabilis
atgatgttaataggtattatgattattggaggagcatgtttaatcggtcatcaaattgattatcagtggcgagctaatgatttctttattgtcatatctatgcaagcaatgggggaatgtttgctacttatcggattaattgcctcatttgttactaatatcaagccacaagaagcgttacatttaggggcatatatttcgatagcgagagtattaatgccagcccttgcaggagctattattaatacttatttgaggatctcatatgatactcattatgatttgttaagaggatacatacaaactggtgagcaaaaattagcaggaaatattgctgaatattatcaaacaacgatggcattagtaataagagaagcacatgtagcctcttttattgatggttttgatttgattatgctcttggttattttaggtgctctttgtatgtcatttttaaaatcgtcaccagaaaatccggtagtcccaaggctagtaaaataa

SEQ ID NO: 316014 - DNA, 1038 bp, Proteus mirabilis
  misc_feature (956)..(996): n is a, c, g, or t
gtgattaaattattatcagcaacacaaaatcatcgtcctatttttgttgttatggctgtttttaccggggctattttatcaacactctttgtacgtatgttttctatctcgttagcggatttaagaggcgtgtttggtttagatgttgcacaaggatcttggttgaatgtggctcttaatatagctcaattgatcagtatgactcttgtaccttggtttatggtggtttatggcgcagaaaaaatattaatcagtgcgagttttatccttttttgttgtggattagcggttcccataataggacaacagattggttttggcggactttttattgctcattttatgattggattttgtatcggagtctatttgccgatgacgatttcattagccttaaaaagtttaaatcccagtgtttggctaatcgttatggcggcttatagcttacgtgtttctgtaggaatggatgcgggagtggggatctcaggagaatttgttgacatattgaattggcgttggatttattggttatccgctattttcaccttagtcatcctattttttacctggtggggaatgccactctcacctattaataaatcattgctcgctcaaagtgattggggaggaatggcgcttaaatgcttaggattaacgctattatatattggtgtcgttcaaggtgaattgttaggttggtgggattctgggctggtcgtgtcttgcttaatcggtagcgctatattgatggggacatttattattagagcttatatttataaacaaagctttggccacttaaattggatcaaagatagtaatttacggctctgctttattattgcctgtttatatggctttttgatgttacctaattcgttatttataccttcatttttgagtgttgttggtgggttgaaaccactacaaataggtcaagttaccaatcttgcccnnnnnnnnnnnnnnnnnnnnnnnnnnnnnnnnnnnnnnnnntcaagttaccaatcttgccttctttatctatctattatgtag

SEQ ID NO: 316015 - DNA, 255 bp, Proteus mirabilis
atgactataacaatttctataacgatattattaattcatcagttattatcttggttgattaatttgaaacaaatcaatatttctttatctgataataatagctattcattaatgctcccttggctatggcaatatgatgctatgtttaaaatccctctattattatttttttccgcaacaatcgcttcgtgtatctctatttttaaagttagccactatttacaaaaatatcaaaaaaataatattactatttag

SEQ ID NO: 316016 - DNA, 444 bp, Proteus mirabilis
gtgcaaagccaaacatgctcgatgaatcaaaagaattatgttgttccattaaatactgtctatcaatcccagttcacgtctttgtataaagaagtgcaaggaggggaagttaatatacaacttcaatgccaagacggtattgatgtttatgctacattaaatgatgcgacccaacatgggaatcgttctgatatattaacattagcaacggattctacggcaaaaggcgttgggctaagattatataaaaataatgaagtaactgcgattagttatggttcagacactcctaacaaaggaaatcaaaatcaatggcatttttcaaattatagaggagagataaatccacgtataaaattaaaagctaattatataaaaacagaaaatactattacgccaggaagtgtaaaagcagtagcaacgattactttttcatatcaataa

SEQ ID NO: 316017 - DNA, 273 bp, Proteus mirabilis
atgaaaaaatcattattttcactattaattctatctacacttgctttatcaacacaagctattgcacaacagattcaccttggtggttataatatagatatccaaggcagagtaattgacgagaaactaacttgtgtcgttcaagatgttgctccaattcaattggatgatgcttacgttgattctttactgcttactcctgagaaaagtcaaagtagttgttgcacgacaacacgctactcatttaatgaatactggttcgacagaaaatga

SEQ ID NO: 316018 - DNA, 2145 bp, Proteus mirabilis
gtgtcccgtacaattatgctagtcccaactgatacacgcgtaggtttaaccagcgtcagcttgggtgtaatccgttctatggaacaaaaaggcgttcgccttagtgtattcaaacctatcgcacagcctcgtgttaaaggcgcattagatcaaaccactgcgattatccgctctcactccacaattcaatccgcagaacctttaaatatggattacgttgagtcattactcagctccaataaaaaagatgttctgatggaagaaattgttgctagatatcacgaaaatactgctgatgcagaagttgtactgatagaaggcttagtgccaatgcgtaagcacccttttgcacaatctttaaactatgagattgccaaaacattaggtgctgaaattattttcgttactgcattaggcaacaacaccgctgagcagttaaaagagcgcattgaatttgctcgtgctgaatttggtggtgtaaaaaatcaaaatatcacaggtgtgattgttaataaattaaatgcccctgtggatgatcaaggtcgtactcgccctgatttatcagaaatttttgatgactcaagcaaagcgattatctctaatatcgatttaaataccatcgaaaaaaatagcccacttcctttattgggttgcattccatggaacttcgatttaatcgctactcgtgctacagatatggcaaaacacttaaatgcgactatcatcaataagggtgatattgaaactcgtcgtattaagtctgtgactttctgtgctcgtagtattccacatatgttagagcatttccgcccaggttcattgcttgtcacttctgccgatcgcccagatgttttagtttcagcatgtcttgctgcaatgaatggcgttgaaatcggtgctatcttactcacaggtggttaccaaatcgatgcaccaattaaacaattgtgtgagcgtgcatttgaaactggtctacctatctttatggttaattcaaacacttggcagacttcattaaatctgcaaagctttagcttagaagtgccagcagatgaccatgagcgtatcgaaaaaattcagaactatgttgctcaacatatcaataaccaatggattgattcactgacagcaaactctgaacgtcctaatcgtttatcaccaccagcattccgttatcaattaacggaattagctcgtaaggcgaaaaaacgcatcgtattacctgaaggtgatgaacctcgtaccgttaaagccgcgtctatttgtgctgaacgtggtatcgcaacctgtgtactgttaggtgatcctgaagaaattcgtcgtgttgctgcagcacaaggtgttgaattaggtacaggtattgaactcgtcaatcctaaagaagtacgtgaaatttatgtacctcgcttagttgaactgcgtaaaaacaaaggtatgacagaagttgttgctcgtgaacagttagaagataacgttgttctcggtaccttaatgttagaaaaaggcgtcgttgatggtcttgtttctggcgctgttcatacaaccgctaacactattcgcccaccactacagttaattaaaactgcacccggtagctcattagtgtcttctgtgttctttatgctattaccagaacaagtctatgtttatggtgactgcgcaattaacccagatccaaccgcagaacaactggctgaaatcgctattcaatctgcagactcagcaaaagcgtttggtatcgacccacgcgttgcgatgatctcttactctacaggtaactcaggtgctggcagtgacgttgaaaaagtgcgagaagcaactcgtttagcacaagaaaaacgtccagatctgattattgatggtcctttacaatatgatgcggctgtaatggctgacgttgctaaatctaaagcaccaaactcacctgttgcgggtaaagcaactgtgtttatcttccctgatctaaacaccggtaacactacctataaagcagtacaacgttcagcagacttggtttccattggaccaatgttacaaggtatgcgtaaacctgttaacgacctttctcgtggcgcgttagtcgatgatatcgtctacactgttgcattaactgcaattcaagcaagccaacaagaaaatgcctaa

SEQ ID NO: 316019 - DNA, 519 bp, Proteus mirabilis
atggttgcaattcaacaaagaattattactcttcgtacaacaaaaatatttgtaaaaaaacttataataatacttactacttggcaagagagtatgaatgggatctcaagagccaatggtaaggaaatcgattacgatcctattaatgaacttactgaatttattaatgatactaaagattattattctaatctatatattattggtgacgttcaaggaactaatcaattatcttttgagtgtatagcaaaacaaagtttaataatgaataaatatttaaatatttcttgcgactctttacagaaaaaaaccattaagaatataaataaaagattagatgacttatcaaaattatataaaaatgtattttttataaatgcagaaaatgctctttgtaacaatgagttatgcttagttattgataatgaagagccaatttacactgattatcatcatctatcaaaacatggttctagcatcgtaggttcttatattttcaaaaaaataaaaaataattaa

SEQ ID NO: 316020 - DNA, 798 bp, Proteus mirabilis
atgtcagaaaaccgtgaaattttacgtttattagccattatggcgcaattacgtgatcctcaaacaggctgtgagtgggatagggtacaaacctttgacaccatagccccctatacattagaagaaacctatgaagtactggatgctattgcccgcaaagattttagcgcacttaaagaggagttaggggacttactctatcaggtcgttttttatgccagaatggcgcaagaacagcaattatttgattttaatgatgtctgcgaagctatcagcaataaattagaacgtcgtcatccacatatttttgctacagaaaatgaaaataatttagcgactgaaaagcatcgttgggaaaaaatcaaggctcaagagcgtgaagcgaaagcacaatattcattacttgatgatattcctgctactttaccggcactgatgaaagcagagaaaatacaaaagcgctgtgcctccgttggctttgattggcacgagctttctcctgtattagataaagtgtatgaagaaatagatgaagtgatggcagaagtgaaaaaagcccctagagatgatcaacgtattgaggatgagttgggggatttgcttttttctgtggttaatttatcgcgccatttaaaacaaaagccagagcaggcacttaatcgagcttgtcgtaaatttgagcaacggtttaggtttgttgaaaaaatgctcacagagcagggtataaacatagaaaatgcttcattagaagagatggagatcagttggcaaaaagcgaaggaaaaagaaattgagtga

SEQ ID NO: 316021 - DNA, 288 bp, Proteus mirabilis
atgaaaataatactccgcacttttatatttctatattttatttttttattaatattgattaatattctttccatatctgactatgaatggatgattggtgaaggtgatatggataatctttgtcaactgccactcaatggtagatatgttattgagcctatattgatattaataccttgtattttattactttttttagaaaaaaataaaaagctaagatggggttatgttacaatcactgttatgtatatcatatggtcattttatttacgttttaatttttgctaa

SEQ ID NO: 316022 - DNA, 957 bp, Proteus mirabilis
atgggaaatgaatttttcgcagccaagcaaggcgataaattaatgcactcgtcaatcttcgccgatatcgtgtgtggtgtggttaaaggggcggtttatgccgcgatagggacggccgctgtggcgctgaccattgggacaggcggtatggcaacggccgccggtgcggccatttttgccggtgcagggctggcggcgggctttactatcggtggattgattgatgatgccgctgattgggtcgcggatgggatcgatagcttattcgggctaagtaaccctgatggtgaaatcgatacaggctcgaaaaatgtacgtgtcaaaggcaagggagccgctcgcgcagcgggaaaattaccgtcacccgtactattagcctcaattgcggcagataataccccaccgaaagaagaaaaaggcaccgagattgccttacgcgtattgaaaaataccgccatgatgacgactggggcattttctttactggcgggtaaggtgctagggagccaaaccaacaatgcggcacccatagcgctcgatccctccgagtttcccgaatacccctcaccggagcaaggtttttttgacagtattctttccccagtaaaagctgcgaaacacccgaatgctgaacctatgcctttggataccatcacgtgcgataaatggcattgtgctagcgccccttactttttagccgaagggtcgaaaaaagtccaaattaatagccaaccggcgtgtcgtaacggtgatagaagcacttgtgaagccaaaatcagtgatacgcaagaaaaagggattgtgcgtattggcggtggcagtgtggtggtacgcgatattatgagtgggcgtaacccctttgccgaaatgtttggtgaaattctaggggccttgctgttggcgcggcgtctaccctgtttcgcagagggggactcaaggcgattaaacagtgtttga

SEQ ID NO: 316023 - DNA, 321 bp, Proteus mirabilis
atggctttttttatgcagtcattagatgcgactatattaaatacggcactccctgatatagctaaaagtcttaatcactcccctctcgccatgcaatcagccgtaattagctatactttaacggtagctttattaattcctgtaagtggatggctagctgatagatttgggactcgcaagattttcattatcgccgtttcactcttttctggcggttcattattatgcgcactttctcctaaccttgcttttttggtaatttcgcgggttatacaaggaataggtggtgcaatgatgatgccggttgctcgtcttgcttaa

SEQ ID NO: 316024 - DNA, 249 bp, Proteus mirabilis
atgaatactggttcgacagaaaatgataccaatgctcgagtagcattattgcgttctacaggtgaacttattccacttaatggtgagaattcagaacgtacattttcttcggaggttgccggtgaacgtggtagcttagaatttttattaaaatatgatagaccagcatcgattgatgatgctgttaccgcaggtgctttcagtgctgccttatctcttgatgcttacgtcactgatgatatccaataa

SEQ ID NO: 316025 - DNA, 462 bp, Proteus mirabilis
gtgcattgtccgacggggtgggttgatccgtttgggctggctgggggaaaaggaaacaaaggagaacctgtaaaacctaaaaccccagaagttgttgagttagatcctaagactattagatttagccaaacttcagttaatgatacggctgaaataactcaaagcatgaaagctaaaggttgggatggagatccaatcgatgttattagaatgaaagatggtgggctaacaacaatagataatactagagtgttagcagcatcaagagctggtatcaatgtaaaagcaagagttcatgatggctcaactcctataccgcaggaatttatcaggagatttacaacttctaaaggtgtcccatcaacatgggaagaagccatcaatcttcgtataggaaaacaaaatgcaggatatagaaagagatatcctaatggttcaactgtaatagggtcgtcagattaa

SEQ ID NO: 316026 - DNA, 309 bp, Proteus mirabilis; identical to SEQ ID NO: 296730

SEQ ID NO: 316027 - DNA, 321 bp, Proteus mirabilis
atgtttcctgaaggaacacgtagccgaggacgtggtttattaccttttaaaacaggggcttttcacgcggcgatgcaagcgggggtgcctattgtgcctgtttgtgtctctaccacacaaggtaagataaaattaaatcgctggaataatggctacgtgattgttgaaatgttgcctcccattgatgtatcaaaatataacaaagatcaggtgagagaattagctgaagattgtcgtcagatcatgaaggctaaaattgaagagcttgataaagaagtggaagaaatgaataaacgcgattttgcaggtaagttaaattaa

SEQ ID NO: 316028 - DNA, 2913 bp, Proteus mirabilis
atgggcaaaggtggcggtggaggaatcactccaaggttgctcgatgacaacttaaaaaacaaacaatttcttaatgtcatcgatttagtttcagaagggccaatagaagggcctgtgggtggtatgtcaggttttctattgaatggaactcctgttgtagatgcagatggcaatccaaatattcatggtgttgaagttcagtggcgagcaggaacacaaacgcaagaaccattagaggactttccttttgtagaaaaagaaattcctgtcaatgtagaggtaaaaaaaagcacaccaatcttacgcactatttcagatcaggaaactgaccgcgttagattcactttgggggtttctgctcttgttagtcaagatgacaagggaaatcagcacgatgctacggtagaaatgcttattgaagttaatgatggttctggttggacacatgcagaaacagcaaaaataaccggaaaaatcagtggccaatatttagaatcatatatcattgatgcgcctaaaaagaaacctttccaaattagagtttcacgattaacagatgatagtaaaagtgatctactgaaaaacggaacggtatgggcaagctacacagaaataactgacgctaaattctcttaccctaattctgccgtcgtcgggatgaaaatcgataaatcccaatacggtgatacacccaatcgcacctatcatattaaagggatgattatccaagttcctgataactatgatccggagcctcgtacttacactggcatctggactggtcgcttcaagcccgcatggactaataaccctgcatgggttttttacgatttagtcactaatgaacgatacggtataggagagatgatcggctcgtttggcgttgataaattcgcgctatatgccattgctcgttactgtgatgaattggttgatgatgggtttggcaacaaagagcctcgctttacttttaatgcctacattacctctcaacgaaaagccaaagaagtgcttgatgacttagcgtccgtatttcgcggtatgcctttatgggacggacagcaattaacgtgctttcaagatagaccatcagatccagtatggacgtacacaaactcaaatgttattgatggaaaatttaaatatacatcaacagcgaaatcagctcgtcataatgctatcgaggtgtcatggataaacccgagtaatggatggagtgaagaaagagaatttatccaagatgatgatctcattcagcgattcggcggtgtaaatgttaagaaagttactgcttttggttgcactagtcgcggacaggctcacagagtgggtaagtggatattacagacagaaaagctggagaaagatagcgttacattctcaacaggaagagaggggattaactgcatctctggcgatattattgaggtagcagacgatagctttgcaggagtgaaggtaggtggtcgggttctatcagttaatggtagcgctattactattgatgcgcctatagattggaaatatgacgataaaggtactttctcatttttagggacatcaggcaggttcgagaaaatagaaattcaatctatcgatggtgatattgtcactttgcgtgaggttcctcgtggactgaaacaatatggtgtattttctattaccaaaagcatgctaataacaagattgtttcgagttattaccatttcagaaaataatgatggaaattacttatacaactgtattcagcatgaacctcaaaaggaaagcattgttgataatggagttgattttactgggaacccgccaacgcagaatgttattcgcattcctaatatagagcgtctttctattgcttacgttgatgatagccctcaagttcaagctagggctatgtgggtaacaacagccattaatagaaatatttcatttaatgtcactctttataaaaacagcaaggttgtatctactggtaataccacagatttagagtactactttaatgggcttgaagccggtgactatcttgttggggtgagaggtcaagacgctaatggaatgcttggtaatgaatcaaaagtccagatggttattggtacgccaagtgcacctagctcaataattgttgagtctggtttttttgaaataaaattaatccctcatatcgctgcgccacacactctaaataccgagtttgagttctggttttctggtgaaataaaaataaataatatcaatgagatagagtcaaaagctgatttcttaagtcgcgctaagttctggacaaaagggcaattaaagccggggcgtgattactggttttatgtaagaagcgtaaatgaatatgggaagtctcattttgtagaagctaaaggacaagttgacggtaacatagacgctattcttgatgaattagcggggcaaatcagccgagaccaactcgcacaagacttattgggtgaaattaacagtaaagctaaccaaatcgatattactgaattacatgagttgatgaggataaatcatgacaagattttagaagagtcaatgaggcaaggcgcgacgattgaagaaagtgaaaaaaaatgggaggaggcaggaaaattactggctgagcggataaatcaagtttcaacggcaacagaagcacaggcagccgcaattaaacaagagcaacaagcacgtattgagactgataaaaccgaagcacaacaacgccaattcttagccactcaacttcgtggtgattataccggtaatgatttatcgaaagtcaccgcaggactcatttccgcagagaaacaagcacgtgttacaggcgaccaagcagaagcgaaagcccgacaatcactggaaacacggatgaatgggaatgtttccgcgattaataaatcattagaaaccctcacctag

SEQ ID NO: 316029 - DNA, 258 bp, Proteus mirabilis
  misc_feature (233)..(242): n is a, c, g, or t
atgaataaaaaaacgccaagttatagctcactcgatgatgtttatgcatcggttgatttatcacaatccttaccgaaaacacattttccgcaacaagagagccatcctcgtcatgtttttgatgctgtaagggatgagctgatgctagatggcaattcaagacaaaatctggccacattttgtcaaacctgggtagatgatgagatccgtgatttgatgaatttatctatcgnnnnnnnnnnatcgataagaacatga

SEQ ID NO: 316030 - DNA, 672 bp, Proteus mirabilis
atgaatgttgattgggggttgatggtagcggttttatctatggtttttacaacctttattggtggtataacaatttggtatacaaagaattccttagattatactaaaaaatccacacaaatagcagatgaatcattaaaagccacacaaaagtcaattgatacatctattgatatctatgagaatcaaaaaaaatttgaacatgaagaaaaaaagtctagattcaatactctaaggaaattaattgaagatgatttatcttggataaagatggagcttatgcaaattgattccagtcatgaattcataaaagaaaatcaacagttaaatatgcatttaataagacagaatgatagcttatcaatactttttgataaaatcgatggtaatcaacagtttataggttttaattacatatatataaatattgataaatatgtatatgatattgggcttttggatgttgatatatctatttcactatcaaagatagtgagagatattcgtcattataatgatgagcttttattgttaataaactcatcaagtagaccagggttttctaaaattgatttattacaaaatgttatacttttaaaactaagtgcagatgacgttctatatgatgagaaaaagttaaaatcaatgctatcaagatctttaatgaattga

SEQ ID NO: 316031 - DNA, 249 bp, Proteus mirabilis
atgggacaatctttagtcgctgctttcggtggtaaagataatatcagtagcttagatgcttgtattacacgcttgcgtattggtgtaaaagagattgataaggtcgatcgtgatgagctgaaaagactgggagcagctggtgtcgtggtggttggatccggtattcaagcaatttttggccctaagtctgataatttaaaaactgaaatggatgaatatattcgttctataggtacaactgaaaaataa

SEQ ID NO: 316032 - DNA, 1431 bp, Proteus mirabilis
atgaaattaacaggttatgccaagatttttctaacgacttctgtaatattggtcgcatcaattcttatagtcttgggaagcgatataacactaaaagaaatgtggtctaattatttttctcaaccagatccttgggttggtatcttcacgagtataggtgctatttttacagtatgtgttttcattgcgactgtttatgcaactagaaaagctggagagagtgcaagaatagctggtgaagcattagaactatcgcgtgagagcagtcgaaaagatgattttattaagcagtttactttattgattgaacaacataataaatctcatgaaataatgatgaatacattgaatacttataaagttggtagtggtaaaaatattaagtgggatatgactattaaacaggcatcagaaaatttatatttgaattatcagtttagcccttatatgagaatgctatttagggtattgaaacattgtgatgaaaatttttatatgcaaggtgatcacgatgaagtgataagggagaagaaaaaatacacttcaatagtaagaagtctgattagaaatgatgtgctatattttgtagctataaactcaatgaatgaacgagatattttcagtgaatatagaaataaattaaaaaagtttgatttttttgaacatttaattactgataatataagtgaaaaaattagatttaccatagagataagtgaactagaaaaacaaataaaaaaatttataaagtgtgaattaatacgtcatgctaataatttaattaaattctctccatttttcataggaaatgacgaggatgataaaattcaatttaaatactcctttggttataaaatatcttctgaatatgcaaaagtaaaatataatgaatttaaatccaatattgagaatgagttgttggttcatgattacttaaatgattcactttctagcttttatgaaattgataatcacaatgatatttatttattatattctgttaataaagaaccttatggtgttgatgcttactttcgtattattcatgaaaaaatagatggatttaatttaaaaataaaagagatctcttcattaatacttaatgatcaggttacaaaagaaaaatttcataattatattgaagaaaaatatgatgtaaaagattttattttttcttcagtggtttacagtaaacaagatatcccagactctaataactttttagaatcttgcgaaatgtataaaaaatgctcttcatatattcaaaataaaaataaaaaaataatctcaactaagaaagaagaaatattgaatgatataaatcgcactctgataaaaaaattgaatcaaactcattttataaaagaaagtggagaaagatttattcttaatgaagagaataaaatagtttttgaaaataagaatagttga

SEQ ID NO: 316033 - DNA, 1053 bp, Proteus mirabilis; identical to SEQ ID NO: 309538

SEQ ID NO: 316034 - DNA, 483 bp, Proteus mirabilis
atgagaattggacacggttatgatgtacataaatttggcggagaaggcccaattattattggtggtttgagaattccttatgaacgaggtctactagcccattcagatggcgatgttgtactacatgcggtgacagatgccattttaggtgctgttgcgatgggcgatattggtacattatttcctgatacagatccggcttataaaggtgcggatagccgagtattattgcgcgaagccttttcaagagtgatggctaaaggttaccgtattggtaatcttgatgtcactattattgctcaggcacctaaaatgctacctcatactccacaaatgcgtgtcaatattgctgaagatctccattgtcatgtcgatgatatcaatgttaaagcgaccactaccgagaaattaggttttgtaggacgcaaagaaggtatcgcttgtgaagcggtggtgttattaatcaaagagtctttatcttaa

SEQ ID NO: 316035 - DNA, 1458 bp, Proteus mirabilis
atgggacttgcagccatcaaaaccaaccaactgatcgccggtgaaatagcacaatcaggtggtgtagaaaattatttaaaaacacaacagaacaaagggttattacgttttttaacctgtggcaatgttgatgacggaaaaagcaccttaattggtcgcttacttcatgatacgcggcagatctacgaagatcagctctccaccttacaaaacgaaagtaaaaagattggtactcaaggtgaaaaattagatctcgctttgctggtggacggtttagcggctgaacgagagcaagggatcactattgatgtagcttatcgctatttttcaacagccaaacgaaaatttattattgccgatacgccgggacatgcacaatatacccgcaatatggcgacaggagcatcaacgagtacgctttctattctgctgatcgatgctcgaaaaggggtacaagagcaaactcgccgccatagttttattagcacactccttgggatccgtcacttagtggtcgcgattaataaaatggatctacttgattatcaacaagagatctttgagtcgatccaacaagattacctgcactttgcacaacaattaccgcgcgatctcactatcgaatttgtgcctatctctgcactggagggggataatgtggtatctccttcattaaatatgccttggtatacaggaaaaacactgttggcattacttgaagatgcgccggttaaatttaaattaggggctaaatctcaaagattgcgttttcctgtacagtatgtgaatcgtcctgatttagattttagaggctacagtggcacagtttcatcaggctctctttatcaaggacaacagatcaaagtattaccctcaggacagcgttcaaccattaaacgtattgtgacttttgatggcgatctggctcaggcgcaagtgggtcaagcgattacactgctgttagcggatgaaatcgatattagtcgtggcgacattattgttgatgctaacgataccactgctaatgttagcaatcatgcgttggtggatatcgtatggatgtcagaacaaccgttagtacagggacaaacccttgatatcaaagtagcgggcaaaaaaagtcgtgccaaaatagagaatattcactatcaagttgatgtggataagctcactcaacaagtgaccgaaagtttagcgctaaatgccattgggcatgttgaagtattatttgaagagccattggtgctggataactatcaacttaatgcacaaacaggggggcttatttttattgatagattaagcaatgtcacggtgggtgctggtcttattcgagaaattcgcgacaacgagcaacccacaacttcccaatacgatgcatttgaaattgaactcaatcagttgatccgccgccattttccgcattggggcgcaagagacttactgggaggaaaatag

SEQ ID NO: 316036 - DNA, 1422 bp, Proteus mirabilis
atggattacctacccttatttgtggaattaaaacagcgcccagtattactggttggcggtgggcatgtcgctgcgcgtaaagccgtactgttattaaaagcgggcgctcggttacgtgttatcgcgccacagttatgtgatgaattgcatcttgcttatcagcaaaatcaaattgagtggattgcagggcaatatcagtcagagtatttacttggcatgatgttggtgatcgtggcaacagacgataaggtattaaatcaacaagtgtatctagatgcgcaagcacgccacatttttgtcaatgtcgtcgactctcaaccccaatgctcttttatctttcctgccattatcgatagaaatccgatattaattgccatttcatcagcgggcaaagcccctgttttagttcgtataatacgggaaaagctagaggcattattacctacctcattagggactatggcgactattgcggggaaatggcgcaataaagtgaaacaaaaactgactggttttcaagcacgttgccgcttttgggagcaagcgtttagtggcaaatttgcctcattagtggcaagtggtcaattaatacaagcgcaagcacagcttgaacaacaactgtctcatccagatagcccacaaggtgagcttgctttagtgggggcagggccgggtgatgccgggttattaaccttacgaggtttgcaagttatccagcaggccgaggtggtactttatgacagtttagtcagtgcagacatcttagaactggtacgccgtgatgctgatagaatttgtgtgggtaaaagagcggggcaacacagtacgttgcaagaagaaatcaatcaattgatcgtgaaatatactcagcttggtaaacgagttgtcagactaaaagggggcgatccttttatttttggacgcggaggagaagagcttgaaattgcggtacaacatggcattccttttcaagttgttcccggtgttaccgcagctagtggggccagtgcttatgcgggtattccattaactcatcgtaactatgcgcaaagtgtcacttttatgactgggcattgccaatcaggggggatagagccagattggcaagctttagcgcaagctaatcatacgttagcaatttatatgggaacgacgaaagcagaacttattagccagcgtttaatagagcaaggtcgttcaccactcacccctattgccgtcattagttgcggtacacgccatgatcaacagatcttaacgggaaatttaacacaattagcgcaattagctaagcaagctcccaccccggcattattaatcgttggagaagttgctgcattacatcaccaacttgcgtggtttggtgatagacaaactcaacatacctctgccatccactcatctttggttcattttgcctaa

SEQ ID NO: 316037 - DNA, 1731 bp, Proteus mirabilis
atgaaatcacaaactcaagcgcccttagtggttgaaggaaaactatctgatagtgaacgtatgaaaaaagagagtaatttcttacgaggcactattagtgatgatctacaaaatggtctaaccggtggttttgaaggcgataattttttattaattcgttttcacggtatgtaccaacaagatgatagagatattcgtgccgagcgtgcccaacagctactagagcctcgtcatgccatgatgttacgttgtcgtttaccgggcggtgtcatcacaccaaagcagtggctaagtatcgataagtttgctagtgaaaatacgctctatggcagtattcgtattactaatcgtcaaacttttcaatttcatggcattttaaaaggtcatgttaaaccggctcaccaaatgctagcgtcaacaggccttgatgctcttgcaaccgccaatgatgttaatcgaaatgtgctatgtacctcaaaccctgaacaatcttcattgcatcaagaagcttatgaatgggccaaaaaactatccgagcatttattgccacgcacccatgcctatgcagaaatttggttagataaagagaaagtggcgacaacggatgaggagcctattttaggtgaaacctatttacctcggaaatttaaaacatcggtggtgatccccccttataacgatgttgacttgcatgccaatgacatgaattttattgccatcgcagaaaatgggcatttggttggttttaatgtgctagtcggtggcggccttgcgatgacccatggtgataaaaaaacctttccgcgtttagctagtgaatttggttatattcctattgataaaacattagcagtcgctgaagcgattgtgacgacgcaacgagattggggcaatcgtactgaacgtaaaaatgccaaaaccaaatacaccttagagcgtgttggtattgaaacatttaaacaggaagttgaacgtcgctcaggcgttatgtttgatatgatccgaccgtatcaatttactcaccgtggtgatcaaattggttggttaaaaggggttgataacaaatggtatctaaccttatttattgaaagtggtcgattaatcgataaacctaatgcgccgttaaaaacgggggttgctgaaattgccaaagtgcatcttggtgactttcgtttaacagctaatcaaaatttgattgttgctggtgtaccagaggcacagaaagagcagattgaggcgatagcgcgtcaatatggtttaattaatgatgaggttacaccgctgcgtaaacatgccatggcgtgtgtttcatttccaacctgcccattagccatggcagaagcggagcgtttccttcccgcatttaccgacacccttgataatatcatggctaaatacggagtcagtgatgagcatattgttgtacgtgtaacagggtgtcctaacggttgtggtcgtgcgatgttggcggaagtcggactggtgggtaaagcccccgatcgctataacttacatctaggaggaaaccgcatgggtactcgcattcctagaatgtatcgtgaaaatatttcatcacaagaaatcattgaaattcttgatactttaattggtcagtgggctatttcacgtgaattaaatgaaggttttggtgattttcttattcgcactgatgttatcaaacccgttgttaattcagccattgatttttatgaagtgcaggaggtgatatga

SEQ ID NO: 316038 - DNA, 363 bp, Proteus mirabilis; identical to SEQ ID NO: 309540

SEQ ID NO: 316039 - DNA, 672 bp, Proteus mirabilis; identical to SEQ ID NO: 314953

SEQ ID NO: 316040 - DNA, 1368 bp, Proteus mirabilis; identical to SEQ ID NO: 303359

SEQ ID NO: 316041 - DNA, 576 bp, Proteus mirabilis; identical to SEQ ID NO: 310991

SEQ ID NO: 316042 - DNA, 507 bp, Proteus mirabilis
  misc_feature (438)..(447): n is a, c, g, or t
atgaaaaaaaacaggaaaaataacctatcagaaattacacctgaatctgtttttatgatgaaacgacgtaatttactaaaattattaggcatcggcgctgctggaatagcggtttcatccactgtaaaaaccgatttattttcatggcttactgaagataacaaaccaacaacaccaaaatcatcccgtaaagaattacaatttattcaacctgaagaatatcaatcttcattacaattaactcatgaagataaggtaattggatataacaatttctatgaatttggccttaataaatccgatcctgctaagtatgcacacacaatgaaaacagaagaatggacattaactattgatggtgaagttaatcgcccacttactttaaacttagacgatattaatcataaatttcaattagaagaacgtatctatcgtatnnnnnnnnnnatcgtatgcgttgtgttgaagcatggtcgatggtcattccctgggtcggttttccattag

SEQ ID NO: 316043 - DNA, 1359 bp, Proteus mirabilis
atgaaaacaaaatcactgagatttaaaattatctttttatttatcatattgatgattgcaaatgcaggttttatgtctttaacgctttatcaatcgcttaaaaatgaattaatatctcgtgataataacttacttgtaaatcgtgcagaccaattagtaaagttaattaatagtggaattgatatcaaaacattacctatctattttcaacgtatgatggatatgcaacaagatattatttatattacggatgctaataataaaattttagttgatactaattcagatattttatttgcagatcatctaaaaaccactgatacaaagaatatagatttaaacatgattacctcctgggaaacagaatcaggtgttcctgtttcggctattaactttacaatagaatcaccaataggcgtattaaatgtagtgatcgccaaagcatcctttgtgcgcatcagtatgctaagcgaatatttaagtaaaatattgattatctcattagcttctattttatttatgggaatattaagtttttggttaattaaacatggattgagggatatccgttttcttagccaaattacggctaaaacagacatacatactcttagccaaaccataaatatctcacaacttcccaatgaactgaaaagtttaggtgactcattaaatataatgagaaaaaggttaaaaaatgattttgtaaagctaactcaattagccgatgacttggctcatgaactcagaacccccattaacgctataaaagttcaaaatgaaattatgttacaacgctctcgtagcgtagaagaatatgaatcaattattattagtaatattgaagaactggataaacttgcaaaaataattgaaaatattttatttatcgctcgtgctgaaaataaaaatatcattttaaatagagaaagcttggatttatcggatctaattgatgaaatttataacctattttcattttatgcagaagaaaaacagattaccttattaaaagagcctacaacattaacagttagtgcagatcacttactttttactcgcatattaatgaacctcatatcaaatgcaataaaatattctcccgctaatacacaagtcgtcactcaatgtaaaaaagaaaaaaatcagttactgatttgtatcagtaatattggtgatgaattgaatcaacatgaacaaatatttactcgtttttggcgtggtgataatgcaagaacaacagatggaaatggcttaggcttatcaattgtgcaagcgattatgacattacatgagggtaaagtcagttacgagcgtattggaaaacataatgtatttattttaacctttccatgctaa

SEQ ID NO: 316044 - DNA, 693 bp, Proteus mirabilis
atgaaaatactcttaattgaagatcacgaaaaaacagccaattgggttaaaaaagggctagaagaagctggatatactattgatattacgaatgatggtcgtgatggcctctatttagcattagaaaatgattacaaattgattattcttgatatcatgcttcccggaatgaacggttggaatattttaaaaatattacgcacatcaaagtcagtccctgtgatttgtttaacagcaagggatgctatagatgaccgagttaaaggattagaattaggtgcaaacgattatttagtaaaacctttctcattttcagaattattggcaagggtcaaaaatcaattaagagttcaaaaaaatatttcaacaattattgaaattgctgacttaaaaatcaatttatctcgtcatgaagtggagcgtaataatatacagatcccaatgactcgccaagaatattctttattacttttttttgctttacatattaatgaaatattaccaaggacattaattgcaagcgagatttggggaattaactttgatagtgatactaatattgtagatgttgctatccgtcgtttacgaaaaaaaattgatgatggatttgaaatcaaattaatcgaaacggttagaggaatgggatataggttaaatggagtcaataatgaaaacaaaatcactgagatttaa

SEQ ID NO: 316045 - DNA, 198 bp, Proteus mirabilis
  misc_feature (126)..(135): n is a, c, g, or t
atgacccaatttaattaccaaaaagcacatttcattatcagtgcacctgatatccgccatttaccaccagatacaggaattgaaattgcctttgcgggtcgttctaatgcgggtaaatccagtgcnnnnnnnnnngtaaaacacccggtcgtactcaacttatcaatctgtttcaaattgaggaaggacgacgtttag

SEQ ID NO: 316046 - DNA, 237 bp, Proteus mirabilis; identical to SEQ ID NO: 303363

SEQ ID NO: 316047 - DNA, 1452 bp, Proteus mirabilis
gtgtatttagtcgatgaacaacaaaaactactacgtgattcagctaatgataaagatagctatttagtctttgataccctaactcagcaaattgttcgccatgatacccccaatattgtaccggcgttaactcatgatgaactgccaaataaaataaattacaccaccgtttttgaacaaatctattggcaagctaaaccctggactatcgaaaaaaccagtaaagaaacagatattccacaagagactattattcgtttagctcgagactacgcgacaacaaagcctgcaatgattgtacaaaatatgtctggcgcacaacgcactgaatttggtgcctatgttgcagcaagccagttttatcttgctctattaaccggcaatattggtaagaaaggcgcgggtatttgtgatgccggtggcgtgcgtcagatggcaaaatttaatcctattattccccctgcaccaaatgttaaacccattaatcctattcctgttgcaaaagtgggtgaatggatagtcaacgaaagaccccacccaattaatttctggtggatcatgacaatgggggtgatgacacaattacccaataccaatatggtacgtaaggcgctaaaaaaagttccttttgttgtcgtagccgataatttaatgtcatcaacagcgctttatgccgacttagtacttccagtgacaaccatttttgaagatacaagtttaatggctggtgtgcgtagccaatatgttcaattaatggaaaaagccgttgaaccaccaggagaagcaaagcctgattattggatttttgcccgccttgctgaacgctttggtttcggtgacgtatttaatcaacctattgagcactatattgatacttgcctcgcgggatcggggattacgcgggaaatgctagaaaaagggcctgtacgaccagtagaaggcgattggatcccatttaaagacggaatatttcgtacatcaacccaaaaagcacatttctttattgaagaatggcaagataaaaactactcccctatagtcacttattatccagtaaaggaatcgacaacaggctcccctgaattagcaaaaaaatatccgttaatggctgtgcaacgtaagctagcacgtagtgttcattcaagccatgggatgaatgaatggattttagaagtacagcgtaatcaacccaatattttaatacatcctaatgatgcgttatctcgtggaataaacaatggtgattgggtgtttgcttttaatgatagaggtgaacatagagcaatagccgttgtcaccacacacataaaacaaggtgttgtttctcttgataatggttggtgggaacaacaaggggggagtagtagccatgtaacaaatgaccatgttgaacctttaggtaatggtcattgttgtaacagtaccctagttaatgtgagacgggaggcataa

SEQ ID NO: 316048 - DNA, 1590 bp, Proteus mirabilis
atggataaagttttagtacatagaggcttttcaactctcaatattattactatcgcattagctgtcgtagccatatttgaaattacattaagtggcttgcgcacttatatttttacacatagtacaagtcgtattgatgttgaacttggcgcaaaactttttcggcatttattagcactacctatttcttattttgaaagtcgtcgtgtaggtgatactgttgctcgagtgagagaattagatcaaattcgtaattttctaactggccaagcattaacctctattttagatttactattttcatttatattctttgctgtaatgtggtattacagtccaaaattaacgttagttattttattttcattaccttgttatgctacatggtctatttttattagccctattttacgccgccgtttagatgataaatttgctcgtaatgcggataatcaatctttcctagttgagtctgtaacagcaattaacacaattaaagccatggctgtttcacctcaaatgacaaatatatgggataaacaattagcaggctatgttgcagctggatttaaagtaacggtgttagcaactataggtcaacaaggaatacaattaatacaaaaagccgttatgattattaatctttggctgggtgcacacttggttatttctggtgatttaagcattggtcaattaattgcctttaatatgctagcaggacaaattgttgctcctgtgattcgtcttgctcaactttggcaagattttcagcaagttggtatttctgtgactcgcttaggtgatatacttaattatcctactgaaagttatcaagggaaattaacattgccagaaattaacggcgatatctcatttcgtaatattcgatttcgttataaacctgacgcgccaattattttaaataatattaacttaaatattaaacaaggcgaaatcatcggtattgttggacgttcaggttcaggaaaaagtacattaacgaaattaattcaacgtttttatatccctgaaaatggccaagttcttattgatggacatgatcttgcattagcggatcccaattggttacgccgtcaagttggcgttgtattacaagataatgtactacttaaccgcagtattattgataatatagcattagcagaccctggtatgcctgtggaaaaagttattcatgctgcaaaactagctggcgctcatgatttcatttcagaattacgtgaaggttataacacaattgttggtgaacaaggggctggtttatctggagggcaacgccagcgaatcgctattgctcgagctttagtcaataatcccaagattttaatttttgatgaagcaaccagtgctttagattatgaatctgaacatgtcattatgcgtaatatgcacaaaatttgccaaggcagaacagtcattattattgctcatcgtttatccacagtaaaaaatgcagatcgtattattgtcatggaaaaaggacaaattatcgagcaaggcaaacacaaggaacttctctctgatcccgaaagcctatatcactatttacatcaattacaatcagattaa

SEQ ID NO: 316049 - DNA, 1437 bp, Proteus mirabilis
atgaaaacatggttaatgggtgtttatgagttttttttacgctataaagtcgtttggagtgaaacttggaagatccgccaacaattagatgcgcctatacgtgaaaaagatgaacatgaatttttacctgctcatttggaattaattgaaacccctgtatctaaacgtccacgtttaatcgcttattttattatggcttttttagtcattgctattattttatcaattttgggtaaagttgaaattgttgccactgcaaatggaaaattagcattaagtggacgaagtaaagaaataaaacctattgaaaactcaatagttcaagaaattatggtaaaagaaggtgagttagttaaaaaaggccatgtattattaaaacttaccgcattaggagctgaggctgatacattaaaatcacaatcatcattactacaagcgaaactggaacagtttcgttatcaaatactggctaaatcaattgaatcaaataagttaccagagataaaattacctaatgatccagaccttcaaaatatttctgaagatgaaatgttacgtttaacatctttaattgaagagcaattttcaacttggcagaatcaaaaatatcaaaaagaattaagtttagataagaaaaaagcagaaagattaacaatacttacacgcataaatcgttatgaaaaattatcacaaattgaaaagagtcgtttagatgattttaagaaattattacaaaagcaagctatttcaaaacatgctgtacttgagcaagagaacaaatatcttgaagctacaaatgaactacgtgtttacaaaactcaattagagcaaattgaaagtgaaattttattagcaaaagaagaatatcaactagtcactcagttatttaaaaatgaaattttagataaaatacgacaaacaacagatagtgttaagttattaacactagaattagagaaaaatgaagagcgccaacaagcctcagttattagagctcctgtttcagggaaggttcagcaattgaaagttcatacccaaggtggcgtcgttacaacagctgaaacgttaatggtaatagtgccagaaaatgacacactggaagttacagcattagtgcaaaataaagatattggttttattaatgttgggcaaaacgtcattattaaagtagaagcatttccttatactcgatatggttatttagttggtaaagtaaaaaatattaatttagatgcaatagaaaaccaacaattaggacttgtttttaatgtcattgtttctattgaagagaataatctatcaattggaaataaaaatattccattaagctcaggtatggctgtaactgctgaaattaagacagggatgcgaagcgtaataagttatcttcttagtcccttagaagaatcagtaacggaaagcttacatgagcgttaa

SEQ ID NO: 316050 - DNA, 819 bp, Proteus mirabilis
atgaaaaatttgaagttgctactgttagcatttgttaccgcgtcaatactatctgcttgtagtaatcatgccaatgttgaaaatcatgaacaattaacattacaaaaccaagcagtattaggtcttgtttggacacagcaatctggtgaatatcaagctttgacacaccaagcttttaatatagccaaaacagcttttgagcatgcaattgtagcaaaagataagaaaaaagctgtcgtggtggatttagatgaaacgatgattgataacagtgcttatgctggttggcaaattgagaatggtcagggttttagccaagaatcgtggacaaaatgggtaaatgcacgccaagtctatgctattcctggtgccgtggattttgcgaactatgtcaatacactcaatggtaccatattttatgtatcaaatcgtttagataaaagtgaacgtcaagcaacaattgatgatatgaaacgtttaggtttcccgaatgtttcagataaaactttattattaaaaacagataaatcagcgaagtctgaacgttttaatagtattttgaaccaaggctatgacattgtgctttatgtaggagataacctaaatgattttggagatacaacttatcataaatcaaactcagaacgtcgagattttgttacattaaatgcgaaaaaatttggtacaaaatatatagttttaccaaatcctaattacggtgattgggagggagggttagataaaaattactataaaggtgatttaaaaaataaattaaatatccgtaataatgctattcgtgcttgggatggtaaataa

SEQ ID NO: 316051 - DNA, 186 bp, Proteus mirabilis
atgaaaaaacatttaactcctattatcatgttattaatattactacctgtgttttctgtaaatgcttattatatctatgaaactagctgtgaatacataatggattcttttatcttagacagtaataaagtggttttagctgacaatattaatgatcaatttaccatttcagtacattatcaataa

SEQ ID NO: 316052 - DNA, 615 bp, Proteus mirabilis
atgacttatacagttgctcttacaggtggtattggtagtggtaaaacgaccatcgctaatggttttgcctcactcggcgtccctcttgtggatgcggatgtcattgcacgattagtggtagagccagattcgccgggattaaaagccttacagcaacacttcggtgacacaattttattgcctgatggcaagttaaatagagcgcaattacgtcatattatttttcaaaatcaacaagaaaaagcgtgggtaaaccagttactccatccacttatacaacaagagacgcaaaaacaaattcaacaaattcgcgccccttattttatttgggttgttcctttattagttgaaaataaactaacacatttagccgatcgtattcttgtggttgatgtgacagaagaagaacaaattaccagaactatgcaacgtgatggtgtaagccgagatcatgtactcaaaattttacaagcccaagctaaaagagaacaacgattagccgttgctgatgatattattgaaaatcacgataatagcttaaatcaagatgaacaaataaaacaacttcatcagcattacttagaattagctcaaaaaagcaatacaggacaatag

SEQ ID NO: 316053 - DNA, 933 bp, Proteus mirabilis
  misc_feature (844)..(888): n is a, c, g, or t
atggtaacgcaagctaaccaaaatttatcagattatcaaaatagttatgctgagcctcttacagaagtatttcttcataaaaatcgatatagtgcagatatcatttggatgaacaattatcttcatcgattagacagcccacaaaaagagatacaaaaattcgtttcactctgtgctccgagtggaatgatttttatacaagaagtgttacatgcccctgcacaatcactgataagcatctctttattacaacaaaatggtagtgatcctgctgatgaattattaacagcaaaaaaatgcaaagatatctttagcgcttctactgcgacttataaaagtgaaggagttaacggcgaaatattgacacagttataccaagcaccagaaaaaatttatttaccagataaaaataagctagagcatgatttgcgccaatttttaccagactatatgatcccaaaacatatttattttctaactgagttccccttaaccgcaaatggcaaaatagataaccaatcattaaaattgtattgtcaggaataccaagaagaatacctaaatcaacaacctatcaatggtaaagaacagatcatcataacaatatggcaaaagctccttggcaccaacaagatacaccgtcacagtcatttctttcgtgaagggggagatagcctagttgctattcgattgatctctgatttaaaccatattggctaccaagttgaactggagcatatctttgcttatccgatcctttctgattttgcacaaaatataaagcagagcgaagttttcgaaaaacagccagcaatttcacataacgaggcgtatagatctgtcnnnnnnnnnnnnnnnnnnnnnnnnnnnnnnnnnnnnnnnnnnnnngatacaatccatttccactcactgatattcagcaagcttacttag

SEQ ID NO: 316054 - DNA, 597 bp, Proteus mirabilis
atgtctattcttgaatggccaaaagcggtgatccccacgcaggaaaactggcaattattgagtaacagcaaaacctttacctcaccatttaatggaagtagtcaaacggtacgctttccgggaagtcggtggcgttgtgagctgacattcaataatttaaatgaagagaaatcgcgccagttagaagcgatggtggcttcattggatggcatgtcggggcgagtcaaaataaccagttggataagaaaagggcgttatgggtatggttcgcctcgcattgcaataccaagccaattggggaatcggctagaaacaaaggattggaagcgcaatatgcgtgtgttacagcaaggggatcgtttaactgtgggtaatgaactcaaaatggtggtggcagatgtggtcagtgataatcaggggcgtgcaaatattcctatttcaccgatgttaagaatgtcacctaccgtcaatgaaatgctcgaggttgagcgtccttttggagtatttcgtctcgtggataatgaacagggtaaatttcagcatcgtcgcttggggtatacccatatcacgttatcttttgaggaggtgttgtactaa

SEQ ID NO: 316055 - DNA, 1851 bp, Proteus mirabilis
atgagcaatgccacgttagtggcgaatttaagcaaagtttcatcgggcattaacgcgcaattggagaaaatcgaggaacttaaacaacaggttatttccttacaaggtctatcaaaatacagcgttgagagtgaaaaggcgtttactgaacaaggtgtgggggatttataccttaaacgagtagctgaaaagcaaaaagagcttgatgctgcgatggggacatatgcagagcaagttaataacttagagcgtcagcgagccaatatgcaaaatatgttggcgacactcaaagaaaaagtgggcgatcaagcccctgaatatagacgctatgccaccgaattacaaaatgttgatgccgttatcaattcacttaaggcgagtttaaagagtttaggcattgaatatgaatcactcattgatatcacgcttcaggcgacaaatagccaagtgaatgccgccacggcgattactaaacagattgatgaatcgattgaaaaatcgcaacgttcagtggcaaaagcacaagccacagggaaggcattagcgaaattaaatgcagaagatgtattggcttcacgcaaaattacgccagatatgcaaggctacgataaggccttacaagctgaaattgaggcacaactggcactgcaagccaaacggacgtataagcccagtcataaatccaccattgattatgccaaacagtacaccaaaatcttgacagaattagaggaaaaacaagcctcactgattgcggatggacaaagcattcagctgtatggcactacctcttcctttaatgaatacacatctgcattagctgatatcaaacagaataaagacaagtttgatgacatcttaaaaatcgatcccaaagcgattgagacgataaaagaaaaagcgaaagccattgatgatctggcgcgtgctaactcagttgcgcaatttgcttatgatcgcggtaaagaaattgagcagatgcaatttgaaaccaccctgataggaaaatcacgcgcagagcaagaaaagcttaatgcccttcgtcagattgatgtgctgtatcagcaagccagtgtggatttaggcgaaaaagagctggcgaacttacaacgcaatgtcgaactcactaaacagcagattgaggaagagctgaggaagcgagaggccatgaaaggtgatccgatggcgggattaaaacaaggcttatcagatttcagtgagtcggctatggatgtaatggaaaacgtcagaaacgtcaccaccaatgcgcttaataatatgtctgatgcattagccgattttgctttaacggggaaaggaagctttaaagattttgccaatgcggtgatctccgatatcactcgaatggtgatgaaaatgctgattttcaaagccattgaagcaggcgggcaggcaatgggctttgatatgggatggatgagcaaagggcatgcttacggtggctatacggggcatggaggcaaatttgaacctaaagggattgtacatggtggtgagtttgtttttaccaaagaagcgacggctaaattgggtatcggcaatctctatcgcttaatgcatgcggcgcaaggttatgcttcggggggctttgtgggggcggtcgcagggcgaataccggttacaccgcaaccgacgttagcccgtgtgagtggtgtacaaatgacggtcgttaatcatattacggtgacgggaaatggtgacgctgtacttgcgcaggcaatgaaggaagccgcacaacaagggacagaagccggcgcacagaaagctcacgcgatgatgttacaagactttcaaagtaatggtgcagcacgcagaacattaggagtttaa

SEQ ID NO: 316056 - DNA, 1851 bp, Proteus mirabilis
atgagcaatgccacgttagtggcgaatttaagcaaagtttcatcgggcattaacgcgcaattggagaaaatcgaggaacttaaacaacaggttatttccttacaaggtctatcaaaatacagcgttgagagtgaaaaggcgtttactgaacaaggtgtgggggatttataccttaaacgagtagctgaaaagcaaaaagagcttgatgctgcgatggggacatatgcagagcaagttaataacttagagcgtcagcgagccaatatgcaaaatatgttggcgacactcaaagaaaaagtgggcgatcaagcccctgaatatagacgctatgccaccgaattacaaaatgttgatgccgttatcaattcacttaaggcgagtttaaagagtttaggcattgaatatgaatcactcattgatatcacgcttcaggcgacaaatagccaagtgaatgccgccacggcgattgctaaacagattgatgaatcgattgaaaaatcgcaacgttcagtggcaaaagcgcaagccacagggaaggcattagcgaaattaaatgcagaagatgtattggcttcacgcaaaattacgccagatatgcaaggctacgataaggccttacaagctgaaattgaggcacaactggcactgcaagccaaacggacgtataagcccagtcataaatccaccattgattatgccaaacagtacaccaaaatcttgacagaattagaggaaaaacaagcctcactgattgcggatggacaaagcattcagctgtatggcactacctcttcctttaatgaatacacatctgcattagctgatatcaaacagaataaagacaagtttgatgacatcttaaaaatcgatcccaaagcgattgagacgataaaagaaaaagcgaaagccattgatgatctggcgcgtgctaactcagttgcgcaatttgcttatgatcgcggtaaagaaattgagcagatgcaatttgaaaccaccttgataggaaaatcacgcgcagagcaagaaaagcttaatgcccttcgtcagattgatgtgctgtatcagcaagccagtgtggatttaggtgagaaagagctggcgaacttacaacgtaatgttgaactcactaaacagcagattgaggaagaactgaggaagcgagaggccatgaaaggtgatccgatggtgggattaaaacaaggcttatcggatttcagtgagtcagccatggatgtaatggaaaacgtcagaaacgtcaccaccaatgcgcttaataatatgtctgatgcattagccgattttgctttaacggggaaaggaagctttaaagattttgccaatgcggtgatctccgatatcactcgaatggtgatgaaaatgctgattttcaaagccattgaagcaggcgggcaggcaatgggctttgatatgggatggatgagcaaagggcatgcttacggtggctatacggggcatggaggcaaatttgaacctaaagggattgtacatggtggtgagtttgtttttaccaaagaagcgacggctaaattgggtatcggcaatctctatcgcttaatgcatgcggcgcaaggttatgcttcggggggctttgtgggggcggtcgcagggcgaataccggttacaccgcaaccgacgttagcccgtgtgagtggtgtacaaatgacggtcgttaatcatattacggtgacgggaaatggtgacgctgtacttgcgcaggcaatgaaggaagccgcacaacaagggccagaagccggcgcacagaaagctcacgcgatgatgttacaagactttcaaagtaatggtgcagcacgcagaacattaggagtttaa

SEQ ID NO: 316057 - DNA, 597 bp, Proteus mirabilis; identical to SEQ ID NO: 297210

SEQ ID NO: 316058 - DNA, 336 bp, Proteus mirabilis
  misc_feature (298)..(307): n is a, c, g, or t
atgaaaataggaacaagaattagagaactaagaaagaaaaaaggattaacaatccttcagctggccaccgctattaatagcgatgtgggtaacatttctcgccttgaaagaaatatacaaggctacacagaaaacactttagtaaagatagctgaagcactaggcgtatctgttgctgatttatttactgaaaattcaccagagccagatagaatagaactgattggtaagataccttctggtttagttcaagttcgaggtgaggcgttcttgggtgttgatggcgctgttgatatgnnnnnnnnnngcgttcttgcgtgtagatggcgctgttga

SEQ ID NO: 316059 - DNA, 321 bp, Proteus mirabilis
atgccaaaccaattaaaaaaaggtcgttatcaatataattttatttctggatattcttatgatagatataaccagtttaataatcaaaataataaccctatttttttactgggtgagttctcctatggtattaatcaaaaaataaccgcttatggtgcaattagaaagaagctgaatagcaatactttcttttcaggattatcattagatttaggacgctgggggggagtagccagtgatattagttattttgaacacaataatctattaaaatacaattgcgctataataaacgatggagcaatattggtacttctttaa

SEQ ID NO: 316060 - DNA, 483 bp, Proteus mirabilis; identical to SEQ ID NO: 310990

SEQ ID NO: 316061 - DNA, 240 bp, Proteus mirabilis
gtgggggcggtcgcagggcgaataccggttacaccgcaaccgacgttagcccgtgtgagtggtgtacaaatgacggtcgttaatcatattacggtgacgggaaatggtgacgctgtacttgcgcaggcaatgaaggaagccgcacaacaagggacagaagccggcgcacagaaagctcacgcgatgatgttacaagactttcaaagtaatggcgcagcacgcagaacattaggagtttaa

SEQ ID NO: 316062 - DNA, 666 bp, Proteus mirabilis
atgacaaagccaaagaaccataaagcgacgcctttcctcggcacgaagatctttgtgcaaacaggcttaggagaggcgatgaccgtgaccgaagcgacgttatcacccgcaaccattactatcgccaataataagctgaaagccgatgacatgattatgttatcgggactcggggagttagatggacgttttcctgttgcacaggttgatggcaacaaagtgaccctgtgcgacgaagtggattggagtgataaaacgctacccactgatttttcaagtgctaaggcacaacgtattcaatggtctaataacttttgtgcggtaaaaagtttcagcaaagacggttcgacaaccgaacaaattgatgtcaccaccatttgcagtgatggcaaggaatatgaatccggtgatacggaatacggttcaattaaattgacctttttcttacggtatagctccagtgatgtacagcgactcttgcgtaaatatgaaaacagcaaagaaaaatttgcggtgaaaatggtcttaacacgagatgagggctccatgttttattacggctccgtcgaaacgggcatgaatattgatggcagtgtaggacaaatgatggattcggggatctcgattaaattgtctggccgtgattatttgaatgcgaagaaataa

SEQ ID NO: 316063 - DNA, 624 bp, Proteus mirabilis
atggatgtaatggaaaacgtcagaaacgtcaccaccaatgcgcttaataatatgtctgatgcattagccgattttgctttaacggggaaaggaagctttaaagattttgccaatgcggtgatctccgatatcactcgaatggtgatgaaaatgctggttttcaaagccattgaagcaggcgggcaggcaatgggctttgatatgggatggatgagcaaagggcatgcttatggtggctatacggggcatggcgggaaattcgaacctaaagggattgtacatggtggcgagtttgtttttaccaaagaagcgacggctaaattgggtgtcggcaatctctatcgcttaatgcatgcggcgcaaggttatgcttcggggggctttgtgggggcggtcgcagggcgaataccgattacaccgcaaccgacgttagcccgtgcaggcggggtgcaaatgacggtcgttaatcatattacggtgacaggaaatggtgacgctgtacttgctcaagcaatgaaagaagccgcacaacaagggacagaagcaggcgcacagaaagctcacgcgatgatgttacaagactttcaaagtaatggcgcagcacgcagaacattaggagtttaa

SEQ ID NO: 316064 - DNA, 624 bp, Proteus mirabilis
atggatgtaatggaaaacgtcagaaacgtcactaccaatgcgcttaataatatgtctgatgcgttagccgattttgctttaacggggaaaggaagctttaaagattttgccaatgcggtgatctccgatatcactcgaatggtgatgaaaatgctggttttcaaagccattgaagcaggcgggcaggcaatgggctttgatatgggatggatgagcaaagggcatgcttatggtggctatacggggcatggcgggaaattcgaacctaaagggattgtacatggtggcgagtttgtttttaccaaagaagcgacggctaaattgggtgtcggcaatctctatcgcttaatgcatgcggcgcaaggttatgcttcggggggctttgtgggggcggtcgcagggcgaataccgattacaccgcaaccgacgttagcccgtgcaggcggggtgcaaatgacggtcgttaatcatattacggtgacaggaaatggtgacgctgtacttgctcaagcaatgaaagaagccgcacaacaagggacagaagcaggcgcacagaaagctcacgcgatgatgttacaagactttcaaagtaatggcgcagcacgcagaacattaggagtttaa

SEQ ID NO: 316065 - DNA, 294 bp, Proteus mirabilis
atggaactttctacattacttctttttatcccagcctgttttgctttaaaccttgcaccagggccaaacaacctgctttcaatcaataatgcagcctactatgggtttgctcgttcatgtgcaggaggtctcggtagattactcgcattcgtgattatgattgttctagcttcatttgggctagctgttgtattgcaaacatctgagttcattttcagtgtaattaaatttgctggggttgcttatcttttgtggctcgcatatcaattatggaaagccccaactgatgactag

SEQ ID NO: 316066 - DNA, 201 bp, Proteus mirabilis
atgactagttcccagtttctaatacttggttctttattcttgttactcgagtttattgcaataatgctctacgcttggttaggcttacacatgaaaaagttgctaaaaaaaccacatgctaaaaaagtgttcaatcgtatgtgctcaagtttattagctagtgcagggattgggcttttagtttcacagaaaagccattaa

SEQ ID NO: 316067 - DNA, 429 bp, Proteus mirabilis
ttgcgtaatacatttaattatacacgcggaaaagatgcttctggagattcattactttctgtacaaccttttaaatgggtttcttccttatcttatgataatgcggataaaaaatatggtgcagggatatttatgacttattcagcacgaaaagaaggtaatcaagcaatacggaatggtcgtgaatggccatatcttagtgattcttatactatatttgacacaacagcttactataatgtaaataaaaatattgtattacgtgctggggtttttaatttatttaatagaaaatatagtacttgggatgcattaagaagtctgccagaatttggtacaacaaatcaaatagatcgtgatcgtcttggtttacaacgttttactgctcctgggcgtaatttttctatggatatatcattgtatttctaa

SEQ ID NO: 316068 - DNA, 348 bp, Proteus mirabilis; identical to SEQ ID NO: 315147

SEQ ID NO: 316069 - DNA, 186 bp, Proteus mirabilis
gtgggaaattgcgattaccaatcttataaaaacgctgatggcttctttgccgtcatcatctcagccggcttcgcctctttcacagaactcaaaacaaccatagatttagaggaagcttttgatctgtgggaaattgcgattaccaatcgttataacgaggcgctagcggcgtccaaggagagataa

SEQ ID NO: 316070 - DNA, 1029 bp, Proteus mirabilis
atgagatatataggatctaagataaacctaattgatgaaataaacgtttttattaatgacaacatcaaagatagtaatgaaacatttctagatttatttggtggaactaattgtattggtaggtttttcaaaagtaaatatacaatttactcaaatgatgccctttattttagctacattaattcaaaggcaatcatagagaatgataactctatgagttttaataaattaataaatataggaataatgaaccctattgattacttgcagtcaaatgctgatatgtgtatagaagataaagcagttggatactatgagaaaaattatacaccatcaggtggtgcaatgttttttacaaaagagaatggaaagaggatcgactatattagagatatgatagaatattggtataatgaaaatttattgagcgtatatgaatattattatttagtttcatgtttgattgagtcgttacctttcattagtaatactacaggtacatatagcgcctatctaaaacattgggataaaagagcgttaaataaactaacactaaaaccactatcgatagaaaaaaacaatagaagcaataagtcatttaattttgatgccaataagttagttagaaatatctatgctgatatcacttatatagaccctccatacaacaataggcagtatgcgtccaactatcacgttctggaaaatatagcaaggaacaataaacctgaacttaaagggaaatctaaactatttgattggtctaacttaaaaagcgattattcggttaaaagaaaagcatttgaaataatgactgatttaataagcaacgtacaatcaaaacatattgtattgagttacagtaatgacggaattataacagaaaaggaattaattgatttactgaagaaaaactcaattaatggggtagttaaatcaaaaaaaatccaatatagaaagtacacatcaaaggtaaaatctaatgtcactaatgtgtatgaaatattattttacataagaaaaaaataa

SEQ ID NO: 316071 - DNA, 210 bp, Proteus mirabilis; identical to SEQ ID NO: 297185

SEQ ID NO: 316072 - DNA, 228 bp, Proteus mirabilis
atggatataatggcagcttacgagcaggttttgaaattaagtgagcaaatgttaacgcttgccaaaaatcagcagtgggatcagctgatagaaatggaaatggattatttaaaaagtgtagaaattatcactaagatgataaaacccactgagggtgagctgctgttgtattatcgctatggtcagttttcagagcatagttattatcctgatctcaatctaaaataa

SEQ ID NO: 316073 - DNA, 753 bp, Proteus mirabilis
atggaagatgccctgtacgaaatcgcctccatgcgcctgtttgcccgattatccctggatagcgccctgccggatcgcaccaccatcatgaatttccgccacctgctcgagcagcatcaactggcccgtcaattgttcaagaccatcaatcgctggctggccgaagcaggcgtcatgatgacccaaggcactttggtggatgccaccatcattgaggcacccagctctaccaagaacaaagagcagcaacgcgatccggagatgcatcagaccaagaaaggcaatcagtggcactttggcatgaaggcccacattggtgtcgatgccaagagtggcctgacccacagcctggtcaccaccgcggccaacgagcatgacctcaatcagctgggtaatctgcttcatggagaggagcaatttgtctcagccgatgccggctaccaaggagcaccacagcgcgaggagctggccgaggtggatgtggactggctgatcgccgagcgtcccggcaaggtaaaaaccttgaagcagcatccgcgcaagaacaaaacggccatcaacatcgaatacatgaaagccagcatccgtgccagggtggagcacccgtttcgcatcatcaagcggcagttcggcttcgtgaaagccagatacaaggggctgctgaaaaacgataaccaactggcgatgttattcaccctggccaacctgtttcgggtggaccaaatgatacgtcagtgggagagatctcagtaa

SEQ ID NO: 316074 - DNA, 237 bp, Proteus mirabilis
atgcatagactggataaacagctcattactgttgcggatttactggtaatccccgagttgcgcattcctgagtaccaacgcccatataagtggacgcagaaaaacctgaatgctctactggctgatcttcgccgttataagggcaagtcagcttatcgtctaggaacagtcgtttttcaccactttattgttattggtaaaggccattctggtagagcgcgaactgggtactattaa

SEQ ID NO: 316075 - DNA, 171 bp, Proteus mirabilis; identical to SEQ ID NO: 97900

SEQ ID NO: 316076 - DNA, 717 bp, Proteus mirabilis
atgctgaagaaaaacaaacatcaagcgatatcgcgggaagatctgaataagtaccatgaggaaactcaagggcttgagcgcgatatggttaatgagatccttaattcccgctctcgcgcctggaaaattgccacggcctttttcgtctttgccgttgtgagcatgattactgcggtcggtgtcattatccgctttgcgcagccgttaccggcatacctcaccacgattaacaaagatacaggcgaagtatcgcaggtgaaaattacccgcgatgaagcgacttatggcgacgtgatagaccagtactggatttcacaatttgttattcaccgtgaatcctacgactacaacagcattcaggttgattatgacgccatgagcctgatggcttccggtgatgtagctgatgaatatctctccatgttcaaaggcccgaaccgtattgataagcggttgggtgacactgaaagaacgaccgttcatatcaactcggtgatcaccgaccgcgaacacggtgttgccaccgttcgctttaccacgcagcagcgcattcgccagcgtccgaaccctgagccgccgcgctactggattgccacgattgcgtatgagtacaaagcgttaccaatgaccgcgcagcagcgctatatcaacccgcttggcttccgtgtaacgagttaccgtaagaacgctgagaacgttggcgcagtgggaggctga

SEQ ID NO: 316077 - DNA, 888 bp, Proteus mirabilis
atgaaaaaacaattaatcgccggtttaattctggtcagcctcggcctctctggtcaggcgctggcgctggaagtgggaaaaggtagcccctacgactaccgtattaaatccgtggtgtataacccggttgacgtggtgcgtattgattccgttgccggtgttgccactcatatcgtggttgcgcctgatgaaagctatgtgacacacgcttttggtgacagcaatagttatgcgtttacccatgttgaaaacaacatgtttatcaagccgaaaggggaagttcccagcgatactaaccttgttctggtcacaaacaaacgcacttataacattgtgctgcactatgtaggtgactacaccacgaaagacgcgcagggtaacgttaaagccaactttatcaagacgccgtggagcatgaaaaatgccacgctccagcttacttacctctatccgtttgaggacatgaaaaaggctaataaaacgctggaaagtaaccgcgtgaaaaaggcgttgaaagaccttcagaacgggccttacaacctgctttataaaatgtcagatgaagatgaatatcggactgtggccccggtaaacgtttgggataatttccgtttcacttacttcaagttccctgcaaacgcagatttacccgttgttttctatattggtgatgatggtaaagagcataccgttaaccagcatccagccggggaatataacaacattgttgtggctgaaacggtagcgaaagaatggcgtattcgttacggaaataaagtcgtgggtgtcctgaatatgaattacaacccaaatcttggggcgatcagtaccggcactacgtcaccagacgttaagcgcgtgaaaaaggatgagggggataaatcatga

SEQ ID NO: 316078 - DNA, 1155 bp, Proteus mirabilis
atgagaaaagacagagaggaaaatttagattacctcgatgaagaagataccggcattgaggatgagcgtcagggcttcagtggttcccccaaaaaacgtattgccggtgcgcgggcctttgtcgggctgatggtgttgataggttcggcaatggtggggtggttcatctataaccagatgcacgttaagaagctggccgacgatcccaaaaaggataaagagcaggttatgaccagctccttaccgcgccagtcttttgatgatgtgccgccgaccatcgacaacacgccgaaaaatagcgttgttcctccgttgcagacaacgcaggagccgcagcagcaggttgcgcgtcaaacattgaataaccagaaaaaggagttatcaccggaagaaaaaattatgcgcgcccgtttaggtgtgtccttcaacggtgtcgatcctgagaaacaggctacgactgcgaaagaacaggaacgccggtcaggtcaggataatacagaaaccagttcaaacagccaggcactggcgagccgaatgaaaccggcgcgtatggctgtcgcccaggcatctgtaatgccgcatccaaatctgaccattgcgcagggaacaatgattccttgcggtacaaatacggaactggataccacggttccgggccaggtgaaatgtactgtaagccgtgatgtgtactctgctgatggtactgtaaaactgattgataaaggggctgtggtcactggcgagcagaatagcggtatccagaacggccaaaatcgtgtgttcgttctctggacacgcttacgtaacccggatcagaccattgttaacctcgacagcagcggcactaacgctttaggtagtgcgggcgtacctggtcaggtcaactctcacttttgggaacgaatgggcgatgccattttcttctctgtgctgactgatggcatgaaagccggtatcgcgtcgattaacaacaacaactccgatgtgacgtttaacacaacggaaaacagtaccgaccagcttgctactgaagcattacgggcgaagattaatatcccgccaacgctctacgctgcgcagggcgatgccgtctccatctacgtagcccgcgatctggatttcagcactgtatatgggttagaaatgaatgactga

SEQ ID NO: 316079 - DNA, 1032 bp, Proteus mirabilis
atgactgagttaaccagtaatattcaagatattcgccaacgcccccgccgtgagcagggggtatggctgacgctcgaaccacttcagcgctacctgagtgatcccgatgtgtgggagctgagaattaacaagtatcagcaggttgtctgtgaaacgtcgaaaggccgtattttccacgacgatgagaaaattacggctgaatatatatcacgcttaaccgacacgctttgtggttataacggactaccgaaagagtccgttaataacgtgcttctgccggacggctcaaggggaattatttgcttaccccctgccgtactggagggaacagtagccatcgcgtttcgtaagcatctgcccgttgataagtctcttgaacaactccgcgatgagggccgtttcactggctggaaacgaaaggttcagggtgaagtagcccttcagccattcgagcaagaattgctggaattgctcgataaagacgacctcgtttcgttttttaaaattgcggtacgcaacaagctgaacatcgttgtatcagggtctaccggttcgggtaaatcaacgtttacccgctccctgcttcgggaagtgccttataccgagcgcattgtcgtttcagaggacgttcatgaaattgggtctgatctgcatcacgaaatggtttatatgctgtacggcgatcaggatggccgtctggccccggcggtcagcctgaaagcgtgtatgcgtctttctcccgaccgtatcatgatgacagagcttagggatgatgcagcatgggattacataaactcgctgaataccgggcatccgggcgggatcacatccacccacgccgacgatgcaaaatccactttcagccgtattgcgctgcttatcaagcaaaccggcgtcggccagacgctggattatgacgtgattatgaaaacgctgtacaccacgatagatgttgtggtgtacatggaacaccgccagattgttgaggttctttatgatccagcgtttaaaaaagcgcaactttctctttaa

SEQ ID NO: 316080 - DNA, 555 bp, Proteus mirabilis
atgatccagcgtttaaaaaagcgcaactttctctttaaagcggcactggttgccgccgtactttacggggcttcggccccgtctctttttgctgcatcggcgcaagtaggtttctcgccggaaggaaccgcgcagcagctcgttatcaacgtaatcggctcggcaaaagataacatcagaatgatggcctacagctttaccgcccccgatattatgaaagcgctgattgcggccaaacgccgcggtgtagacgtgaaaattgtcgttgatgagaatggcaatacgggccgcgctagtcgtgcggcaatgaatcttgttacgaacgcgggtattccgcttcgggttaacagtaactacaaaatccagcatgacaaggtgatcatcgttgatggccgtcatgtggaaactggcagttttaactacacggccagtgccgagaaatataactctgaaaacgcgattgtgatgtgggacgcgccagaactggccgggcagtacctgaagcactggcaatcacgctggaatcagggccgggattttaccccgtcttattga

SEQ ID NO: 316081 - DNA, 483 bp, Proteus mirabilis
atgcttgatatgcgattaggaaacagcggcgatattcctttcatcatgaacctggtgcgcgatgggataacatctggcgcatttttctatgccgagggcaacggtcttgaaacagtgagatctgagctacaaagtgtcacccaacaatacagagataatatccccgttggggattatctctttgtctttgccgagaagttaacgcggcagccggtgggattttcgctgttaaccggccgcaatgattttgcgggccgggcatctcatcttgagatccgtatgttcgctgttgcggctgatgagcagggtaaaggcattggcaagagtatgcttgcctcaatcatcgaagccacgcccggacaccggctggaagcctcctgtctccccccggccacaaaaatgatgagactgctggacggaagcgggtttaagctgattcatgaaacgcagggcggtaagaaaacgtaccgttttacagactaa

SEQ ID NO: 316082 - DNA, 459 bp, Proteus mirabilis
atgaaaggcaactgcgccgatctccacctgggcggtgcggtcaaattgccgggccttacggcatcgagctgggcgacgcgcccacttccccggagccgaacggggcagggcgttacgtcgccggtgacgccgaccagggcgaagcgcccaccccctccctgcaaagccggttttggcgggctgtcagacgataccgccgccggaacagtggcccgtcacaacggcccggttgagcgggcgggctggcgcgtagcgacgggccgggcgcgatttatccgggtgttggggggttggtcgcgcagcggccagcgcccctacaggcacgacagcgccgtaactggcagaggatggcgaagccaccccgaaggggcggggccgccggaggcggggcaagtccggcgcagggcgtgggggccaagcggagcgcggagggcgaagcccggaggcgttagggattga

SEQ ID NO: 316083 - DNA, 393 bp, Proteus mirabilis; identical to SEQ ID NO: 304083

SEQ ID NO: 316084 - DNA, 720 bp, Proteus mirabilis
  misc_feature (687)..(696): n is a, c, g, or t
atggaactgaagtcaaccccaatgggacaacgtttagctcagcatccttataacagggtaaaattgttaaatgcgggtattgaggtcagtggtgaaaagcatcaatatttaattccttttaatgaattgatcgacattttttgtaaaaaaggcattgtgtggggagagttagagtttttactgcccgacaataaagtggttcgtttgcatggaacggactgggaagaaacgcaacaattttaccgctatctttatcaaacttggcaaatatggagccaagagatgagtgagataacggcgcaagtacttgaaaagcaactctcttctatccaagatataattcaaagcgataaatggataaaacaaaaccagttagccggtattcaacaggctatccaagaaagtttttctgctattcctcttcctctggaacgacttgctcaatttgataactgtaaggtgcattatcaacgctgtttacagtggttacagaaaggtaaggcattaattgtgcaagaaaatgagcaatggatcacccgtatgttgacagagcatgcggagttttttactaccattgaaacatcgcctttaaatgaatcgcaatgtaaagccgttatcaacggtgaagataatatattggtattagcgggtgctggtagtggtaaaacgtcggtactagtggcaagnnnnnnnnnnagcggggtggttgttacgtcgtaa

SEQ ID NO: 316085 - DNA, 423 bp, Proteus mirabilis; identical to SEQ ID NO: 28887

SEQ ID NO: 316086 - DNA, 186 bp, Proteus mirabilis
atgtacgtgtttttagggggtcggatgtacgatcattgggggggtcggatgtacgtggataactttatgtttcaacagcttttttacagggttgttcaccttatccctaactttactcaaagagggggagcggcattaacccgaaataaaaaaggcccgtatgggcctatttttttgcttccttga

SEQ ID NO: 316087 - DNA, 237 bp, Proteus mirabilis; identical to SEQ ID NO: 97902

SEQ ID NO: 316088 - DNA, 708 bp, Proteus mirabilis
atgaaaaagacacttgtaagccttgttttagctctggctatttcgccggttgcagttaatgcgcaactggtagttaacgatcctgcaaatctggcccaggcgcttgagcaggtcacattaatgacgcagcaaattgaacagctcaaatctcaattgctgaagcaggagcaaacgctggcttccttaaccggtagttctggtattggtaatttgctgaatggcgatattagtacgctgaaaggcaatttaccgtctgactggacgcaggtatacagcgacgccatgaacagcagttcaggcatcacttcatctgctcaatccatgctgaaggaatttcagtcgcagattgacggtatgaaccgttccgaagcgatgagtttcattaagcagaaattggcagagaaaggggcgtatgaccgtgtgatggcgcagaacgcttacaacaatgaaatggcggagctgaataacattcaggagctgaccaatcagattgactcaaccacggacatgaaacaaatcgctgaccttcaggcgcgtatccagaccgcgcaaggtgctattcagggggagcaaacgaagctgcaactgatggcgatgctgcaaacctcgcaagacaagattttgcaggagcaaaaacaatacgcccagaagcgctttgtcctcggcgctgacggtgaagatctttccatgcctaacgtaacggaataa

SEQ ID NO: 316089 - DNA, 2631 bp, Proteus mirabilis
atggccgtagcggaaatgcaaaaagggggggtgaaagattacaaaaaagaaccttcctctttgaaatatattccttactcctatcatgtcacgccccatgttatcagtacggtaaatggggaatacctttctatatttaaaatccgtgggcgaacccatgactgtgcctctgatgccgagctgattaagtggcacgctgatttgaaccagcttttaaaagggattggtagtgagcatgtgaaattatggactcacttacaccaccgcgaaattaataattatcctgacacgcattacaatatgacattcccgcgcatggtgaatgaatattatcgtgaccagtttgatgatactcccatgatggtaaatgacctgtatctgacggttgtttataaccctgtgggggattctgctcaaaagatgctggcaaagtttgacaagccatcgcccaacgagctgcgtgaaatgcaggtagacgctcttagtgcgctggaagatatttgcgaacaggtcatgaactccatgcgtccttacggcattgaccgtttaggttactacttccgtgataaacgggggaatatcattcctgagcagaaaaaagacgatgcagaagatgatgaggatattatcgatctgcgtgaagatttgctggctgatgtggaatatcaggacgttcaggcggataaagaagccttcagtggtacgcaacacaccttttctaaagcgctggagtggctctattaccttgttaatggtgaatgggcgccggtgccggtttgtcgtggccgtattcgtgaatatttggttactacccgtccaacttcctcattatggggggatggcatcgagattcgtggtactgacgaacgccgctatacgtctgctgttgaaatccgggattacgattccgatactgagccgggccagatcaatatcctgatggaagcaccgtttgagtttgtgttaacgcaaacgtattgctgtatgtcccagcaagcggcaagaacttacctcactaaccagcaaaaagcgctgctggaaacaggcgatccatcctatacgcagataaaccagatgactgacgccgttgatggcgttgtttcacgtacatttatcatgggctggcatcacctgacggtacatacctttggcaagtctctcaaagaggctcggtctaacgccggtgtagccaaaaatatgctaaacaactgcgggctgattgccagccaggtagggttagcttcagaagcggcatattatgcaaaacttccggctaatcaacacctgtcgccacgaccttgcccgctgaatagctggaattttctttgcttctctcccttccataattttatgtccgggaaagcaaataataacccgtgggggccagcgctgacgctgttcaaaaccgtggcaaatacgccgctgtatatgaacttgcatgtaacgccagaagatgaaatgtctttcggtaagcgaccgctggcgcatacgttaatgcttgggcgttcgggggcaggtaaaactacgctgcttaacttcctgctgacgcaagcgatgaagtataacccgcgcatttttgcctttgaccgcgatcagggcatgatgccgatgattaaagcgttacacggtcactacacggttctgaaagagggcgttgcttccgggtgggcacctctacagatgcctggcaccaaagttaacattgcattttgtaagcgcctgatgcgcctgtgcgctgaaattaccaaaggcagcgtactcgatgctgatcaggttaatgaccttaaccgcgccgtcgatgctttgatggatgagaactccctcattccgacagatttacgcaccgtggatatgttaattcagcagatgccgaatccatatcaaacagcgggcagtaaacaaacactggcgtcattgcttgttccgtggactcgcggccatgaaaacggttggttgttcgataacgactcggattcactaaatctcggtgaatacgatatctacggctttgacctgacagatttcattgttgcagataatgagatccctcctgcaacacgtactccgctcctgatgtatctcaatttccgtgtgcgtcagtctattgatggccgtcgccgggtgattcaggtattcgatgagtttcaccagtaccttgacgatccaattatgagtgtggaagtcaagcgtggccttaaaacagaccgtaagaaagatgcggtttacgtattctccacgcaagagccgaacgatgcgctggatagctccatcggtaaaaccatcatgcagcagtgtgtaacgaaaattcttctggaaaacccggatgcggattatgaggactacgttactcgcctcaaattgacaccggcagagtttgacgcgctgctgtctattcctgagaactcccgccagttcctggtgaaacaaggtagtcaaagcgcgatggcgcaattcaacctggccccgcgcgttaagacgccggagaacttcaggaagctggataagatccttagcatcctgtcaggggaaacccaaaacgccgaaacactggcgaaaattattgagcaaattggggatgataaccctgataaatggctcgaaccctactggaaatctgtactcgcagcgtga

SEQ ID NO: 316090 - DNA, 315 bp, Proteus mirabilis
atgaatttatccggtaaatatccgttatttaaaggcgcgacgcgactgccgacatttgccggtgttccgcgaacagtaattattgccaccttcatattttgtgcgacgttatttatgacgatccacctttgggccatcgttctttttggcttgctgtggtttattgagttttgtatcagcaaacatgatgaccgtatgtttcgtattatatggctggctatcatgacgaaagggctaaatatgattaactccccgtttactaaactgtggggcggctctagttactcacctactgattatggagataaaaaataa

SEQ ID NO: 316091 - DNA, 291 bp, Proteus mirabilis
atgaatacagcgattaaacgttttttcccggtggcaatgttcatgatggtcgccctttgcgttcctgagctggcgctggccgccggtgcagataccggtgaatcatccatgagttccattaactcatggttaatgacgtggattccgattgcggccaccgttcttatcatcgtgagtgctatcgcatggatcgctcatatgctcccggcgagctgggcggttcgtattgttatcggtctgattgttgtcggttccgcatcttaccttgttggccttttcggtctgagttaa

SEQ ID NO: 316092 - DNA, 318 bp, Proteus mirabilis
atgcgcgtttatctcatcttgttgaagcagttagaagaagtattcaatcaaaacaaagttgtgcggatcgctattcaacggatggataaaaagaaatggataccgctttttgatgtgaaaaatagtgaagggggcgtaatcacttgctccctgcgagttcagtctggagagggggttagaacgtgggccgatctgcggatactggccgacatgctgagagacgattttaatgcaagagaagtggggcttttcctggatgagcctgattttatttttcctgatgatggagtgttagacaaagatgaatacagcgattaa

SEQ ID NO: 316093 - DNA, 741 bp, Proteus mirabilis
atgaagcaggttgttgcccttttcccactgttgattgctggccttttggatgccacacccgcaaatgcggaactgtcagcgccggttatggctctggcaaaacgttgtgcgccagaagtgcatcctttaactattgggtacctggttagccatgaatcgcgcaacaacccatacgcgataaacgtcaacgttcctaaaggaacaaaatcaccgttagccagacaaccgcgctccctggatgaagctgttaaaacgacaaaatggctaacggctcatggttataactttgacgtaggtttagggcaaatcaactctgcgaatttcccaaaattgaatgtttctgccgcagatttgtttaatggttgtaaaaatctcgaagctgctcaatacgttcttaattactgctaccagctcgcaacaaaagagtatgcgccggggcagtcagctttgagacacgctttatcttgttataatacggggtcactaaccgccggatttacaaacggttatgtatcaaaggtggttgctcaaattgggcaatcaaaacccgtaatccctgctctgaaagccgatgatggctccactgatgtggaaagtgttgatacagctatagatgctgtgccggtagatgctgctgatggtgaagaacaaccaaaagacgccggtatgactgatgcctttggtggctcggataaagacgcttttggtgcatctgatggtgacgctttccggcagaagtag

SEQ ID NO: 316094 - DNA, 237 bp, Proteus mirabilis
atgtcaagacaagatgaaaagaagcacaaaacagagcaggagcgcgaaacatcagtgcctaaaagaaaaatcatattcgtacccttgcagtcagaaaagagtcccaaaggggagcctcgctaccgagatccagccaatccatttaacacatgggttggaaggggaaagcgccctgactggctaaaaaaatatcttgacgaaggccgcgagctttcggagtttgagatcgcagaataa

SEQ ID NO: 316095 - DNA, 312 bp, Proteus mirabilis
atgtcggcagttaataaccctaaatatattaagagaaaacgtgccgactgtttaatcacggtgagtaactttattttcttaacccaccaaaattgggagggggttatttcgctccgctgctgcgcttctttattacgacgcgctcggattgctttggcccttttctccctcttttttccggtaggaaaatcaataattttactcatccgtcaactccttattctgcgatctcaaactccgaaagctcgcggccttcgtcaagatatttttttagccagtcagggcgctttccccttccaacccatgtgttaa

SEQ ID NO: 316096 - DNA, 873 bp, Proteus mirabilis; identical to SEQ ID NO: 277180

SEQ ID NO: 316097 - DNA, 324 bp, Proteus mirabilis
atgaaaggtgaaccacatccttttgccgcgactgcaacagataaatttaaccctctccaacaacttgcttacttaggtgttatgtttgggttagttccactacttcttatcacaggcgtactatgcttataccctgaagtcttaggttatggctattggatgttaaaagcacactttatattaggcatcgttgcactcatgtttatttgtgcacacttctacttatgtactttaggcgatacctttacacaaacattccacagcatgattgatgggcatcatcgacatcaaaaacatggtgaaagcacaacaacaaaaaattga

SEQ ID NO: 316098 - DNA, 657 bp, Proteus mirabilis
atgacgcagcagccactgatgcacctgcctcccgtcctgacggacacagtgcaccccggcactgcccagactgctgaccaggcggtcacacatctgattgagcatcgccaccggcggcatcggatcggcatacgcacttcccagacgacgataaaccaccatccgggtccggcgttgctgaccgcgccagggttgcccggtcacctccgtgtctttaaacaatccttccggccgggcaatcccccgcaaatgacgcgccatttcggccagccaggcttcggtaaacgccgtgccccgtgccgccggcaggatatagtcccgcaaggtggccagcgtgacgctcacgtcgtcctcatcctgacaaaaaaactgtaccacccacgggttatcatcatgctcatccaggctgtcctgaagcgcatcctccaccgcatcccggatttccagcagacggtcaccggagcgcccttccgtcggtgccggctcaacggcatacaccgccccgaccgacaccccgtcatcaagcagcaggcattgctcctcatccagaaattccacccagggcaggtaatcaataaaagacggattcgcgtggtaaatcttctgctcatccgcccgggtcattttcccaggacgggaaagcggctgacgggctaa

SEQ ID NO: 316099 - DNA, 183 bp, Proteus mirabilis
atgggcagcgcttttctttgtgcgcagttaagcgtcgagggagaagtgaaccatgaaagctatcttgacagctggctgcgggtactgaaatcggacaaaaaagcgttgttccgggccgccgggcaggcccgccaggcctgtgagtttttactgaatgtggccgcatcccgacaggccgcgtag

SEQ ID NO: 316100 - DNA, 975 bp, Proteus mirabilis; identical to SEQ ID NO: 277215

SEQ ID NO: 316101 - DNA, 444 bp, Proteus mirabilis
ttgatcagcagagagcagaaagcacgtattgacgcattaaatgcagaaaaaactgcccgtgaacagggggatgttaccacgctcaataatgcaaacaaatacaccgatcatcgtattcgctcattaggtttaaatgtttctgatgcgttaaatgattttcaacaaaaaacagatcagaaatttgctcatctcgataacaaaattggccgtgtggaaaaacgggccaatgccgggattgccggggtgaccgcgatttccaccattccgtatgtgaacagtgagcgtttttcgttcgggatggcgatggggcattaccgcgatgcacaggcgatagccaccggggtgcagtataagccgacggccaataccaatgtgcgcctgaatgcgtcatggaataacggcggcgataccagtatcggcgccgggtttgcggtgggctggtaa

SEQ ID NO: 316102 - DNA, 264 bp, Proteus mirabilis
  misc_feature (5)..(14): n is a, c, g, or t
atgannnnnnnnnntaatgatactgtctgttatattgattcagcgttgagacgtaaaaaaccacaagataatgattttatacaatctcacgatcaacttatcgcacgtgttaatgcacaaccaagttcagataacgcccgtattcaattagtgttaacgcaaatacgcttgttactggatttattgccacaaattgtcaattgcattgagctaattgagcaaacagaatggcaaaacgataaagataaattagctacagcttga

SEQ ID NO: 316103 - DNA, 276 bp, Proteus mirabilis
  misc_feature (11)..(20): n is a, c, g, or t
atgaaacattnnnnnnnnnnagatgaagaaacactcgcacgctttaaatataacaatgcactacctcgctcagtcttgcgcatccatgttgagcgcgtatttttccaatgtggtagggcacttattcgttcaggtttgtgggaaaacaaatatttagctgataaatcaactattccagcaccgggacaaatattgaaatccatttctcatcaacaatttgatggtgataaatatgatgcacaattgcctgaacgtattatgaaaacattatattaa

SEQ ID NO: 316104 - DNA, 1497 bp, Proteus mirabilis; identical to SEQ ID NO: 190876

SEQ ID NO: 316105 - DNA, 261 bp, Proteus mirabilis; identical to SEQ ID NO: 27108

SEQ ID NO: 316106 - DNA, 513 bp, Proteus mirabilis; identical to SEQ ID NO: 277237

SEQ ID NO: 316107 - DNA, 537 bp, Proteus mirabilis
gtggcgacagcctgggaggatattcagtaccttcgcagtaccggagaagccataccgatggatatgcggactctgttaccgaccagccttgcggctgaattacacggttttaacggctgtttatggaaaacaccggaggtcatctggcggcaggcgcgctggcaggcgtttgcccccggtaacagtacatatcacctttatcagtgtcgttatggtgtgaaatggccgaacggcagtggttttcgctgtattgatgacggggaggccaccacgctgtcagtgacgtttgatactccatggagtctgccgtcagcagaggtcttgtgtgctctgtctacgcgtttccgctgtcaggtccgtcatgtctatgccgaagaaggctgtggtttctgcggatacagcgagtatgaccatggccggttagccgaccatgaatctgatgagattgagtacagtgatgaagagaatgaggatggtttccgggatgtgacgggaccggactatattcttgattcattaccacattacggagggtga

SEQ ID NO: 316108 - DNA, 1002 bp, Proteus mirabilis
atgccaaactggtgctcgaaccgacttgacatcaccttacacaacgcggcggatatgccggctcttaaacactggatatatgcggatgatgggatacccgcctggcagacggcgatagcacaaagtctgcatttgttgctggccggctgcgcggggatactgaaaccggtcagaccgctgtcttttccgccgttaccggaactgacttcatacggtgcaaccgggcctgtttccccgggaaacacggctttcacgcactgggttgacctgctgatgactgcaccggatttgacaccgtcatgttgtcagcaaatccatcagtggtatcagatgtggttatctgaaggcggggcgtaccattcctgggactcgctgacggcgacgcagaaagcgagactgtccccgttgttatcgggaagcagttttgactggcttaaccggtttaccggagaggatgagagccgggtggcgacagcctgggaggatattcagtaccttcgcagtaccggagaagccataccgatggatatgcggactctgttaccgaccagccttgcggctgaattacacggttttaacggctgtttatggaaaacaccggaggtcatctggcggcaggcgcgctggcaggcgtttgcccccggtaacagtacatatcacctttatcagtgccgttatggtgtgaaatggccgaacggcagtggttttcactgtattgatgacggggaggccaccacgctgtcagtgacgtttgatactccatggagtctgccgtcagcagaggtcttgtgtgctctgtctacgcgtttccgctgtcaggtccgtcatgtctatgccgaagaaggctgtggtttctgcggatacagcgagtatgaccatggccggttagccgaccatgaatctgatgagattgagtacagtgatgaagagaatgaggatggtttccgggatgtgacgggaccggactatattcttgattcattaccacattacggagggtga

SEQ ID NO: 316109 - DNA, 252 bp, Proteus mirabilis
ttgcactataaacatgatgttattgatatcaaaagaaatgagactggcggttggaatatcgaagttaaagatctcaccacccatgataaatacctaattacagctaaatatgtatttgttggtgccggtggacgcgctatcgatttactccaaaaatcaggtattcctgaaggtaaaggctacggtggtttccctgttagtggtatttggctaacagttagcagcatgtcctgttcccgcgttattccatga

SEQ ID NO: 316110 - DNA, 195 bp, Proteus mirabilis
atgaataaaactattagtgaacatgtagatgtcgcgctcattggtgctggcattatgagtgcgacacttggcacacttctgaaagaactagagcctaatttaaaagtcgcgatgtttgaaagacttaatgattgtggtcaagaaagctctaactcatggaataacgcgggaacaggacatgctgctaactgttag

SEQ ID NO: 316111 - DNA, 600 bp, Proteus mirabilis
atgtctgtcccccatcttgatactcgtattattgcaggtaaacgctccctactctttggcccctatgctggtttttcaagtaaatttttaaaacacggctcctatttagatttatttgagtcaattcgccccagcaatattgaacctatgctagatgtcgcgaaagataactggtcattaactgaatatttaattggtcaagtattacaaacgtcagcacatcaatttgaaatgcttaaacagttctatcctcaggctcaacatgaggattggcaagaagctgttgcaggtcaacgagtgcagattattaaacccgcagctaaacatcatggcgtattagagtttggtactgagctaattagtagcgcagataaatcattttcagtgttattgggggcatcacctggcgcttctacagcagcatttattgccatcaatatcattaaatcttgctttaaacagcaacttgaaaatgagggttgggaagatcgtcttaaaacgattattccaacttatggtattgatctcaaaatagatgccgatgcttgtcgtaatattcgtgcatcaacggctaagatattaaaattagaaacaccttag

SEQ ID NO: 316112 - DNA, 648 bp, Proteus mirabilis
atggccagggcctgtacgatacgggaactgatagcggatttatcccgctgtaatccggaggcattcgtgttgtgcgagatgtggttccccgatgatgttaccaatgttgatgaaacggcttgtccggctgaaacgcgggcaacattaacgcatgttgcacattattttgatgcggagctggggataaactgggacacgctggcgtgtgcgttatcgtgtgtcagagatgctgagcagaagggactcgatatttacttttatgccagtgaaaagcgtggtacagacaaaagccggatacccgcctcacgttacgcagaagcggacagcgacggcgatattgaagtcgggtatttccgtaaggttaatgcgctgtttaagtgggtgcatgaccatatcggggcttttgagaactgtgaaaaggtgctggtgacagaggcccatctgcgggctttacagcaggacttgcaggcactgacaccggaaaactgtcagacacggttcccgaccactgagggctttttctttggttcaacggcttatgatgaggcgtactgggctgatgtggaaggcgtcagacgctggctgtcagagataacggagacgtttgattttgaagcagagtcactgtgttttgtggcctggtggtaa

SEQ ID NO: 316113 - DNA, 360 bp, Proteus mirabilis
gtgttgtgtgatggtctgggtgaaaaccggctgaacgatggttcattattcaccgatgacggtgaggcactttgttttaacggcaatgcggctgatgatatgaatcatgagacatttattgtacagcgcgaaatccccgttgaggactactgggattgctgtaagacagcatacaaaccctatgacgtgtttgtggtggcggcattactgctgctgcacaacctgtgccccgggtatttttcggtctcttctgacggggataccctggactggcaaccggtgctggactatgtcagtaaggcattcccttatcttatcctgacgttaccggcaggcattgatgtgccggaggctggataa

SEQ ID NO: 316114 - DNA, 417 bp, Proteus mirabilis
atgccacagcccagggggccaccgcacacacaaacgccgccccgccggacaccagggcactgtttaattccacggccggtcgcagccaggcctctatcacataacgatcactcattctctcagactctttttcagtgtttccccgggaaacagtgttcaaaacttcacaagtgtttcccggggaaatactttacccgaggtatgaacgatgccagcagagacactgtttccccgggaaacagtgttcaaaacttcacaagtgtttcccggggaaacagtgtctctgctggcatcgttcatacctcgggtaaagtatttccccgggaaacaaaacatctgctggcatcgttcatgcctctggtaaggtgtttcctcgggaaacaaaacatctgctggcatcgttcatacctcgggtaa

SEQ ID NO: 316115 - DNA, 537 bp, Proteus mirabilis; identical to SEQ ID NO: 316107

SEQ ID NO: 316116 - DNA, 873 bp, Proteus mirabilis; identical to SEQ ID NO: 277180

SEQ ID NO: 316117 - DNA, 261 bp, Proteus mirabilis; identical to SEQ ID NO: 27108

SEQ ID NO: 316118 - DNA, 360 bp, Proteus mirabilis; identical to SEQ ID NO: 316113

SEQ ID NO: 316119 - DNA, 702 bp, Proteus mirabilis
atgtcactggtcagcggggcggccggcgggattgaaaatgccgtgaccggcgtgctgagcggcgtgtctgccggcggcggaaacagtgagcagaagtttgaggcaaaacgtaaaaccgatctgcactttttttatgcggatgccatcggtcatccggcaaccacccttatcggcggcagtatcccggggtattcctgtgacagcgcggccacaccgctgtttccttattacctgagcacgctcgacagtgtgccgtggcgactgggtgtgccggaaatggcgtatccggaagccctgatccccgggaaacgggaaatcgggtcacagcaccggggcaatatgtggggaaatctttatccgcgcagcggttttgtcacccagcaggacggagagaaagcagcagccgtggtggcgcagcgcgtggcagatattatgacccgcaccgggcaggcgcatacctatgtgcccctgaaaggcaaccgccgggatggctattggccgccggacgcggtgacggagaataccgggacaaaaaaccataaatggcagcgcctgtcgccggggctgaaaaacagctgtgcggtgtttccggatgagggcggagcacaggcacaggacggtaattatgcctgggcattgtggcagccgtacagctgctgcaagcgcatggggcaaaaatttctgtacagcacaacgttttaa

SEQ ID NO: 316120 - DNA, 174 bp, Proteus mirabilis
gtgttatctgtggaggctgattttacccgtccacatcttgagaaaagggtccgcgcagtctgggaatcggcagagcaaacgccttatgcgtctgactttcgtcgtatctacaacgacgcggccaaaaatgcacagtttgaagatccggttgaagcgctgatgtttagtgcttaa

SEQ ID NO: 316121 - DNA, 438 bp, Proteus mirabilis; identical to SEQ ID NO: 277235

SEQ ID NO: 316122 - DNA, 537 bp, Proteus mirabilis
gtggcgacagcctgggaggatattcagtaccttcgcagtaccggagaagccataccgatggatatgcggactctgttaccgaccagccttgcggctgaattacacggttttaacggctgtttatggaaaacaccggaggtcatctggcggcaggcgcgctggcaggcgtttgcccccggtaacagtacatatcacctttatcagtgccgttatggtgtgaaatggccgaacggcagtggttttcactgtattgatggcggggaggccaccacgctgtcagtgacgtttgatactccgtgggggccgccgtcagcagcggttttgtgtgctctgtctgcgcgtttccgctgtcaggtccgtcatgtctatgccgaagaaggctgtggtttctgcggatacagcgagtatgaccatggccggttaaccgaccatgaatctgatgagattgagttcagtgatgaagagaatgaggacggtttccaggatgtgacgggaccggactatattcttgattcattgccacattacggagggtga

SEQ ID NO: 316123 - DNA, 537 bp, Proteus mirabilis; identical to SEQ ID NO: 316107

SEQ ID NO: 316124 - DNA, 270 bp, Proteus mirabilis; identical to SEQ ID NO: 12731

SEQ ID NO: 316125 - DNA, 216 bp, Proteus mirabilis; identical to SEQ ID NO: 12730

SEQ ID NO: 316126 - DNA, 213 bp, Proteus mirabilis; identical to SEQ ID NO: 314668

SEQ ID NO: 316127 - DNA, 213 bp, Proteus mirabilis; identical to SEQ ID NO: 314668

SEQ ID NO: 316128 - DNA, 360 bp, Proteus mirabilis; identical to SEQ ID NO: 316113

SEQ ID NO: 316129 - DNA, 300 bp, Proteus mirabilis
atgaacaaaatgaccattatccgctttcagttactggtacatcagttactgcaagtgcattacggcattacgctgagtgataccggattgtccgatgatgctgaggtgtcccggatgattgaactcgggatatcgccggtatcggtggtcaaccgtctggtggataagtaccacctggataaactgaatgcatactgttatctgccggcatccccgtatgtcagtgacagcgatgccttacttgcacaggctcagctgagcggtgccattaacccggatgtcatgccggataatccttaa

SEQ ID NO: 316130 - DNA, 360 bp, Proteus mirabilis; identical to SEQ ID NO: 316113

SEQ ID NO: 316131 - DNA, 198 bp, Proteus mirabilis; identical to SEQ ID NO: 14615

SEQ ID NO: 316132 - DNA, 198 bp, Proteus mirabilis; identical to SEQ ID NO: 14615

SEQ ID NO: 316133 - DNA, 321 bp, Proteus mirabilis
gtgaaatggccgaacggcagtggttttcgctgtattgatgacggggaggccaccacgctgtcagtgacgtttgatactccatggagtctgccgtcagcagaggtcttgtgtgctctgtctacgcgtttccgctgtcaggtccgtcatgtctatgccgaagaaggctgtggtttctgcggatacagcgagtatgaccatggccggttagccgaccatgaatctgatgagattgagtacagtgatgaagagaatgaggatggtttccgggatgtgacgggaccggactatattcttgattcattaccacattacggagggtga

SEQ ID NO: 316134 - DNA, 183 bp, Proteus mirabilis; identical to SEQ ID NO: 313162

SEQ ID NO: 316135 - DNA, 183 bp, Proteus mirabilis; identical to SEQ ID NO: 313162

SEQ ID NO: 316136 - DNA, 240 bp, Proteus mirabilis
atgagcttatcttcattgaaacaagctggtattgatttcactattttccaatgtacaaatgcttttacagcaatcattgctactctattaggcacttggacagcggagaactggtcttatcattttgtttttgcaatatcatctatttatacttttatcgcagtactaatttccattaaattaataaaaaaacgccttaaactaaatatttcatcaaacaattttgagcaatatgtataa

SEQ ID NO: 316137 - DNA, 504 bp, Proteus mirabilis
ttgagtgatgacagtttagcggaaacgccacatcgcattgcgaaaatgtatgttgatgaaattttttcaggcttggattatcacaactttcctaaaatcaccctgattgaaaataaaatgcaggttgatgaaatggtcactgttcgtgacatcacattaaccagtacttgtgagcaccattttgtcactattgatggtaaagcaacggttgcttatattcctaaagataaagtgattggtttatcaaaaattaaccgtattgtgcagttcttcgcacaacgccctcaagtgcaagagcgtttaacgcaacaaatattgattgccttacaaacgctattggggacgaaaaacgttgctgtctctattgatgccgttcactattgtgtaaaagcaagaggcattcgtgatgcaaccagtgcaaccaccacaacctcattaggtggactatttaaatctagccaaaatactcgccaagagtttttgcgtgctgtacgccatctttga

SEQ ID NO: 316138 - DNA, 123 bp, Proteus mirabilis
atgtcatcaacattaagtaaagaggcgcaatgggtacatgccgcgttagtggagcgtggtttggaaacgcctcttcgtgagccaaaactttcacccagtgagagtaaacaacaaattagttaa

SEQ ID NO: 316139 - DNA, 474 bp, Proteus mirabilis
gtgggtgaagcggactatactaaacaaattttagatgaaataggcgaaattggtttttggaaattagccattaagccgggtaaaccttttgcttttggtcgcttacataatgcttggttctgcggattaccgggtaatcctgtctcagcaacagtgacattctaccaattagtacagcctttaattgcccgtttatctggttttagtcagtggcgatcaccacagcgtttccatgctaaaacctgttcatcattaaaaaaatctgccggtcgtctggatttccaacgcggtatcgccagtattaatgaaaatggtgaatggcaagtaaccacatcgggacatcaaggctctcacgtatatagctcctttagtgtggcaaactgttttatcgtcttagagcgagagcgtggtaaagttgcagcgggtgaaaccgtcactattgagctatttaatcctctgctaaaaagcgaatag

SEQ ID NO: 316140 - DNA, 792 bp, Proteus mirabilis
atggccctgcctccccacgccgccgactggatgaaccgcgccgaaatcgactacattggccccttcgtcaaagcctgggccgcgttcaatgcgtggtttcgccatgcctcggcacaggcgcaagaacgggcaatgctcgactggatcaaagtccagccgaacccagttcgccgaggtgtcctcgccctgctgcgcaatgagaatggtatggccgaggcgcaggcgcttaaaatggcgatctccgatctgcaaatccgattggatgacatccacttcgaagtgacgcggaagggagtaaatgagcaaatttcacttcgcagcgtttgcatcgcgcctaagcatttcaaccgtgagcggatcgaacgcaacgggcatgaatacagggctgagaagatcgcgggcggaaacatccagatcaccgtcacctcagttcgcaatggaaacgtgaaattccagcacgttcaggtgcattatgagccgaacacgatctatggccatgcagactttactgcgaacctctctaaagcccagcaaacgacgctgcggcagttctatgacggctgcaacccgcgcccgatgcgcgacctactgcgtggtggagccgaacgcctgcaagtcggggcgatggagtttcagtgctcccctgaagagctattgtcgggattgattgaaacgatctacgccatgcgaaacgccctactacacggcgaagtagaccccgacccgagggtactgtcttgctatgagccagcttatcggatcgtaatgctgtttctaggctgcgtgagataa

SEQ ID NO: 316141 - DNA, 1392 bp, Proteus mirabilis
ttggaggggcttgaagccacggtagttgaatattcggattggcgacaggacaacgacgcgctgcggttggacagcgaataccaactcaaggcccatcgcgctgcgattgagctggtatgcacctttggcgcgctccagtttaaggacgacgcccctgagatcattcatccgcatgagatcattcgtgaatatgtcgaagaggacggcgtctggttccttcgggcgcagaatgtccgtcctatgcaaattgacccacgtaataaggtgatgatttcagaggctgatgccgacaagctgctccgcaatgttgtgaaacgagaggacgttcttgtcacccgaaccggcgccaatcgcggccaatgtgcgttctttgatcgtgacgagcgggcgatagcatcctcgcacactttcatcattcgccccaagaccattgaccctgagtttctaacgctcttcctgaacaccgcccacggtgtcgcgcagattgacaaaggggtctatggggctgcgcagcctgaggtagccccttattaccttgggaacatctgggttcccaagattagtccagcccttatgacacggctaaagacggcgttttcgaactcaaaggcgcaagccgctaaagcagaagtcggcattggtgaagcagaaacggtcttgcttgccgccctcggtcttgccaactggaccccgcccgaaccgcttgcttacaccgcccgcgcgtcggatgtctacgtctcgggccggttcgatgcccgcttttttgccccgcgtattcaggctttgcttgacctgctggccgtggacgggcgcaccattgctgacgttgccgccccacggcgcgaaaagttccgccccgatgcctgcgcttcattcgactatatcgagatcagcgacatcgacggagccggggcggctgccagcacccgccttgcatcggaagacgcgcccagccgcgccacatggcatgtgcgggcgggggacatcatcacctccaccgtgcgcccgatccgccgcctgtcggcccagatcacgcccgagcaagagggtttcgtctgctcgtccgggttcgttgtggtgatgccccgcgacatcgctcccgaggttttgctcacctatctgcgcctgccagtgatctgtgaactgctggacctgtttgccagcgccagcatgtatccggcgatcactgacgccgacatcttcaacctgccgctgccgcatatcgcggacgccgtgaccgatcaagtgacgcagaacgtgattgccgcgaaggccgctaaggcacgcgcggccagaatgttggaggcggctaaacgcgccgtcgagattgcgattgagaacggggagcccgctgcgatggcctaccttgaccaagtagagggggcaatctga

SEQ ID NO: 316142 - DNA, 2025 bp, Proteus mirabilis
atgaaaaaacaaagtagtgaattcagcgaattcgttctcttctcagaagaagaggttcgagcgcttgatgcccgagtagttttgcgtgattcgcggggcaagcaggtgccttatgtggcatgcctcgtccgcgacaaggaagtgcaactcaagcccgaggaacgtacccgccagctttggctcgctcgcctgatcgacaagcttggctacgcccggtcgcgcattgccatcgaatacccgatcacctttgggcgcgacagttccaagcgggctgacatcgtggtgttcgactccgaccgcccgaccgtcccctacatcatcgtcgaggttaagcaggctaagtataaggacggcaaggaacagctgcggtcctatgcccacgcgaccggggcaccccttgccgtgtggagtgacggcatcctggccgaagtctggcaccgcaagaaccccaactattttatgccgatccatgaactgccccgtgcagatcagaccattgaacaggtcgtggatcagccctggaccatccagaccctgattgaccttgaggaagagcgtgtgaaggaaggcaagttcgcccgctccctgcgcgacctgatcgaggacatggaagacgaggttctggccaatgccggggtcgatgtcttcgaggaagtcttcaagctgatctttaccaagctttatgacgagatgaattcgcaccggctgggcaatgccctgcgattccgcaatcagaacacagcggcgcaactgaaggcggcgatccagaacctgttcgacgacgccaaacgcaaatggcctggcgtctttcttgacgatgaacgcatccgcctgtcgcccgaccacctgcaagtttgcatcggctcgctggaagaatggaagctattcaactccaacctcgatgtgatcgacgacgcctttgaatatctggtctcgaaatcgtcgaagggcgagaagggccagtattttaccccccgctgggtcatcgacatgtgcgtcaagatgatgaacccgaaagagggcgagacggtaatcgataccgcctgcggctcagcaggtttcaccgtacacagcatgttccatgtctggcggcagatcatgcgggccatgggacgcgaagaaagccacctcttcaccatggaggccaaaccgccgcggtgcatcgactacgtgcgcaataacgtgttcgccatcgactttgacgagaagagcgtccgagtctcgcgctgcctgaacctgatcgcgggggatggtgaaaccaacgtcctgcacttgaacacgctcgactggacgaagtgggacgagacggtcaagcaggacgactggcaggacacctatggcgacggttggcggcggcttcgcaagctgcgcgagaacccgcgccagaccgattaccgcagcttcggctttgacgtactgatggcgaacccgcccttcgcgggggatatcaagcagtctgacatgctgtcgccctacgaccttgcccacaagaagaatggcaagctcgaacgcgcggtggcccgcgacctgctgttcatcgaacgcaatctggacttcctcaagcccggtgggcgaatggcgattgtcctgccgcaggggcggttcaacaactcgtcggatcagcgcctgcgcgagttcatcatggaacgttgccgcatcctcggcgtggtggggctgcacccgaacaccttcaagccgcacaccggcaccaagaccagtgtcttgctggtgcagaagtggaatgacgatccggccaaggggccgctatgcccgaaggttgaggattacgacatcttctttgccacgcagcaggtggaaagcgtcgacaactcgggccgaaaggtctatcgaaagaacccggacggcacgttcatgcgcgatacgcacggccattttgtcgtgtcgcatgatctgttcaatcacgacggcctgactgaggacgggatcgcggaagccttcgaggaattcgcccgcaaggagggcttcagtttttttcgggccgccccttcgaccaaggccgtctaa

SEQ ID NO: 316143 - DNA, 402 bp, Proteus mirabilis
gtggtatggcggctggatcggctcgggcgcagcctgcccgatttggtgcagatcgtaaccgaccttgagcagcgtggcgtcgggtttgaaagtttgatggaaaagattgaaaccgacagggcggcgggtaagctgatcttccatgtgttcgcagcgctggccgaatttgagcgcggtttgatccgtgagcggacgcaagccggtttggccgcagcgcgtgcccgaggtcgcgccggtggccgcaagccgaagctggacgaacagcagttgcgcgaaatcaaagcgctcttgcgcggcccgcagattcaggtggctgatgtggcgcgacgttacgacgtctctcgcaccactctttacaagcatgttggcattgtgatgccaaagatagccattaatacctga

SEQ ID NO: 316144 - DNA, 255 bp, Proteus mirabilis
atgaaagacagatcgcacgacacagcaatggctgagtgcttccgcgccgatccgctttatgcagtagagctgctgaccgaggtccgccgcgagggcaacccggccgagctagccgttctgttgcggcagatggccacggcttcggtagatgctgtgggactggatgacgccgaaacgggcctggcgactagggaagattttcaggaagctatgagggccctacgtcaagcatgtgctaatgatgttttgaggtaa

SEQ ID NO: 316145 - DNA, 525 bp, Proteus mirabilis; identical to SEQ ID NO: 308618

SEQ ID NO: 316146 - DNA, 252 bp, Proteus mirabilis
gtgaactcttttggtgatccccaaaatgttgacttaatgttgaaagttaatggtgaaattcgtcagcaaggcaacagtcgtgatatgctaacgcctgttttaccccttatcagttatatgtcgcgcttttttacccttcgcccaggtgatgtcattttaacgggaacaccagaaggtgtcggtcccttagcatcgggtgatatgttggtattaagtgtcaatgaacatcagctgaccacacgggttatttaa

SEQ ID NO: 316147 - DNA, 1269 bp, Proteus mirabilis
atggataaatatcagccaacaatttcttttagcatcaaaaatagtgaacagctagaaagtggttatctgccaaatgcgactttaactcaaagtggcggacagattggtagtggcaatcaatgtgactggaaaatccaagataatgaaggtgctattgccgatcggcaatgtacggtgttttggaaagatcaacacttttgcttaaaagtaaattcaggtcctgtttacattaataatgcgattattccattgcatcttgatgccgttagactgacccaaggtgatcagataaaagtgggtaaattagttattgccaccaatattagtcttaccggagagccggtacaaaatatgatggcgatgacgcctcagtctattatcgcaaaagatcataatccgctagattcattatttgatgttgatacaacagtcaaaaatgagcggaaagagcctccgtttgtaccaaccgttcagggtgcattaacaacagatccactacaggctttagaaaacgaaaatctaagcttaatttctaaaaacacacaagctacttcagacgatcctttattgagtgacccccactcgtattcatctgcctttccgacatcagataatcaagagaatactatggtccaagaatttattgatttacctaaaatcacacctaatgaaaacgaacatatgaccgatgtcgatcatgtggcagttaaccctctgatgaagggattaggtatccaccttaatttaacaaatacacagcatgctaatgattttcttgttgaactgggtaaaaccgtcaaagcggctattgaaggtttactgattttgcaacaacaacaagaaagcttacaagataagcaattacgcccaattgaagataatcctttacgtcttaatagtggctatgaagagacaatgaagttgatgtttaccgatgaacgtagccctgtacatctttcagcaccagcggcagtaacagaaagcttgcacaacatccaattgcattatcaagcgaatcaagaagctatttcaaccgcactatcaaccatgttggcagcattctctcctgaacatttattaaaccgcttttctcagtatcgacgagcttcagataacacaccaatgaatgatggctgggcttgggaaatgtacaacaactattacaaagaactctcttcatctcggcaacagggttttgaaaaattattctatgaagtatacagccatgcttatgacagagcgctgagaaaaggaatagaggaagcttaa

SEQ ID NO: 316148 - DNA, 153 bp, Proteus mirabilis
atgtcaactaaaaatagagtgatctggcgtgaagggctatttatcaaacctcaacattttcaacaacaacaacgtcatcaagattatatgacggtgagtattttaaataactttttttcacacttttggggatttagtaccttttggtattaa

SEQ ID NO: 316149 - DNA, 867 bp, Proteus mirabilis
  misc_feature (846)..(855): n is a, c, g, or t
atgaaagtgaaaaccaaattattatcattacttgtgatgggtgctctcagtgcccctgtattggcagtaacacccgccaatacattgattgtagtacaaggccttgatgatattgttagccttgatcctgccgaaagtaacgaattatcaagtattcagaccgtaccaagtttatatcaacgtattgttcagcctaaccgtgacaatccagaaattaacgagccaattttagtcgagagttggcaggctcaccctgaacaaaaatctatcgtctttaaaattaaacaggatgcaaaatttgcctccggtaatagcgtacgcccagaagatattatcttctcttaccagcgtgcagtgacgatgaataaatcccctgcttttattttaaatgtgctaggttggaaagcagataatattaataccctattgaaaaaagtcagtgataaagagattgaagtacgttggacagcagatgttagccctgatgtggtacttaacatcctttctacaccaatcgcttctattgttgatgagaaattgattgccgcacatattaaaaataatgactttggtaataattggctaaaaatgaattcggctggtagtggtgcttataaaatgcgtgcctacaaacctcgccaagccattgtgttagaagctaaccctctttcaccgaccggtgcgcctaagatagccaatattattatcaaaaatgtgcccgatcccgcttcacgtcgtctgttaattgaaaaaggcgatgcggatattgcccgtgacttaggtacagaccaaactgcagcattagcaggtaaaccgggcattcaaattttaaatatcccttctgcnnnnnnnnnncccttctgctga

SEQ ID NO: 316150 - DNA, 294 bp, Proteus mirabilis
  misc_feature (265)..(274): n is a, c, g, or t
gtgtcaacatttgaaaaaatcaataaagtatcagtcgttattcccgtttataacgaggaagagagtctcccacagcttttagagcgaacaatcaaaagctgtaaacagttagaacaagagtatgagctgatccttgttgatgacggaagtagcgataattcagcaaaaatgctagaagaagctgccaacattgaagataaccatgttattgcgattattttaaatcgcaactatggtcaacactccgctattatggcggggtttnnnnnnnnnnccaagctgatggggatctag

SEQ ID NO: 316151 - DNA, 720 bp, Proteus mirabilis
atgaaagttaatttttatgcaacctgtcttggtgatgtgctaaaagcagattcggcacgagataccgtattattgctcgaaaaattaggttgcgaagtattatttcaagagcgccagggttgctgtggtcagccagcacttaatagcggttatgttaatgatgcaaaacccgcaatgaaatcattaattgagacattagaagttaatgattatccgattatttcccctgcaggctcttgcacttatgcgattaaaggctatcccagctatcttgccgatgagcctcaatgggcgcagcgagcccaaggtgtggccgatcgtttaattgatcttaccagctttatcgtcaacaccttaggtgtggttgacgttggcgcccgccttgcgggtaaagcggtttatcacccctcttgtagtttaacgcgaaagttaggggttgttagtgaacctttaaccttattaaaacatgttgaaggactcgaaatgttacctttcgccaattcagaaacttgttgtggttttggcggcaccttctcagtaaaaatgtcagaaatttccggtgaaatggtcactgaaaaagtaaaacatatcatggaagtcagccctgattacgtcattggtgcagataccagttgtttaattaatattcaaggccgtttaagtcgtgaaaagcgtcctgtcaaagtgctgcatattgcacaagttttaatgagtcaataa

SEQ ID NO: 316152 - DNA, 414 bp, Proteus mirabilis
gtgaagataggtacgcttttaatttcttacagtttactcacaatgagtttgatctctttttcctcctttgctcaagtaaatcacgatcccctgaccaaatgttatgagttgtcaacagatgcaagccaaacaaccattaaatcttgtctattagatgaactaagattatctgaagagcagttgaatgttatctataataaaagcaaaggcgaccttgaagatagtgactctatcgcggctaaaagtgctattgatgcattagtcagttcacaagagcagtttattctttttagaagtagtgaatgccaacgtcaatctgctttaatgatggggggcaatggtgctgatgaagtactgctggcttgtgaaataaaattaaatcaatggcgagctaaattattactcactaattaa

SEQ ID NO: 316153 - DNA, 285 bp, Proteus mirabilis
  misc_feature (270)..(279): n is a, c, g, or t
atggataaaggcgctttcggttatattcgtggtggtgctgaagacgaaaataacttgcgttctaatacaaatgcatttaataaaaaatatattatgcctcgtgcattacaagggattgaattttccgatctgaatttaaaaacagaatttttaggtattaaattagatacgcctattattcaggcaccgatggcagcccaagggcttgctcatcaacaaggcgaagttgccacagcaaaaggtatggcgaaagcgggctctattttctcnnnnnnnnnncattaa

SEQ ID NO: 316154 - DNA, 246 bp, Proteus mirabilis
  misc_feature (228)..(237): n is a, c, g, or t
atggcaattaaactcgaagtaaaaaacctatataaaatatttggtgagcaccctaaacgtgcctttgaattattaggatctggtatgaacaaagaccaaatctttgataaaacagggttaaccgttggtgtgcagaatgccaatctggccattgaagaaggcgaaatatttgtcatcatgggattatcaggctctggtaaatctacattagtgcgcctgctcaatcgnnnnnnnnnnctacattag

SEQ ID NO: 316155 - DNA, 750 bp, Proteus mirabilis
atgatggaagcacagcagttctcgcaagtcgtactcgactggtatcacaaatacgggcgcaaaacattaccttggcaacaagaaaaaacgccttatcacgtttggttatctgaggtgatgttacaacaaactcaagttgccacggtgatcccttattttgagcgttttattgcgcgttttccgaatgttagcgcattagcgaaagcgccacttgatgaggtgctacatttatggacgggtttaggttattacgcccgcgccagaaacttacataaggcggcacaacacattgtagataagcatcaaggacagtttcctgatacctttgaggacgtttgtgctttaccgggtgtgggacgctctacagcaggggctattttatcgctatcactaaaaaagccttaccctattcttgatggcaatgtaaaacgtgttttagcgcgttgttatgctgtagaaggttggccgggtaaaaaagaagttgaaaataaattatgggaaatcagtgaacaagtcaccccaaccaaaggggttgaatattttaatcaagcaatgatggatttaggggcaatggtttgtacgcgaacaaaaccaaaatgcgaactttgccctttaaatacaggttgtattgcttatgctcaccatagttgggcggattatccggggaaaaaacctaaaaaggctattccggaaaaaacaacttattttcttattttacaatatgataatctggtctgggtggctaactga

SEQ ID NO: 316156 - DNA, 270 bp, Proteus mirabilis
atggcgaataccgctagattaagactgggcttctcgcctttaactaaaaaaatcagcttagcgaaaatgaaagtcgtcggcgatggtctcttggtcagagttggcaacgatgaaagagatgtgacaaatgaagccgcacaaatggtctggcaattaataattgctgaaggcggggaaataaagtggcatagagaagatggaaagatcatgaagctaaaggccaaactgattgatgacgacaactcgcagggatgcagtgaagaggaatga

SEQ ID NO: 316157 - DNA, 204 bp, Proteus mirabilis
atgccagcgattgaaatggctctaccggcttcgaggttagctcgagtacgtggagacaccaaaaactatttagcaactgtagccattcagcgtttcgctgatgctatgactgaaattttattagagggtcgtgacatgtcacaccaaataaacaatgtagtacgtgcactaaatgagatatcacgcccgaccagcgtgcattaa

SEQ ID NO: 316158 - DNA, 372 bp, Proteus mirabilis
atgtttaattcgctcattgatagtggtaaaacttatgttgttagcatgctgacagcattagccaaacttgctcaagcagatatcgaaaccaaaggtggttatcctggctggaaacctgatgcggattcaccggttatgcacttagtacgtgacacttatcaacaactatttgataaagtgccaaatatcatggtgatccatgcaggtcttgagtgcggtctatttaaaaaaccttatccagatatggatatggtctctattgggccaactattcgcggtgcacactcaccggatgagcgagtacacattaagagtgtaggtcaatactggcaattactgactgctattttaaaagcgatcccagctaaataa

SEQ ID NO: 316159 - DNA, 279 bp, Proteus mirabilis
atgataaaacaatctcccaaatatattactcctttaaatgagcaaaatgtaaataaagacaatgctaacctattggtttgcccatttgctggtgccagtaatagtgcatttaactcgtggagatctaccgatatttcagggttaaattgtcaattagttaattactctggccatggttgcagatttaaagaaccagcctttaatgatattgggttattagccaatgaattaataacaatatgggggcccaagttgcctttgaaactgctattcaattag

SEQ ID NO: 316160 - DNA, 1962 bp, Proteus mirabilis
atgctttatacgcgtaagcgttatccagggcagccatatcagtctactgataatactttattagatttcattccaaatacagtgtattcagtgactgaaataccttttcattttttatatcaatttaaacgttctttgcttgaccataagcaacctctctttaataaagagctattaaatcgtttagcaaatactcgcgaaaaatatcaacgtctgtatcagaaatttactgaacaaaccgcgttattaactgaaagtttaactaaactgcaaaccgcagaagaaaaagttcaacaattaacagcggaattggcaaaaacgcaagataaactggctgtagcgaataatttacttaatgatgatagcctaaaacagtctgtggctaagttacaaaatgaattagcacagtctaaaaaagagcaggataccttgcttgcacaattagctgaaaaagatcagttgctgtttgatgcgacagaaaaaaataaagtattaactaaacagcaagaagattttgatattcaggcacaaaaattaaatcaattgactacccatgttgctcaacttgagcaacaaaaacagcagctacaatcacaatatgggcaggctcaacggttattaacaaataacagtgctaaaaaagagattgaggtactacaaaattctttaactaatttatcagcagtgcgccaatctttagaaaatcaattagctaaaaacaaagcctcttttgaagctactctagctaagaataatcagttaattgatacccaacgccaacagatagctcaacttaacgatcacataaaaaaaataaaccaagagcaacaacagttaaatcattcgttagtgactcttcaacaacaaaaagcacaagcagatgatcaattaacacagatcccagcgttgaagcttgagttacaaaataaggttaatgaattagctgagctgaaaaaaagtttatctacgggtgagaaagcttttgatgctttgatttcagaaaaaaatggtgtaatcgctaaattagagaaagctcaggcagatcttgccaataagtatcaagcattggatacccaatttaaagagaacaataccaccattgggcaacttaaagaaagcaaaatagcgaacgataacgcttatgctcaattagagaaacaactagcagaaaaacaatcgcttactgataaattaacgacacaattaacacaagctaaagatcagttagcaaaacaaaattctgaaagtaaccaactaattgcttcattaaaacagcagcaagtagaatcgacggctcaatttaagcaacaagaaagtgttttagcgaattctcaaaaagagtttaatgaagtctctaagcagcttgaagctcagcgtgcgctaacgaaaacacttgaagaaaaagaattaaaattaagtgagcaactaaaagaaaaagagagtgaaattaaaaaaataaatagcgaaagtgcgagtgttcaaaaagagaataaaacattaaaacagcaattggataaagctatgggagaagggcagattattgcaagtcagcttgcatatgcctattcaattatcggtaaagataatgcccaacgaaataaatcaattctgtcggaaatacaaaaacagaactatgtgcaatacgatgataacacttactttaaaatcctaaaacaagggaaacctgtggattcaattgcaggtaaaacagttgttttcgctatgcatgaacaattaaccgatggtacagtaacacttaattatgacaaagctaagccgttaattttaccataccgtcaacttccactgcctcttaatacttttgttgctaaagcaggcttaaatggcaaagctaaaatttatattaaacctgatggcgggtatgggaaagatggtatcccagggcaagtacctccagaatcgatgtctatagtgacaattgaaattttagctatcaaatag

SEQ ID NO: 316161 - DNA, 1026 bp, Proteus mirabilis
atggtattggtgggactgatttgtggtattaccctgtttgttgaagtaggggtagtgctacttattccattagcattctctattgctaaaaaaacaaacacctcattattaaaactcgccatccctttatgtactgcattaatggccgtgcattgtattgttcctccacacccagcagcgctttttgtcactaatgagttaggggcagatatgggaacggtgatcgttgccggtcttgctgttggattattagcctcattagtgggcgggcctcttttcttaaaagtattgggtgagcgcttaccttttaaaaccgtaccagaagcattttctgatatggaaattcgtcaagaaaaagatttaccttcacttggggcgacattatttacggttttattacctattgttctgatgctgattaaaaccgccgcagagcttaatatggaaaaaggcacttcggtttatattgcattacaatttattggtaacccgattacggcaatgtttattgctgcttttgttgcttactatattttaggtattcgccgtaatatgggcatgagtaccctattgaaaaaaacagaagatagttttagctctattgccaatattttgttaattattggtgctgggggcgcatttaacggcattttaaaagggagtggtttaagcgattcattggcggtgatcctctctaatttggatatgcatcctattttattagcttggctagtagcgattattctgcatgcagcagtaggatcagcaacggttgctatgatgggggcgaccgctatcgttgcaccattaatgccaatgtatccagatattagccctgaaattattacattggcaattggctctggggctattggctgtacgattgtcacagactccctattttggttagtaaaacagtattgtaatgccacattaagcgaaactttccgtttttatagtatcgcgacctttattgcttcatttgtggcattagggggcacttttatgctttcttttgtcatataa

SEQ ID NO: 316162 - DNA, 336 bp, Proteus mirabilis
atggaaccgacactatgggtactaggtactctgattataagtatcttgctcattgtttttactataataaaacttaagtttcatccatttttagcactactacttgccagtttttttgtcggtatggcaatgaaaatgaacccattagaaatggtcagtgcaattgaaaatgggattgggggaacgctgggatttttagccgccattattggtttgggtactattatcgggggcggcggagcgcatcggtatcaccttacaaaaatgccgctggttatcaccggatgttattatggtattggtgggactgatttgtggtattaccctgtttgttga

SEQ ID NO: 316163 - DNA, 327 bp, Proteus mirabilis
  misc_feature (258)..(267): n is a, c, g, or t
atgaaaaaaataaacatttttacgggtactctatttgttttatctagcataagtatggcacaagcagaaatccattctaatcaaagtggccctttaaccaccatgagtgtgggggcgagtgatcccgtgactcatggccctcatcaatcagcaggtggggagccgggtgttggtatttctaatctatatggagggaaaaaaattggttttgcgtcattaacaccaaataatatgagtggtggggcggatagccatggnnnnnnnnnnatactgtccaatctaatcatcatcataataatcttggcgtttttcatttttcacaggtga

SEQ ID NO: 316164 - DNA, 189 bp, Proteus mirabilis
atgtctaaattaaaaggtaacgttaagtggtttaacgaaactaaaggttttggttttatcactccagaagatggcagtaaagatgtgttcttccacttttccgctattgtttcagaaggttttaaaacagagtttgaagttactgacggcgcgaaagggccatctgctgcaaacgttgtcgctatctaa

SEQ ID NO: 316165 - DNA, 252 bp, Proteus mirabilis; identical to SEQ ID NO: 296220

SEQ ID NO: 316166 - DNA, 759 bp, Proteus mirabilis
atgaacagaaaaatatcagaatcagataaaattgccgcccgaaacttacgaaacatttgggaagcaaaacgagaatctctgggcttaactcaagaaaaagccgcagagattatgggatttgctactcaaggggcagtaagtcagtatttaaatggccgaacagccttaaacactgatacaattttaaaattcgcatcattattgaaagttgatcctgaagatattaatccagagctaaaaacgttgttagactacgttaggcgaacaggaaaagaagaagaaataaaacaaataacctcttctacatcaactcaaaatgaacatacgactttaagactgatggatgtatatgcaaaagcaggccctggtggctttataaataacgaattccctgacactataaaatctattgagttctctccagaaaaagtattcgatttattcggtagaaaaagtttaaaagggattgaaataattaacattagcggtgacagcatgtctccagcaataaacccaagagacgtcgtttttgttgatactcataatgaattttttgatggcgatggtgtttatgtgtttagttttgaaaattcattatttataaaaagattacaaagagttaagggcagaaaactagctgttaaatcagataatcctgcttatgaaacgttttatattgaagagtcagaaatgtatgatctccgaattattggaaaagtaataaaatcacttcctattaaaatgattgattttgcataa

SEQ ID NO: 316167 - DNA, 390 bp, Proteus mirabilis; identical to SEQ ID NO: 302855

SEQ ID NO: 316168 - DNA, 270 bp, Proteus mirabilis
ttgtttgtcaaagatgataaccaagccttaaaaggtcgtctgcgcattcttagcatgaaatcaggcatggtgggtataccgaaagccaccgaaaaagggttgtccgttacctacttaattgatggcgcctcagaactaggagggatgctacgactcgagagtaaatttaattccgcacttaatggtgactatattattgagcaactgaaattcgatgttgcttcacatgatgatcctttcttttatcaggctacctgtaaacgagcataa

SEQ ID NO: 316169 - DNA, 1113 bp, Proteus mirabilis
atgataaccggatcaatccaagcttatacattacaaggcatgagcttatatgaacgtaatgacccattaaaactatccccctataatctgtatacagcacagattattgcgaatttatttgtagcaagctacagtattttaaaagtctctcaagaggcgacaaaattatctcaaacagtatcgagcaccacactgaaattctttttagataaaataaaattacctatgctaacaacagaagtgggaaccaaaagaatggcagcattaggtaagattgcaggtgccgttggtgttgctcttgccactcgagatgcattagaagcttttcatattggaaataataaacaaggtttatcaaatgtagccattgccattggttctatcatgctaatttttgttacagggggatgggctctatttgcaggactgctaatattaggaggctttatctcaagtcaactcaccagttggagtcatttggaaactttgctaaaacacagtttttggggaaatgaagaaagatcaaatttttggaataataaaagacctataacaatcgataaacaactagaagaatatgttaaaaatttcgaacaatatgaaaaacagagtattattgaattacaagaattttataatctattttatacagctaaaatgactcaagaaaaaataccaaatggaaaactccgcttatcttttgaatttactaattttatcccagggatttcagaggtatattttcactttgttacagaggttggttatcacagcggtttggcagaagaaataaaaacacctagttcagcttatgttctaaataaacgaaaagatctcttagaaattagcaaacaattaaaaatggcaagtgaaaaaggtgattggaaccctgaaacaggtatatttaaatttagtttggaagtacagtctcaattagtaaatacatattctgcttttggtgcacatcccaatagccgtataggtattgaagatttatattggtattatcaagtcaatcccgaggtaacaacaccgatgcgttatatcaattgggggggagatacccaagaaaacaatcggcttttaggctttattaacagtgagaatatctaa

SEQ ID NO: 316170 - DNA, 207 bp, Proteus mirabilis
gtgacgccgggaagttattataaaatgggggcagatatgggaaaacgtaacccgccggcacatatcgtcatcgaactggaaaaaaatggttcgggaacacacatgtatatcacttacagcgcttcgtacagtgataccctgactccggagtttgttcaggaaatatttaaaactgcgaatgacgttgcagccggaaaaaggaggtag

SEQ ID NO: 316171 - DNA, 573 bp, Proteus mirabilis
atgtatcagcgaaacacgagcaaaaaatcgcaaaatcaacaacgctttaattggtttagaaaagcgaaagaaactaaccttgccccggtgaaaacgcttattctttccgccattatcggtacgttagccggattaattggggtactatttgaaaaagccgttggctgggtcattcatttaagacaagataaattagccgaggcattaaccaacccttatcttttggctattggcacgttacttgtttcctctcttttagccatgagtggctactacttagtgaagaagttttcaccggaatctggtggttcaggtataccggaaattgaaggagcaatgatagatattcggccagttcgttggtggcgggtattgccagtaaaatttatagccagtatcggtactttaggctcaggtatggtacttggtcgtgaaggccccaccgtgcaactaggggctaatattggtcaactcgttaatgatgtctctcgcgttaaagataaaggaacacgccaaacactattagccacaggtgctgctgccggtttaacggctgcctttaatgctcgatga

SEQ ID NO: 316172 - DNA, 306 bp, Proteus mirabilis; identical to SEQ ID NO: 297209

SEQ ID NO: 316173 - DNA, 708 bp, Proteus mirabilis; identical to SEQ ID NO: 297864

SEQ ID NO: 316174 - DNA, 612 bp, Proteus mirabilis
ttggctcataaaaatcgtattgcttggatggtagacactattcgcagtcgtttaagattggataatggccaccagctgacagtacccgattttttctcatttgctgtgatgcataaactggttgatgaattacctgatgcgatattacgtcaaattttggattggtctgaaaaacctaaagagcgcagggtacatggtggttttcctgaagcagatattattccaagcaatgtaacagcactatcaacaatgaatgaacgattagacatgataagaccagtcataaaagttgctatcgatcctgagccactagcgtcattccttttgaaacctaaaatgcaacgttgggagaattcccaatggcttcaatgggtgaaaacacagccttgttgtgtttgcggacaacaagctgacgatccacatcacattatcggccatggtatgggaggtatgggaacgaaagttcatgacttattcactattccattatgtcggcaacatcatgatgagttacatcgtgatcccaagttgtgggaagccacttatggcaatcaaatcgaattgttattttcttttctaaatcgttcattaggaataggggcattggtttaa

SEQ ID NO: 316175 - DNA, 399 bp, Proteus mirabilis
atgagagatatgcaggaagttttatcacgttggggtgcgtggtcagctaatgagggaaatagtatcgattactcatcaattgccgcaggttttaaaggattaattccaagttcaagacgaagccgagagcaatgttctgatgatgatggcttaaaaataaataaagcggtattacatttaaaggtaaataatagttacttgtttcagttggttattatgtactatgtgaagaattatcctttacgctcaatggcttcaaaacttggcatttctcataatgaagtggctaagcgattgcagacagcagaaggatttattgaggggtgtctatcggttgataacgtaaaattagatatggataaaataattagaaaacacagcatttatagtcttgtgtaa

SEQ ID NO: 316176 - DNA, 816 bp, Proteus mirabilis
atgactacaacctctgaaactatgagtgacagcgaactagctaatcgagcaatagaagaattatccaattgtcttaatttccccaaaattggtgctgtcatctcaaaaaatggaattttgttatcaaccggttttcgcggagaagtaagaggtaaacatgctgaacgtgtagccatagaaaaactgagttctgaccaacttcaaggggctacgattcattcgactcttgagccgtgcacagagatacataaagaacaacgagaaaaatcctgctgcgaattaattgcacaatcaggtatctctaaggtatgcattggagcacttgatccgaatggaaaaatctactccaaaggaatgaatttcctccgagctaatggcttagttgtagagctcttctctccgtcagatcgtcaaaaaattgaaagtaacacttttaaatacgacaacttctcgtccgctattggtaatggcaaacgcagagtgcgcaaagtgaataatggaaaaaagtttactgttcagttcgcacaggacgatgagagaaagatcgaatttcgattggatccattatctatgccactcgatcacatagacttagtggctgcaaatgattcagtacgactcgcgccaggagttatgaattttagcgacatttctgacccaatgctctaccaagatccttcgcatttcgcaagattaccggcgggagaaatagccattattgccgagccacaatcgactatggtattgcttgtgaaggtactggaaatcacgcctaccgatatttcaattcaatgggaagtaaggaatatccgttga

SEQ ID NO: 316177 - DNA, 1710 bp, Proteus mirabilis
atgtatattcgtacagttaagattgaaaactaccgagccttcaaagagtttgagatcaaactttctccacttagcctaattataggtgaaaacgaagcaggtaaaaccaacctatttgatgcgctagctctgccacttaacggcaatgacattagcttctacaagaaacgcctctcggtatcagatataaaccgtgaagcaatcaaagacttttatcaagctatcatcaacggtatggaagatgatcagatcaaggatttgattccaaaagttcgaattgaggtcgagtttactgatccaaagaacattatagaagaaggcgtaatcggtaagtggataatcggagaagaagaagataatagctataggattcgctatgatttcaggcctaaagaagtagatcattttgtaaatactgtcaaagatcaactcaaagggattaaggacatcaaagacactcgctggtttaatctaccaatagagctgtacgactacgatgtaacgcaaagtaataatggattaaaggttagctactctgatttaaggcttatatctctcaactcaatcaacgccgaacgtgacgattttgccgagagtaacacacaaaaatcaaacgacattctgaccaagatgctgatttcctctctcgaggatgtggataaggccaagattaacagtgcatatacttccttttttgatgaaatcgaaagtactgagacattcaaaaagatcgttacaccagatccagactttgagaatttcttcgatgaaattgttgataagcttgaatgtatccccaacctgcctaatttaaagagcatcttatccaatatcaccttgaagtctggtgaaagctacctatatcagcgtggccttgggtatcgtaatctcatttacatttacctattatttgagtttttcaatgtcaacaaaaatgtactcaacctctgttgtatagaagaacctgaagcacaccttagtgtcaataatcttcgcttcgcaactgattttatatacaaaagcacacaaaaaggcggttcatctctacagacgctaattagctcccatagtccacaggtcatcaacaaactagagttaactaatgttatcgtcctatctggaaatgatgctatacacctaactgatagtaagaagtatctcactaactaccttcgtaaacgacctaactttgacattctaaaactactactgagcactaaaactgtgctcgttgaaggtactaccgaagagatgttgatcaacgctatcctttaccgtaacaacaagaatgtgagcagtcttgaagtaatatctattgagcaaactggcttcacgatttttatggacgtttggttacaagtcaataaaagcaatccaaagaagagactgagtatcatacgtgattatgataataatgattcgactaaagataagcaccaaaaatacgatactaataacgacaacataagagtaagaaccactagtaaatatacgcttgaagatgatctagcggaagctactggaaatcttgaacgcttaaatacactgtttaaaaagaaatacaaaaccccagaagagatgtccacgttcctgaaaaaaagtaaagcagaaaggatgctcaaaattgcagactctatcttaaacgaggagaacgagaatccaatcaaactacccacccatattcaagaagcattggattttatgaaatga

SEQ ID NO: 316178 - DNA, 1455 bp, Proteus mirabilis
atgattgaggttcaaatagcaggagccggtgcaggtaagactttcggtctagctgaaaatatcagttcgtactacaactctgcgttgcataaaaaaatctttgctatcacatataccaacaatgcagcgaaaaacatctctgaagctatcataaaacaactcggatatttgccagagaatattgtggtttgcaccgtccatacatttctattaaatgagatcatttatccttattctccgtttgttctaaatgaagtttacaccacatcctcccggtgcaaaacattctcaaactttccactgagaaagaccgacgaagataagaagatagaaaaagcaattactatcaatcgattaaaaaaaagtggagtaatgcacgtcgatgaaacttattccgcagcatggaggattgtcgatgaaagacattcaagacacagtagccaaaagaaaaaatctaaagttaggaaagttcacaaacttctaagtagcttcattgataagattttcctcgacgaagctcaggatcttgatgaaattgctcttaaggctttccaacgaatcggcgagaattcgatagatatctacatggtgggtgatcccaaacaagcaatagattatccaaaatctttcaaagattggttagctaaaaacaaagacaatgaaaaagttaaagtacttcctaatataaagatttctcgtagggttccacagagaattctcgatctctcaaacactttctgccccaaaggccaagagcaaactagcctgtcagaagttgaaggacgcctaacatatatcacttctgaagatgattattatgacgaacttctttgtcatcacattgagaatggaagcttagttagtatcttcagaaaagaaggtaactactcaaccaagcaagtaggagcattaccagaattcgatccagaagttgaaaagctctttacgaaaaaattcccagaatatgaggaaggagtggtcatatactcattgcagcgtttctttgcttctttgttatccatcaatgataacagcagatctataagtaaatttcttgccgaactagaaatcccatatgaaaaagagttatttaaaaagctttgtcgatcagctgagcagtatagttcatctaaggataattcagctaagtacgcaattagcagcattcaaagaactaagggattagagtctaaggtgtgtgtcttggtcttaacacctgcgattttcaaatacttaatacaagataaagttactaaatacaataagacttggaatatggtctatgtagcgttaactcgggctcaatctgaactagttgttgctgtagatatgaatttatttagtaaaggatataagcatgatgacattgttgagaaactcaaatctattgggtttgaaatgctaaatccaaatcatccaaaccacaaaattgaagataaattagaaaaagaataa
